United States Patent Application Publication US 2007/0237770 A1 - sequence listing, part 5

SEQ ID NO: 380 - DNA, 42353 bp, Homo sapiens
gactgtacaactcattcagtttcttaaaacaatgcagaattgtgcacttgagatgggtgaattttataatatgtaaattatacttcaatagagtcattaagaaaaagaaaacccaataatatgattaacaaaaagtagcttgttaaaaggagaggaaaaaactgaacactttgtggtcatctgtccccagtgaccaaggctgggatccagggaaacataaattatattccacacttgccaggtcacctagggccaaagaaaaggaatggtgagcaggagacagttaagagtctcacgcttttcttctcctggcatgaatatcatgcaatataagattttgtaattaatagaaaaattaatagtaattttaaaagtaatttctatcttttattttctgcttggagataggatactttgagcaagaaagataatgatgttatggaatatccagatttctttacaggaaattttgatattagaccactaaaacttctaagtgacagcaattagctaagtattacgaaatacaaaaatgaaaataaaacaggttttaaaaattagataaaaatatggattggatcatttaaaaattaatatttttcagaaatattacataatgtttcagtttattacctctacagtggctacacaaattgttcctttaattatatcccttaaactttctaagggatatttgcaagcatagtacaatgaatacctatacatccttcacccatattcaccaaatgttagcattttccatgtttgccctctctctctcttttgcgagtaagatgcatatctcatgaaactttacccctatatgaattggtgtatgtttcttgagaaaaaagacactttctcacataacagaatctactcaaaaattacatagcgcatttaatcaccatgtcttcttagtctccttttatctatttaggaaatggtcattccgtttattttattttattttactttttgagacaaggtctcactctgttgcttgtgctggagtgcagtggcgtgaacacagctcactgcagccttgaccttggctcaagtgatcctcctgcctcagccctccaagtagctgggactattggcaggcaccaccacaccaggctaagttttgtattttttgtggagatgaggcttcctagtctctctctcttttttgtaatccttcatgacattgatatttttgaagtctttggacaaattgtttcataaaatgtctctcaattctaatttcctgattgtgtcttcatgcttggaaccaggttatacctgagcatgaaaactacagaagtgacactgtatctttttcagaacatcacaaaaggtggcacatgatgtcggtttgtgccattattcgtgatattaaatttggtgatctgattaaggttgtgtccaccagacttctcaaatgtaaaactaacccttttatttttgtgattgataaataacttgtgggaatttataggtatcatgttccccaacaatgcatcacccaacgtttctcagtatctattcttgagaatcaatgattaccacagagactgtgaaatgattttctaattctgccatttcttctatacttattaattggtattcttttataaagaagagctttccatccccatcctgaacctcactctctttagtatcaggatgagcttatggccttttaaaaatggacatacactccctatattctttattttgaagctcaaattgtcccatattggccaacggaagtgccttcaagctggctcctatgtacttttgatatgtcattattattttttgagtacttccttactttcagtactgttttcaccctgtttctgaattctgccatttcttcaaagagccctccttcctcttaggcagaatggtatttagaaatcaagccctgggcaccaggagtgttttttgctacgggggtgtcactgtagacacttcagaggagagagagaggaaatataattctttctaaaaaatcatgagttcacactcatactgatatatttctatttccaaaccaacaccataggattctttccaccctttccctataccacatatgtaaccccctcccactgatactttaagcctaaaaattttaaacatgagaaaacacaaaataaaatgcttgctacaaggtaaaattcatactactgttgtgactatccattctaaacaattgaggaaagtctaaggatattcatttccaatatttaaaaatcccatgctacagcatgaatcatcattttctacttttaggaactggaggaacaatgtttatgtttatgttctcgggaatgctctcctaccttctaaattggaagtagatttcagagctagaataagcttatgatagtaacaaggcatgaaattacagaagtgcaaagtccaagtcatgctcttctgaccaaatgttggcctccttgtcccaagagggtaaggttgagaggagaaattttccacatggaaaaacactgccatagggcgtgcattaatggctgatgggcagtttggtgaactctcagaggtgtgctttttttttttttaattaaagataaaagttgtatttttaggtagaaaataagttgagctattatgtaatgactcataataggtcgcgagcttttattctacatgtccaaaagtattgaagaatctggggtacaaaaggaccatggcagctcgtaaaatggtaaaaagcattataagcaccagttagtgtatggaaaacatcttcagtgtgaatgaagcctgggaggcagagggcagataggcagccttgtatacttctggttaaaatgcatattgctctgatttttatggaaggcaacttggtcatgccctttgaccctgcaatcacatttctaagaagtttacctcaaagaaacagagtagtacacaaaatattatctctgaagatatcatcataacattatttgttatatataaaacactgaaatagaacctatgtacaagagttatagataggatacttccataaaaaaaaaaaaactagggttattggttatgtgtcaatttcatagttagggaaaaagggacagatccgggcacagtagatgcaataggatctgaattttaactaaagaaagatgcactgtcaatacatagcagatgaatgataatacagagatccatagctaaatagataagattgctataccaaatatggtttgtgctttcctggagttatccatttttctaaaataaacatatatttccttcttaatgtaaaaaggttgccaaaataaatttcccagcctagtgggaaagtcatgggcattggagacacacagcctaggcttgagttcaagctctactagctgtgttgactcaagagctgctcagtcttcccgaaactcagtgcttcctatttgttaagtgaggataacaacatttaccttatggggttgttgaggggtaaacaatgagataaaaatggttgatgcattagagaaacttaataaataatagcctttatggttatcattggtaatattattgttattcatgttatcagatctcctaagaaataaaagattatttggctgaaaaatttagagccaagattctaaagacgaaaaatattctggagtagctcagttttcttaatcaacagtgtaacatcacttactgttattgtataccagggccttaacaactatgaaatgaagtcacagtaatttataatattttttcttttatcaggacatatatattacatatatattacatatgtatatatgaaatacatatttttgataatataaataacaaaaatgttataagtatacatgacatataatatgtaagatatataacaataaaagatatatgtatcttttattgaaagatatacatatggaaagtatataaaaccatacactatttaataaataattataaaagcaatactcataaagccaccaccaggtcaagaatccccaaattcaaaaatcccatccttttgtccttcccaagctaaccactaatctaaatcttttcaataatttccttgattttccttgcaattttaccatttacatgtgcactctaaatatatagcttcgttttggcagttttagtttgtttgaatgtattcatactgtttgtattattttcttagtttttttcccagttaaaactgtctgtaacccatcatattgttgtatatagtgtgtatagatgtctttagttttcattattatataatattttgttgtatgaatattacaaaatgtatgtgtttattcactgatggagacatttggctgttttccatttagggctgctatgaacaccaatgtgcacacatgaagtacacacacttaaatgtatacacaagtttacactcccaccagcactataagaattctcctgttgctctatagctttaaaaacacttagtttttgctaatctattgggtgtgcaatagcatatcatttataaatttaaatttcatttctcttactaaagagttgaagggtttctcttttgttgttatttttagagacaggtcttactctgtcacccaggctggagtgctgtggcacaattatagctcactgtggccttgaattcctggcctcaagtgatcctctcgagtagtgaggaccactggtgcacaataccacgccaagctaattgtttaaaaaatttttgtagagatggaggtctcacttttttgcccaggttggtcttgaactcctgggttcaagtgatcctcctgccttggcctcgcaaactgctgggattacagacatgaaccactgtgcccagctaagatgttctcaaatacatatttggtcacttggtctctgtttttcatgaagtacatatttatgttctttactcacttttaattacattttctcctattttcttatcattatgtaggacttattctacatcctacacactgtgcttgacagtaatgtgtgtttaagatgtcttctccctttctgttccttgtattttcactcttgtagtatcttctgctaaataaatagatgttcattttcatgtagtaagatgtattaatcttttccttttacggttagtgcattattttttaaaaaataaacctttcccctcatcaatgatgtttttaccattcaacatgataatggtgctggtttgagggcaaaaacaaaaatcatcatgttaagaagataactttctctattttactagagatttttaaaaatcaatgattgaagtagacttttgtcaaatgtcctttcacattccactttataagatacagagaactgatctttccaataatttgacaatacagttggccctccatttccacatgttctgcacctactcatccaaccaacagtggatcaaaaatttgggaaaaaataagaaacagcagtacaattaataaaaaataggacaaataaaaaaccaatacagtataatagctatttatatagcatttacattgtattaggtatcacaagtaatctagagatgatttaaaatatatgagcatatgtgcataggttacaaaaaataatacaaataaaaaagcaatacagtataataactacttatatagcatttacattgtattaggtatcataagtaatctagagatgacttaaaatatatgggagtatgtgcatagttttataagttttattataaaggagacacatgggtgaggggcaggagggtcccagacatggagcttccaagccctctccttgtagaatccaggcacaccaccctcccagcacatcatcatgttcacaaccaggaagctccactgagtttctatgtccagagtttttattgaggtttcattgtgtaggcatgattgattaaattgttggccaagcaatcaaattcaatttctagcccctgagattgagctggtcccaagttccaaccttagggagccactaggagttgcttcattagcattatataggcactcctagcactcaggaaatcccacgggattctgaagatctctgccaggagccagggagaaaggctgtatatactcctttttatactatgaatatcaatggaaaatcacctaaaactaataagagttcacaaaaaggccaagtatgaaataaattaacaaaaaatcaatgcatttctttcataccaataaagggcagtaagaaaatagagtaaataaaaggttctacttacaatagtaaggaaatatataaaatgtgttagaataaacaatacgaaatgtggcatagattccagaagatgtagtggaaagtcaagaagagagaggaacatgagtttgggttagggggcagtaatcagagtaggaagaatagataaccatacgactaacttttaagatgctgactaaagatggcagggatgtgagtcatgtgggattaactggactcaactgtccagcataccttaggtatgaacatgaaggtgcgcaagatcatgcccaaaggttcactagtagtagatggcttataaaatacctgctcataggcactgcagccaggctgactctacttgtcgttactgacaggtctatttgagtcaccaccgaatctatcctccccattctgactgtggggaaggaagacagagaagatagttacacacttaaaagtaaaccaccgaggccagctgcagacaattaaacagtgaggtattaaaggagaaaatggaagcctaggtttctgctttacattgatttcatttcctgggaccttatactatacgagtttaaatttatttgtatttatgctgatctgaaaagaaagtttaaatttgattggcaaagcaatctaagaggaggggtgatttttgaagtacgtttttttcatttatttttctaccatcaccacctagtggagaaaaccttgaacttcagacagaggggactagggttcaggaaaaaatattactacaggacctactgggtgccaggcactttactaaatactttcacattgacaagttcacttaattctcatgacagaccgtgaggtaggcattcttattcctcctttagatttggaaactgagtgtgagaagttatgtagcttgcccaaggtcacactatggacagctcaaaacccaggttcttgaagtcaaggtctagagtcattttcacctcataggtcatccaaatagctcaacttcatccatgtatgtagctgtgggagacatgcacacacacacacaatctttgctttgtatttttcctttttattatttacataatataggatagaaaagcacaagtagaaaaaggaaatggcattatactatatacattaggttttgtttttattttttgagacggattctcgctctgtcgccaggctggaatgcagtgttgtgatttcggctcactgcaacctccacctcctagattcaagtaattctcctgcctcagccttgcaagtagctgggactacaggcgcgcaccgccacacccagctaatgtttgtatttttagtagacagggtttcaccatgttggccacgatggtccccaactcctgtccttttgtgattcgcccgcctcagcctcccaaactgctgggattaccggagtttatattaattctatctctcttaatttttactcccatagtacacaagtttcccatgacaatacttttgaaaaccctattaacaataaagttggacgtaaaattatgtctatatgcaactctactgtctaatcttgaaacatgtcctaagagacttaaggtaccaaaatactaacaatgattacaagtagacttgtagattttccacagcattattttctgaaaaaagaaattttaggccttatattaagagattcaagaaatttgtttccattttaaaattttttggatgggttaattgatcatgtggccacgttatctctataaatgtttaaaatcagtgtactgtatttccacatttagtaacacttttcttgaaaaccttgctttgagatcagccctaaaacttgttttgcaagtattcacttctgtgatgctcctgcaataatccttatgtgctcgcagtcaatgagtttttactctcattaacttgatgaataaacgcatagaccctcacggaaactgttaacagttcttaaacacagtgcagagtttcttctttctggtagcttcctgatctcgccggctcagaaatcaactggcagaccttcccggagaccgttagaggtcttaggtcagcatctcttaagttagccgttcctgccagtgggttcagtgggtttgtggtctgactgccttcagaaataaagctacaagtctccacagtgagtattaccactcattaagacaattcagacccaaacaccagctaatgcaaaaaataaaagaacaaaacacccacacaagcaaaagaaagccaagcgggtctccatcgccagctctagcagcctgcttttattctctcatctggccccacccacaacctgctgattggtccattttacagagagcccattggtctgttttacggagagctgattggtctgatttgacagggtgctgattggtgtgtttacaaaccttgagctagatacagagtgccgattggtgtatttacaatcccttagctagacataaaggttctccaagtccccaccagactcagaaacccagttggcttctcccattaatttctgaactggggctgcagcatagagttgcttgctagtcccacgtaatgagcctgcattgctcagctctggggtggtgaacggccctgggtgccgtgaggcagtaagcagcgcttctcagggaggcttgggccgcgcaggagtccccagttggggggaggctcaggcatggcaggcctgagccttgcgctgcgtggaggcaactacggcctggcgagaagtgctgtcccaagtgctaagctcctcaccgtcctgggccggtggtgcaggccgctccgagcgcgaggcttatctgagcctactcccacccggaactcgcgctggcccgcaagcaccgcgcgcagccccggttcccgcccgcgcctctcccaccatacttccccacaagctgagggagccagctccggccttggcccgcccaggaaagagctcccatagtacagcggcaggctgaagggtttcgcaaccacggccggagtggacgccaaggcagaggaggcgctgagagcgagcgaggactgagagggctgccagaatgctgtcacctctcactgctgagggacaaatgaaaaaaaaaagctcacggtcgggcgcagtggctcatgcctgtaatcccagcactttgggagaccgaggtgggcggatcacctgaggtcgggagttcgaggaagaaaccccgtctgtactaaaaatccaaaaaaattacctgggtgtggtggcggacgcccgtaattccagctactcgagaggctgagacagcagaatcactggaacccgggaggcggaggttgccgtgagctgagattgcgccattgcactccagcctggacaagagtgaaactgcgtctcaaaaaaataatgaaagctcacgatcctcttttggtagtttcacgttacatgatgattaaagtttaacttgtttctctagcgtttctattaatcttatttttgagcctaacttttttagttagaaacaactcttaaccagccagccaggcgtggtggctcagcctgtaaccccaggacgactccaaaggctaaggcggaagggtcccgggcgcccaggagttcaaggctgtgagctctggtcgcggccctgcactccagcctgggcgacagaacgagtgagaccctcaatgtgctcttgcccagatgaaataaaaattcaagttttggccaaatttcggaaaagtcttcattctccctcaattcatttacctcttctagttaccaaaaatgcctgttttgagatacatgttttaaaacgggagacttagacaaaagcaaaaaataacaacatggtaattcattcaaagatgcagaataccacacttgttttaatctgatattctttccatttctatccgtctaggacgtaattgcacacgggcgcctcccatcatttggttgctaaggagacagaaggctggtgtttccgatttgccactattacacagcggcccgcgagaagcatctcttggctcgaagcgcgctgtaggtgaaccgcccttgacttaaacgccaacacatctaaaagggggcgagggacgctttattttcatttccctgaccactactgaggtgagcatttctttcactcgcgtacttgtttgtattttttctgctgttcacgtccaatagaacactggttttctattggaggcttttgggttttttcccccatttccctttcgttacaaacgacccgctgcggccgcctcctgcttgtccccacaggcccattcaacagcccagcacggaaggccgggaaagcggcgctcgccgctccaacaacctcgcgcagtccgtggctcctccctgccctcgcgcgactcgcaggcctgggcggagggctgcgtccgccaccgcgcaacctcgcgcacgcgcaccacgctcgcctcgcaacccccccccccgcccctcccccgcccccgcaaaggctgttctcagagtcggaaatggacgcacggcagctggggcgaatggccgcggactacacttcccgaagtgccgcgcgaggtattctcggcggtgattggggcaaacggccacggactacacttacttacatgccgcgcgaggcgcctccgccgccggggcaaacggccacgaactacacttcccgacacgccgcgtgaggcgctgccagcggccggccgagggcgggcggacgcgggagctgcggacgtgaggcatgagcggcgccctcctccggcccgcgagcgtcctgctggttccccgagcgagggtctcgcggcgcggggcctagcggagggcatcgaaggcctccgcgtgcgcacgggttgctgcggccgcgccgggcgccggggagggcggcggccgccatggaggtgagcgggccggaagacgaccccttcctttcgcagctgcaccaggtgcagtgccccgtgtgccagcagatgatgcccgccgcgcacatcaactcgcacctggaccgctgtctgctgctccacccggcggggcacgcggagcccgcggccgggtcgcaccgcgccggggagcgggccaaggggccctcgccgcccggcgccaagaggcggcggctgtcggagagctcggcgctgaagcagccagccaccccgacggcagccgagagcagcgagggcgagggtgaggagggcgacgacggcggcgagaccgagagccgcgagagctacgacgcgccgcccacacccagcggcgcccgccttatccccgacttcccggtggcccgctccagcagccccgggaggaaggggtcggggaagaggccggcggccgccgccgcggcggggagcgcgtctccgcgcagctgggacgaggcggaggcgcaggaggaggaggaggccgtgggcgacggcgatggcgacggggacgcggacgcggacggcgaggacgacccggggcactgggacgcggacgctgccgaagccgccaccgccttcggggccagtggcgggggccgcccgcacccccgggcgctggctgccgaggagatccgacagatgctacagggcaagccgctggccgacacgatgcgtcctgacacgctgcaggattacttcgggcagagcaaggccgtgggccaggataccctgctgcgctcgctcctggagaccaacgaaatcccctcgcttatcctgtgggggccgccgggctgcggcaaggtgagtgcggccttggccgttgggcttccgtagttatctcggcggtggatgcagctgatggtcggagagccgggtgtgctgccctcgaaagaagccgcctgcctctcctggataagggggtgcagacttgggctgggctggggcagtgcctggtccacaggtggagtctgtgatgggtgtgaaaagggcacacacccccagattggtaaggcaggcttgccgggtttgcaaaaggacgatgtctgtgaatccatagttttacaagatgtggactcttagatttgatctgcctttatcttccatcggtctccccgccccctccccagactttgatttagtaaccgaattcgcaaggaatcagcatgtttaaattgtaaagaaacatttgtatattccgtttgtacataataacggattcagctttgaaaaaaatcaaattaattctgttgtgcttccttccttttccactagttgttggtttaacagactggtatttattcttaagaataagtttatttaacattcttatattcttgagaatatattgattttactaaatatactcatgtatttacaaaactaacataaaaactttttcatctgcaagtcattttcatccggtatttccgtaacttttctcataatgccttgtactctagagaagaaacatccgtgcattttggtgtccagttctgtgtcccttcgtgaggcgttagcgttccagatgagggcagttaggatattgtgagtctagaaagcatgtcattggaaaaacacttgagaaaaaaatggaggaggtgagccagaaaacagagaaagctaagaagtgcttaaatacaggatgcttttatccataataagggagaagaaccagcatcaggaagggaaagggagaattcagggatcaaactgtaaagagttcttgtagctttgagattcagactcgtttgcacacaaggcttttatgatttttctcctatttttctttctagctttatctcccacaacttaagcacaccccctttaactccagttcctggaatgaattgccctttttgtgccttcttgtttgcactcatgccttccctttggccaggaataaaccacatctatcccaaataacatcttatgatgatggtggtcgagttgttgacgtctgtccccatggatttagttgttaaccccatttaagggattgagcagtatcattcttagtaattgtgaagtctttacataagatcatgagaatggataatcagctgttggtggccccagacagcaagaaggtccttagggagacgagtgggtgagctcatcccacctaccaaatgccaggcaagaggtttgggtggtccaggctgctcagtgagatgggcgttggtcatttgcaagcctaggcatctgtgacttgcgagcctgattccaaaaggcaggcaggcggggatttctgaaagaagcagccacagaatgggtgctctacaacttttagaaaagaaagtaccacctttccatttaggtgcagatttgtcacagtcattaaacagtcttcagtttttcttctcatcctttagtactaataacaacattcatattaataacagcatatacatatttgttgaggacccaagaagtgctttacctgggtctccttggttttctagtaattgctaatgtgaccacagtgctgcccttcatctcctaccagagtgaacatgcagaagtggcctacagtcatctcaaatgctaggtggatgtcattggtctcaaggcaaatgctccctcactctccttttctcagctgtcctgagcttccagttcgggctgtggttctgcgatgagttctgcacctagatccttccgtgctgtctcggctagaggagggagaattttctctttggtgagaggtcacagctgtcactctgctaaatcaagacagccgttctttactgggattccaaagatcttaaagagtcacccaaaaaggaatcaaaggtggttagggacagaggagaaaaggtcaggattagcctaaggtttagctactttcctgttttatttataatatttttgttgttgttgtttttaaatgtcctgtggtatttttgattgtttctgtgctgctcagcattcttccgaggtcaagttgcttttggtaaatagtgatgctgcgtgtggtggttcccatgggtgctggtctctctgtgtcttaccagcttttcaaactccatgtatgtcatcttttctagaccactctggctcacatcatagccagcaacagcaagaaacatagcataaggtttgtgacattatctgcaacaaatgccaagacaaatgatgtgcgagatgtcataaaacaagctcaaaatgaaaagagctttttcaaaaggaaaaccatcctttttattgatgagattcatcggttcaataaatctcagcaggtatattaacttccttctaccttttggtcgttgtgaacatcaaacaatataaagtgtgtgagatcactatacaaacgctagagacttatgagctttgtttacaaagaagcgtaggcttgtgaacccatctccttcaagcctatttctccatacatttcttagtgttttttgataacaagaaaatgctttctctatctgataaatgaaatggttggcatatccctgagctatacgtatcagaaaagcacctttgaatcaaatttccagttttaggaatttttaatctaaatactaggagtcattgtgaacagtaaaataatgattttaaggtcattattttaatgggtttttaaaaattactttaacagtatttttattttgaaaattaaacaatcggtattttctgtaactccaggctctgtcttcaaggtgaatgttggaagagctaatgattactgtttatttaaatgggtttctgaaataaaaggacacaagctatttttataaacaaagccacttagagatttaaaaaaaaataaacattaaaattttattgggctgagatctgagagctatactctaaataaaaaaaaattaaatttttaggcataactttaaaaaatttttttttgtaactttttaatcatacatagaatatttcacaaaactctactgagccttttttgaacctttttgaataaaaagacccttttaaagttctgacgaggcgttagcattctaggtttcatattggaccactgactcatcttagtattttttccccataaaacagcataataggaataataataatatgattgagtgcttgctgtggaagaagattctggaagtgttaatgtttttgtgtgttcttgtctataaataaatagctgttacatataagctatgtgccagttcagcctttggtagaagatggttttctgagtaaagaaatcatttatgttgaaactaagctagaattctacttaaagctattagtctaccagcaagagatcaggcttggacgggcattccagaagatgtgtttcagacttaaaagcaagagttgtactcccccaaatattgcatctatattcagtgaatataaggctgctgctattcctgaactcgaaagataaaaatgaggaaaaggaaggaagggatagccaacttacataggattctgcaggtggctgttgactggaatcacttttttctgttttcctcccatgattaggacactttccttcctcacgtggaatgtgggacgatcactctgattggggcaaccactgaaaacccttccttccaggtcaacgctgctcttctgagccgctgtcgagtgattgttcttgagaagcttccagtagaggcaatggtgactattttaatgcgagcgatcaactccctgggaatccacgtcctagactctagccgtcccactgaccctctgagccacagcagcaacagcagctcagagtaagttgacagtgtgcagcgtcctgggggcacacacctcccagagagtctcctggcagggggccagaaagggccgggcgtcagtgaggagagggtggggacagagaagaaatgttgatccgcccgtaatgaaaataaaagaggagggaaatgttcgattatacctaacaaagttatccctgcacacttgaagatgcattttccagcctctaatatgtgtttctataattcttcaagctttaactttgctttgttgttttggttcttgggtgtttgcttttgtgcttaggcttctatgggaagccttattgatgatttgaaaggctttatgtccctcattgaatagaacaaatagatagataaatactttctagacttaccatacaactcttttgagcattgtactcatgtttcaatttctttttaacctgcagtttagcattttgttaaaaaaaaaaaatcaagtaaaaattaacttgtaaccttaaaattatgtaatcctttttgtgtagttgaaactcagtttcatgaaagtaaaggaatgttaactgaatatgacattataggctgtccctatccttttagtgacctatttctgcatcatgagtaccacatgagctcgttaatgcaccaagtgtatatcatagataatttgatttcttgggtcaggggttttccttttttttaatattagaacatattcttcagatggtatttgttcatacgttggctgaaatactgccatggaacataatctggtctgatgagaggctattgcccacctcctcctgctgtggactctgcagctgctcgtgcctgccctgaggccaagttctggagccacttttctgtgaggattaaagtacaaggcatagtttaggctcagggtttaggtttcaccaggctctccctatgtgtctggccccatttgctcctgtctgagatggagggagaattctgctgtgtctaatgaaagcattgaaacatttggcccgtggaccactgggtaggacagagtggccttgttttggaataccgttgtgatggggatagccattacatctgtggccacaagcagtgtgtggaacctgtggtatcagccacatggactcatactcagaagtgctttatgtggtgggcatttgtcagagcctaagggggctgccagctcctcatatgtagtacaggttgagtatcccaaatctgaaatccaaaatgctcccaaatctaaagctttttgagcaccttcatgatgctgtgaaaggaaatgcttattggagcacttcagatttctggattttgggtgctcatctggtaagtatataatgcaaatattctaaaatcaaaaaaataggaaattcagaccacttctggtcccaggcacttcagatgtgggatactcatgtgtaggtttcccgtaacagaattctcattacagacgcatagaaccacatggtaaagacaaattgaaagaaaaggggggaaatcctaacatgtttcatgtttctgtgtgttctttgctctgtgtactggttatcgtaatgtatctgcaacttaatattctgcatgtgtacttgtctggggtgatttttattgatttcatgtcatcagttcatgaaatagaacatgaaatcaataattaatattgatgacatgaagtcaataataatcagttgttactcagataccctcaggttttttcacctctccccagtcactgccatgcaggaatttaaaggaaatgagaaaggcggcagccaaggagctcatccttgtgagaagaatttctatattttattattaaaaatcctcaggtgatttgcaggcacattaaagtttgagaagatcaagtgaaataattaagatttagttattgaaactgatataacaatgagctagagattgtttatctgctaaaattgcttttcagagaaaacttcccatatccagtaaatgatttactatttccactaccgcttgcttagacttgatcccaattatatttgctatcttgtgtcccccgctttcctgggaagactgtgaggacaggagcttgtccctgttcatatccccagcacagtgcctggcacacattatgtgctttgtgaatggtttggaaatgaataaatcctagctttcgatatgagaaaagtagtttaatatgttttgcattatccagcataagggataattacccaggtatcaagagcctttttctttaatactattgcccttttcatcagcagcaagcagagtaaaatgaaagaatgttaagcttaaaaccattaattggtcaacttgttagcaattctaacaagaagttaagttaggagatatcataggccacagaaagaactcttacaagtgatttccgaatacaagtacctgccaccccaactgtcagggataattaagagtggattgggatgtcttttagttgttttaggtaaaattttgctttccaatccctgttgacagctatatatacatccttgtgcatataaatcagatttggtgacactaatctagttgaaagaaaagacttccaaccccatatacttactttctctctccaggaagctattggtgtgcatttgtattcttgtgtcatgttttggtgccctagatagcaactagaacatttacagagaagtcccaggctgttgaactgcacgtgagaggaggtgagcagggcactggatttggaaactaatcaagctgccgcttagccgttcttgattgcacttgaggaattgtgagttgtcacacagtatactcatgtaagtgataaattcccattaaagtgaaataagtgttctttttttaaaaaaaaattccctcctgtagttattattcagtcaaaattgaagctcctgcatatgctaggcattggctgagggttgaaaagcttgttcctgtgccttcagagggagcgcagtatgatgaaggctaggggagcaggtccacttccagtgccacgcttatacgccaagtgcagtgggcgtagagaagcagcattcagaatatgtgaaatccagtatttcacctcctagatgaggggatgcggagttgagttttgaaggataagcagaatttaactgagtgaaatagaaagctcattgtctacgccatagttgctttggtttgtatggctaagcagtagtgttcaggtattttgctctcccaaaaatatttggatcacatgatacaaacagtgaagattctgtctgctctgggttaattttggaggccaggaaaaaaatgtccatgattcatgatacgaagaatgagcttgtgctgctgaaaatgaaaaagtaagctagcatttcgtcatcctgcactacttgctgctttgaaggaatatagattcctaggtcatagaatatatacatagtcaaaaacactcctaaagaatcaattatttgtgaaccagatagagtatacaagtctttggagctcaagagagtgaaatgagaagccataactgccctctgcctagctaggctgagttccgagaggtggttggaagacagaaagtggcgtctgtccctgggtaagggctgtggcgtaactgggtgtggggcttttctctaatcatctggagaggagagcccctgacaagctggcccccaaacaaggtggctatggattcttctttttataaaagtttaaagtgtcttaaataaccttttgtgccattgaatagaaagaaaggtagtggaactccagaatacaagggattggccagaataaatggttggtatagagtagatgtcaatctttttatttaaaaattttttaagtacattaatacagtacattaacatagctgttttaatacaagggtgcattaaaataatgccataaaagcaccagcagccagaaccacagatctcatggtccttggatgcacttcctgtggctgctgtaacaattgccacaaactgggtggctcagaacacagagctttatcctcacagttctgaaagccagaagaccagaatcaaggtatcaacaaggcgatgctctcatccagcatctgatggcccttggcattccttggcttatgactatgtcactccagtctctacatccatcttcacatggtggccttcttctctgtgtccttacgtcttctctttttctgtgttttgtaaggacatttgtcattggatttaaggtacactctaaatccaggatgatttcatcttgagacccttagttacatctacaaagaccctatttccaaataaagtcacagtcacaggttccagggattaggacttacatcttttggggtcactattcaacccactacagacccctaccaagtataatgtaatttggaaagacatgtgcctccatgggattaaacagaaagacgtcgtcatctgaaatgtaccttctctctttgtggagaaagtcagttttgttttgctttgctttcactctgatgttatggaagcggcagcatctggggctctcccttggatatgtgcagttctggagagtatgctgttgcacagtctgatgagggtgattctcctcgctgttgataccaaagcagtatttgtcgagtctcatgacatggcaggcactgctctaagcattccacatgtcttaatctcattcagtcctcaatacagctctgcaaagtagatctcattacctcctatttactagatgaggaaactgaggcacaaaaaggttaagtaacatgcccaagaccaaccagcttcaatgtgatggagccagtgtttaaggcatgtctctgtcttctcagtgacttcaagtgctacaaggggtggaggtgccaagtttacagaggatggacccactgctcggtttttctgttctgacttttctctcttggcacttctttgtgtaagagcagcaggagagccttttaaccagatctgcacatcacacttccctgggatacattttagaaacatgccttgcccagggtctgcccctggagatttgagctcagtctatggtaggtaaggtacatgtggctgtatttgtgtctaacttgatgcatatccctggttgaaacttctacacagcagttatcaccctgaccatgaaatgttccttttccttagtggaagagatttgtggggtttggtttgtaatttagagagggagagtttaaccaagccatgcatattctttcattctgccttgaaataacaggtacatttttacttactgcactccttctccaacttacatatccagctgtctaagtagtatcctccaaattccagtattacccaatgtgtagaaagcttcaggatttaggcacctggaagaggaaagaagagagcttcctatattcttctgttaaaattaaagcccttctcatcagttggagaagccaagctctcttaagtctgtttctatctctaggttttgttaactagaaatagaatcttttccaatgcatttattttaaccaattttcccttattatgaatagtgttttattataacaacataatttacttcctattgtttatttccatgtaggatgttatgacattttgggcagtctatccccagaatagattttacctctttttattgtattctacctttggaaggttatttttaagtgcaaaacactttataaatatatgcttaattttaatatatgcttaaatttaaaaataattgtaaattctctagactgggaacactccttcaaaatagtttgtgccgcagtttgctgagggattttgccaatatcaatacaactatcccttcatcattcttggcatgagttctctcatgggcttcccattctaagatctcagggtattttagtatatcttacttcgttcttcagaacttagtaaatgggagttcaagatatattgggtgtttaagtggaacctttccctgctcagtcgtcttcacagtgaatctccattttgtaattttcttgtgtgatcattgtgagtgctgtcagcaggtcctgtattacttggacagagttgccgacagattgatctgggcctcgaaatactttcttcttttggacggggtgaaatttaaaatgtggattatacccaaggggaggaagaagaagggagtggcgcgagctcaggtagctttcgttgtggcagcacctccattccccatgactccaaaccagaagtgtggaaccacttgtactttggtcaggagtttaaaagccaaaggaagaccttattttccaaccacataaaatacataatcattgctaaagacttattcacagcatactgttgataaatcaatggagtagacggctagctggcttctgtcctaattaataaggcctgcctccctgtctgtatatgaggactaatggaaatgaggcagtttatactagtaaataccatggtatataaggctgcccatctcgtcactgtccaaagagcatgccatgcccctaaatacatacaaaagacaaattcatggagaagggatacataccaaaatactaacgtcaaggtagtctagcagaaggtgaattttctccctttgtctatttttaaaatttaatgtaaatttttttaaagtaaatgttgacaggtctgagtagcttgtttttcaaacaattatttaatggttaaggatgtaaaactatgtaaaatatggtcccagtttttgttttaggttagctgtaaggttgatggttgcatgggtgagtggatcgtaaagtcagcacttggcacagtagctttcattctgctggaaatatcaagtacatttttatctctcagtgctggaaatatggattctttttgttttctctatactttccatataatttataagaagtaaaggtttcactctgagattatgataaaactgaagttagtccattcattttgcaaatattggatgcctatcatctaccaggtctgggaatacaaagaataaaatattcctctccttgaggtgctccgcatagtagggatgatgaatgtaatgtaatcaacacacaatccaacccatggtgcaggatataggctagttcagtccgttaggatccaatggggctcctgctttgactcctttttcttccctcaattgtcctgaaggctttttgttgctaggcagctttccaaggagagagaatccattgtttttactagttctgaggcagaaatgagatgcccaagcagtttctgttctccctacctgtcttcccacacaggttgagtgcagtaaggggctgagagtgcacccttccctctcaggcatgtcacgtactgctacacccctgtgatgctggtccttccccatacattttctttagtatatgttctgtccatcattatcttctaaatcatcttccagaagacttgctaactaatttctggttgagaagtgatccccaggctttatagagtgccagtgacatggcctcggtgtttgtttttttgttgttctggtgaggtctgctgagagaatgctaccatcaggagagaggaagatgggtctccaggctgcaccactggctctggggcccaggcagttggcatgagtgaggagagagtcatttgttgtaaagctggggctggccagttgtcttaggtgtggtgagagacccacaaggaataactggaaatcaactttggtaaatatgggggtgagatgaggcatctttaaggcattgggaacaaatccttccgtgaatgaaatgcagattggtgttatttgggttactcagtgagcagagtagtgtcagtgagtgggtgtatgctgaggagttctgcattgatccagcaggcaagctgggtccccttcggaaactgccacccctccccggcccagccccgttggtgcctgtacattgttttccaggtagctgattcggacagtcctaatgggcttattatttactgtagatgttctcagctgaatgttgatgacatgggtgaactgtaactgaaaaattttatttttttgcttcacaaatgtgcagctagcagctcagccaggaataagaccccactaagttatgaaatgtgttagatgtcttgtttaactcaactagggatagaaaattttactgagtcagccttctgatcatagttagatcttatttatgagggtccaaatttagaaatgtgactgtaagttttagtcctgatgttcagagagaggttaggtggcttacccagggtctcatggctatgtaccagcagtcttctcgtcgcttcccaggctaatgacctctctgctaccctgtgcggattttgcatgattagtgtccactatgagatgacctactgcagcatcccaagattccccaggccaagagaatcctgagacctgcttctaggacctgctgtgctcagagtaactagggacccaatttgttgtttttaaaatgaaggaattgaactgcatgatctggagcccttcagagctaatattcagatataatgctgactctcccctgtgtggaaagtggtctaagcacatctgtctcatcggatgtaggctgcatttggaacatgttttccatacacggtaatgaggtgctagcatttctaataaagttttcactgttgtgcagggtagaaccagagagaccacctgtcaacagtgactttccaggccagtcagtgtctgtttcacacagacttagatgtatgaacctatgcagtgagataccctcgacactcataagatacagggcgataacctggtgacttaggagccccagtcagttcgtagtcttgatgatgcttaagcacattgacaaaggtgagaataagaggcaaaggccttgaactcttcagtgtccttgctgagaagtatgagtttctaagacatgtgcagaacaagaagtatgcagcctgagtgtgaccgtaactaaccctgcttgtgtttcaggcccgccatgttcatagaggataaagcagtagacaccctggcttacctcagtgacggtgacgcccgagctgggttgaacggactgcagctggcggtgctggctaggttaagctctaggaagatgttctgtaagaagagtgggcaatcctattctcccagtagagttctgatcacagagaatgacgtgaaggagggcctacagcgatcccacattttatatgaccgggcaggtaagtaattcacctgtggaaagagtgaaaccatacggaaagaagtgtgtgcacacattctcatttccggaagcctgactgggttccggaagcattccagctgggtccagagcattccagtgattctcaggtggatctgcatgttggtattaagccttctacacagggctgacctttccgaagagaggcatgaagcagaagctgccctgttgagaatctagaggagttttggggttggaaatggcaggctgcacattcaccttagaaggtagttggctattccccaccttgcagaatacaatcacctttgaaagcctgtgcattcacttgacaatgaatatgttttgtgatcatttacaacggcagtaaataaaaagaggacttttgtcataatgacttattagttttaattgagaattaaaatgctttatttctagagtctatactaaaaaatagtcatggatcttgaagtttttattttatgtagtagctttttcaaaaatttaattttgctgtgtgcacttatctgtttttgtagaactgcatttacagatagcagatttgataccagctcttattaaatctgtgacttagcaatattaaatgtcattagcacagcacatttgcatctttttataaaagaagtgggagatgaatataacatactgtagattagcaaacttctgctgcttgagcatttgtgggactttggatggaatcatgttgcagtaactgtggaatataatttccacacttttcaaagctctgccagaaaaggaggctgataattgaatgttcctgatctcacgtaggctgtgccacgtgacaatggagagtccttactggttagagaaggggtggaggggcttaagaatgactttggttccaagcgctgcctcttcgtgggtgagcacactcgctgcatgacctaggggggctgaccaaagctttttggctttagcgtgcctcagctgatggtagctcaggggtgttcattagtgctaaggacacactggcaagttgaataaataatcctgtctacattgtgacgtgaatgtgcctcagcggggcctgctcagatggctggctctccctagtgctctggagcatgacgtgaatgcttgcaaagtctgaaaagcaacacattctaggtgtgtagagccctgcttgacttttggtcaaatagaaaaaatgtagatatgaacaagaaaaaagattttaagacattaaaaaaatctcaccatgccgggatcgccattgtttctgaagtgcagcagcagcggtctctctctctcttcttgtaggtgtcccaaaggatttgccttgttttgattggaacgactaggactgttctttgacattttatcagactgtcacttgagatccatataacatggcattcactaacactcagccattgagtattttataggtgtattcattttttaaattctcaaaattgctttatggagatagctattaatattacccccattttaagataacaaagcaagtggtgaaactgacccgtaaatccaggtcttactggttcccaagactgtccttccccccgtccgcatttgcctccacaccagccttgccatgctgttactgatctcacccattacatcatgctcctgagaggggtcacccgtccatgcacatacagagcggatcttggaggggttcagtcctaggaatcccacttcctgagctccacgttgcagagctctgcacagtggggatcaccttgtctatagcttggagctggggggtggtggaggctgcctagtgccgctgcctagtgccagcgccttaagaaccccacatcctatacatcttcccagtatgagtgtgtttacacaccccaccccagtgcaacatgtctgccccacagtggatccgcagacacataaatatcattcagatcttggagaaagctgcttttacaggctttgctctataaatagggatagtggaagcattgccctggaaacctgttagcttatactcttgggcctttttataactccagtgagacaaagacccacccccagagttgtgattatttttgtatatgccacctagttcatagttacccactagtaggatccagtgatgtttctgcatcagagtgaaggaatttctaaatgagagcaaactctctgccatgcattgacatcggggttctatagaagtcgtcaaatttcaggttataaagcagtgtgtaataaaagcaaacatggaaggtagcatagaataatactagtatctatcactgatgcaaaagaatctttttacagtgcctgctctgtgccaggcgtgtgttatttaatacagccctgtgaggtaagtggtctcgtttttcccattttacagatgagaaacctgaggcacagtgaggatcaggaacttgcccatggcccatgagcttgggggtccagcccaggctgtttggtcccagagcctgtgctcttgtccattatactggtggtattgcccctggcattgacaaagtgggaaaagatgactaacctgtgtagggggagtttaaatttgacataaagtggtgtgggtagtttcttccagcccccatgcccgtgagtttagccaggcctgttacctgctaccctcttccccgccttcctccaccctgcagaggagcagagcgtagcctgagtgcctgggccagcagggtgagggagtgggccagaaccatgcagatgtcatccaggacaccctctcggccagtgtccatagcactctgacttcaccaggggagccctgcacaggagacactcagtttgttctcagaaatccagtagctgggctgacccatccatctgccctggctctcagaaaccagaatcactcaggctgagccgtgggtcctgcaggtctttcccctgtgggaggccagcatcttcgcttgctctcttctccacctgaagaccaactgtcatcttaccagcgagctcagctgccagggtttgtggctggcgccagtcgtattgtggacatgggcttatgctgagcacagaccaggtgctcctctgggaggagtgagactcacgggaacaccatcctccgctttctcgtgaggagggtgccccctccttgaacttacctaagggacgatggccagagaatagtgaaatgtatgcaggtgccactgcttagttcctgagaactgtttagctgtcatttttttgcccttaaatatgcctttttttaaagcacatttcactgatttcatgtgaatctagggtaaaaatggagtagtaagaccaggcggtgagagagtgggcttccgtccacttcagggcggaagctggttagtccacgtgtcggtccttctgggaccctgccacacaggtgtccccacaccaaggctggcagaaggaggtttaaatgaccacaggcttcggatatcagaaaggcagctggaaatgacactgaggaacagatgggctataacagctgcccttgccacttggctctacatcctcctggctccgagcaggcccaccgttgcttttcctccagtagatggtgggccacgggatagagccagaacagaagactcgtcccccctccactcttgtctctggcaaatccaccagctgggaggaccacctttcctccctcctgcctctgtgcgtgtgcgtgcactccatgtcgacagccacaggtttctgctgcagcagcctcttcccctgaataggactgggattaagccccagcagctggtgcaccccactcagagcacggttaaggcagctgcccaaacctctcctcggctttctcagggcctttattcgttcaggctttctggaagtcagctggcggaggtgaagatggcttgggcgcccctcctgtgagctctgtgtgagtggtgctctttgtgatgtcaggtgaggagcattacaactgcatctccgccctgcacaagtccatgcggggctcagaccagaacgcctccctctactggctggctcgcatgctcgagggaggagaggacccactctacgtggcacggaggcttgtcaggtttgccagcgaggacataggtgagtgtgatgggagggtcccggagtcctatgtccatgagggtggggaaatggctaacagttacatcgtggctttttttttttttttttttttgcagggcggggtgggcgggggtagcaggaagaatgtctcagggctatgtgagactggcaggagaagataagactttatgcctgagctcagtcgtttatttcctggtgtatgtgcttttgaatgtttatgttcataaagtcaccattttctgtttcctcttcgggaatgtttttactaacatgagtggctattcagagtattgcaatagatgagctgcttttaaatttgctttaagtcaggtgttcaaggttttctttggacagctcccaaggtagaaatggaagactctagacactatatgaagaaaaagatcaggaaagctctcctcttctttggtcttaggggatgttttgtttttagtgtttccatcctggtgaatgtctccatagccttcacttcttatgtttgttatacagagactcatgtttttctagatgcagagtttttatccacaaggaaacagttcttaacaccacacagtaaccactctcaatatttcttgcataagttcatgggatcagagactagagctaagtcaggctgttttgctacatgggattgttttggtcaccaagtgtacaagcagtggtggtctgtggtcgcctgcacataggccaggaggacagtgtgtgtcatgactgaaactctcctttgtctctgtgtgtggcaggtctggcagacccgtctgcgttaacacaagcggttgctgcctaccaaggctgtcattttataggcatgcctgaatgtgaggtaaagtaatcagctcatttcttgcaaatcacttcttttctctctcgtgctctgtccctttgtagatttgaataaatgtccctccttcaccattggtgtattggacccactgagtatgctgcttggctttggaattccaattgtagactcttagactcctagagagggaaaccttctgtgtcaacgaggtcatgtttcaaactgttctcgggattccggggttcagagcacatgctccatatgttccagggagcagaaaggttaaaggagctgaacagcaaagcctctgcaagttcgcccccagagcagcttcatattcatctcttttatatattgggggcttaagaaaaatttaatgtagtaaaaagtccttcagttaaaaaaaaaaatgaaaaccactcacctggtttgcctctcgtttcacctcatgagaatttcttctgtctgtcgtaggtggttatccagactgtaggcgcaaaagggggataataaaagcatgtggggatcttctcagaattacctagagctgtgtatcagaaggggctctgcagaacagaagcttggcatcttgctagtaaaatgtgtcctctgtgtcattggtaggtgcttctggcccagtgtgtggtctactttgccagagccccaaagtccattgaggtgtacagcgcctacaacaacgtcaaagcctgcctgaggaaccaccaggggccactgccccccgtgcccctgcacctgaggaacgcgcccactaggctgatgaaggatttgggctatggcaaaggctacaagtacaaccccatgtacagcgagcctgtggatcaggagtacctgcctgaagagttgaggggggtagatttcttcaagcagaggaggtgctgactcctcagggcacgacagcagaaggatgttgcttttttaagggagggccagaaagaaagttagtggattgcaaagttggttgcctggtggaagttagaacagaccaacattttgtgccagaaatttaagagttccataggtggaggcgcagttctttcgaataaatgtgtaactttgaaattgtgttcatttgcactcggtgcagcggttatgcttatgaaaatacctggcagctttgtgcaatgaattaatgttataaggaattatctattttgtcatagtatttaagtcataatgtcatttcagaattcagttctgtaggattttcttttctttaaaaaatgtatattctgggtagttttaattggtaaaaaaatgtaattgtgatttaatactgcatagtgttttgggtattttttttatatgcaaaggtcttacgagccaataaaactatttcaaagtactcttcgattctgtcatggttttcctgcctggatgctaggtaccagcgttgtcaccattgcatttggtgggtggatactgggaaggagaaatcaccccagatgggaagagtggggagcttaagttaagaagtcagtgttatcttgttgaaagttaactctgatctctttaaaggaatacataaaggaattctttaaatggcttgtggaagactccagtagtcccatgcccattttttcccacttgtcctggtttcttcttgcagctccatatttctaaacagtcgtttttcttttactttatgtgtgtcctgaacacaaaatacgccactccttctgctcagttaagagttatttgtccctactgctacttcctctccctctccttagttgcatgtcgtgcatatgcccacaaggatggccccttcaggtagtcggttctcctcctgccgttgcgtgatccctcctggggtcctcctgccatgtctggaaggctgccggctgttggcctgggacgtcctctgcctttattctgagtgagatgcccattttctggatgctccatcccgccttactggtttattccgctatttcagtgcaacccatcctctagtagttttatcaggctggagggactgtatgttgcagaggcttggcccgactggcctccctccttctgtctggagtggttgcactgcagtgtgcagttgccatccccagaatctcccttcatcatcaccctggagctttcctctgcttctccctgcaccccatctgatgacaggactgactgctttctggcacaggtggcatgtaccctctagtagctttatggagcaggggtgtgtggaggaaaagtatttttagacctcaggagactcaaaatgcttttattgtaccttcagacgtgtctgagggtttggctagtaataaattgtaggtaagaaattacttgtgcattgttttacactttcccacattgttgtcaagtttgaaggcatcctgatgtgtgtggtcttttgtttgtaacctctatcaacttgtagactcttctgtctttgctccccgtgttttaaaagtctgcactgggtacttgttgggcctttcaatctggaaactcctttcagttctagggaagtttctttttttattcaataaatttatttatttatgagaccaactcttgctctttttcccaggctggagggcaatgatgcgatctcggctcactgcaacctccacctcccaggttcaagcgattctcctgcctcagcctcccaagtagttgggattacaggcgcacaccaccacacaaggctaatttttgtatttttagtagagacgggggtttcaccatgttggtcaggctggtctcgaactcctgacctcgggtgatccacccacctcagcctcccaaagtgctgggatgacaggcgtgagccaccgcgcccggcctcaataaatattgagtgcctgttttatgctgagcattcttgttgatgttaaaacacatcagtgagcagaagagaccaaaaattctgtgttcttaaagcctatggtatgaaaaataatatgttaatatgccaaatagtgataagtgctatgctaaggagaaaatgaatgaaagattgaatatggaaaggggaggtatgggtgcagttttagtagagtagccaaggtggatctcaccaagaaagtgtttgagtcaagacttcaaggaagtgaatgtgcctttcagacacccgggaaaggatcatcccaggcagagggaaaagcaagtgcaaaggcgccgagggaggatggaaggctgggtgggttcagcatccagtaaggagaccagtctagccggaggggaggaaagagtggtagaagtcgaggccgaggatcatggagcttcagataaggtgggaccttttaggtcatgggaaggactttggcttttactcaaggtttccctcaaagagtgtcatgatgagactttgatgttatagggatcccttgccgcagtgttgggactagacggtaggtagggtcaggctcatcttttcagtcaagtaggtcaaggcatggctccctgcgttctcagcgccaggtggggaaagaggaaagtcgtcatacatcactcagtatgtgcctaccactttgatcttctgactgaaatggtacccaagcccctggctctatctgggcccctctggttcagagatcttcccctggcctggagtaggagagggtgtctggagacccatcttcctcttccttacctgctgccacctcccaagcctctgagacgtctgccacgttgatgccttggcattccccactcgacttgccaggtcagttaccatttgcccgccatgtttccacctccagcatcatgttgccattatctcacttgttctcctcactttcaaggattgatggattttaaggattcctttactgtatttttggtggaggcttaggaggaaataaaatcacatgtgggtccaatccattatctttactagtatttcattaagaaatgtatagcccagttttttcttgatttttttttttttttttttggagacggaggcttgtgctcttttgcccaggctggagtgcaatgacgcgatctcggctcactgcaacctccacctcctgggttcaagcacttctcctgcctcagcctcctgagtagctgggactacaggcacacaccaccacgcctggctaatttttttgtattttagtaaagacaaggttttactgtcttgcccaggctggtctcgaactcctgagctcaggcaatccgcctgcctcagcctcccaaaatgctaggattacaggcatgagccactgtgcctggccaattttgattctttaaaaataacatttttacaggccaggcgtggtggctcacacctgtaatcccagcactttgggaggccaaggcaggtggatcacgaggtcaggagatcgagaccatcctggctaacaaggtgaaaccccgtctctactaaaaatacaaaaaattagccgggcgcggtggcgggcgcctgtagtcccagctactcgggaggctaaggcaggagaatggcgtgaacccgggaagcggagcttgcagtgagccgagattgcgccactgcagtccgcagtccagcctgggcgacagagcgagactccgtctcaaaaaaaaaaaaaaaaaaaaaatttttgttgggggatggagttacttccaaataagaagtgtgcttgtgatgtaaccggaggtgacattaactcctcaacaagcttttccgtcatgactcactcctgccagtttcccaagggacggatcccagtggtggtcaaggcacaggtgtgaatttatgccaggacgatatgtgagcatcgtaactcaagccaacagataagtgatgagggctttttgagatccatcatcctattagacatgcggccctgaacacagtgtgtaacgcggacacggggcctgtgctggagcacgcggtgctggggagagcctgcagcacactttctgctgtatccagcagcggggcactgagcagccaactttctgtaactgtaaaatcaagcttgaaagtttgcaaatgcttgttttttggtttcaaagaatcttattttgtgaaagcagatttttaaagtttttaaagcagatattcactgcctgaatgaatacctctcacataccacagtgagcatgactgaaagtttacaccattagctaaaccctgggaaaaactaatgcagtgagtcagagtttctggtgagggaggcacatctcttgcctgtttacagtagtattcaacaattgggggcagcccttccatatgatgccatttaaataccacaagttatgggccaggtgcggtggcacacacctgtaatcccagcactttgggaggctgaggcgggcaggtcacttgagatcaggagtttgagaccagcctgggcaacatggtgaaacgtcgtttctattaagtatataaaaattggctgggtgtggtggcgcacacctgtaatctcagctactcaggagcctgaggcaggagaatcgcttgaacctgggaggtggaggttgcagtgagccgagatcgcgccactgcactccaggctaggtgacagagtgagactccatcttaaaaaataataataaataagtaaataaataaatatcacaagttatgtactgattctgaaaaagcaacataaccaccaaacacaatttattccttatgttccaagtgtatttggtagttttgttcaccctcataacagccaaacctgagtttaagaacagtaagaatagtgacttgcagagatttgttccaattgttacaacaagaatggatgttaactcatcttttccagatacaagtcatcaaacctggacaatgttatcaattaattccaaatgagagaaccggccttttgatactgatgttatattagaaaggatgattttcctatactttcatataaatgccatggatctcttactttttgatgaattaacctttgtgtagcgactacagtttgaaagcactactacacattcatagatgcagttccaggcagtttgagcccacaaaggcatttataacttaagcagaaaccaaacagaagtaaatatttttaatagagttaacaaatcttcataaaaaccaatcatttaaaactaaatgttttgaagctctaaagccagtcaggctccggggaggatgcagatgatcccctcaggccactgagaaacttttaatcagggatcacaagtattagagaggtataggggaggttcaggggaccaacacaaggtgagaagcaattccctggcaaggcctgagaggcaaggggtgggagcaggcagggagccctgggagagcaggaggtggccggcagccttcagacaggaactgcggccctgagtggaggcaaagaactcagcagctgctgcacctcttgagtagggaacctgggggtaggagaaggaaatgcatggtctgaatcctctctctcttgccctcatctcctgccagtccctcccactagcaggaccaaccagaagtttccctggttaaaaagccaggcgagaagggtggagaatacccagtgtgcacagatctctgaaatgagaactactactgctctattttaggagaaacaaaattctttctgtgtgattgtataccttgagagccaagaagaagagtccgaacagctaacagtccagtaaagtggccacatggaaacaacccatgaaaatccatagcttccgggccactactgtaatcagaaaagacaccaagaagaatattccattctcagtagcaacctggaaagaaactgaattgtaactgaggagtaggacttacatgaagaaaactaccacactataccctactattgaaacacaagaaaatgcgaacgaaagtagagagaagccgttttcctcaaagacgtcatctcaaatttatttttacattcccatcatgcttggcatgtagaatgtgatcagtacatatttgttgaatgacaaaatgaggggataaataaactttccctaagatgtgtatgtagacgtttgaaaatagaagtctgtcgctgatgtttctgtccaccaggagtcaggcttcagccaggaaagagtgagccagtgtctgagctgtctctcaccaggccttccaccagctccaggtcaccaggttcaggccaagactgagtttcagtatttgtcgttaacctggtagataaataaacagttttaaagtagagcttatgtatttgtctgattgcaaaagtaatacatgatcattgcacataggtacaggagcagatgcaaaaaaaaaaaaaagcagataaaagatagtaaaaatcaactttaacatttaatattttttctcagtgataaccactgtaaacattttagtgtatgtcctttgggaattttttccaatgagtgtgtgtgtgtgtgtgtgtgtgtgtgtgtgtgtgtatgactacaccatctgtttatagcttgctgtttctcaccccctcacatgatttcttacatgcagaattagtctcttagcgtatgacttttcatggttgagttggagccaccaccagggagctgcacccttccggtggtgcaccccaccagccgtgccatccacagagggtaggacacaccagacacctagtagctggatttatttattatattttattttatttttgagatggagtctcactctgtcgcccaggctagagtgcagtggtgcaatctcggctcactgcaacctctgcctcccagattcaagcagttctcctgcctcagcctcccgagtaactggaattacaggcacctgccaccatgcccagctcatttttgtatttttagtagagacagggtttcaccatgttggtcaggctggtctcgaactcctgacctcaggtgattcacccacctcagcctcccaaagtgctgggattacaggcatgagccaccgtgcccggcctagaactggatttaataagagaaacagagagcctcacaccactctcccctccttcagcaccctgcctccagggttctttcggctcgctagccaaccacacttggtgaggcgcgtgggtccaggagtctgtctgctcgggttcaaatcctatctgagccacctcaccccgtgaccttggtcaaggttattttcttttccctcatctttaaaatgggtatcaaaatattacttaatcacaatggagattacatgattcaaatctggcattgctcaaagtcatgtccggcacacagtccatacatgctgggtattgccatgactcattctccccaccccagttcaagcatcgctttcctctcaaagcctgcgctgagccctcaggctaagcttcccagcccagcgctgtgcagccccaggtgctattgctcacctgggctctgagccattgtggtgttccagggccttaggtggttatggaccgggcactgctctctccctctgggctctccctggacgccagcctgcatctctttcattttcttcgctcaggggacaggctgaacttggggactgcggaggcctgcagtcttccaagcacacttgctgcttcattttggctggcagcagtaattgcaaacatgtattccctgcctgccatatgctgggcaccatgcaaaatgttttccatatgtgatctcaatttccaaaaagactatataagccggtgctgttagtacgtctattttacatggagaaaaggcgcacacaacttaagatggcaaagtgacttcctgagagtcagcaggatggaaacccccagagccggccctgcccggccaccttgccagtggctccaggttcttacatgcatcagaatcacctggaggactcgctaaaaatcccagaatttctaattcagtccatcttcaatggggcctaagaatttgtgtttccaactataagttctcaggtggtgctaacggggctggtccacacggaccacactttgagaacaacttcaccgtgctatgtgacctgccatcaatagcctagaaataagtttttggtggcaaacaggctcttttcagactcatctcctgcctctctacctgtagctgtcatttatcttttcttccttgctctaaacacattcagtgacttatgaggccttaaggaggtcctgagtctccatgccacctgggcttgcctcctttgtccccctcccctgtcattccttctgacaccagctgctgcttctctccaggtgtttgtcatccacacttgaaattgctgcatgggtggggaacatggctgctgtgtggctgtgtgggcagggcaaggcccagggggcctggctgagggccgacagtgagcaggcagaaatccagaggagaggatgtctttttctgtctcacaaaggcacacgtgggctagctgggctctgaggaaagagagaggcttttgagcaagtccgtttatgcttcttgcctattttgctttagcttgtggcttccggtgaaaacacgccttcttactcatttggctccttactgaggaataaaatatacgaattccactccgtagcctgcaaattctctacctgtctcatcgcctcctcactgttgcaggtagttgagacaagtacagtggaacagaaagtctgttgggccaagaatagactttctggtatgagattccccaagtgtggggaatggtgaatgtcagaagcttgagtagcaagtgcacacatggggcgggtctcttgtcacttgtactggttgtgctctagtcacagtaggctctgaggaagccagggtccatgtggccatctgcttgagcaacctgcaaagtcctgggtgtggtatttctttactctgcatgaagttactcaactgccatctgtatgactagccaactttgaagcagaaactatctgaattagaattccatatttcttccattctctaatttttttgaaattctgcccccatgatctataaaaaaaatgtgaagtcttcacctaaccatccacttcattaagtctctccttcctctgctcacatcacactgcataggttctgtctttttggctgtgggttataagccttctgagggcaagcatagtcatagtcatgttcattccacaatgtttggctcctagtagcttttcagcaagtaattgcttaactgactttccccgctacagaagacgatgcttttcaagaatagacaattccatgtcacagatagtgtaggtgtgaacgtccccaggctcagggcagtggattagtcatgagccgagatcatttttcatgctctggtttgcacagtggaatgactggagtagcttaggatgtggtatgaatttcctactagtgcactaaaaacaggattcacatcccttctgccttatgattgtttatgcaataacctcattgcaaatgtcgtgttgctgtaccttcccatgatgttttaatgaagtagaattttaaaatataattaacgtgcttaaggtcataaatcataaaacagatttggacaacttctggatcatagtatttcagcctctctaagcctcagtttccttatctcttaaaggaggatagattacaataatctctacaaactcatgcagtttaaaaatacattgttgttgctgaggcgggtggatcgtgaggtcaggagttcgagaccaacctgaccaacatggtgaaaccctgtctctactaaaaatacgaaaattagccagccatggtggcgtgcacctgtaatcccagctactcaggaggttgaggcaggagaattgcttgaacctgggaggcggagcttgcagtgagccaagattgtgccattgcaccccagcctgggcgacagagtgagactccatctcaaaaaagtaagtaaataaataaataaataaataaaccaacaacaacaaaacatagttgttatctgtatcataagaactacttaaaggaaaatctccattttgctaatgagtcattaaatacatattttacatccttccaacaagcttccatgttgagaaaactggcttttgagacaaggccattgttcaatctctggtaagtcacttcactcattcaggcctcgattttctcagcttggaagtgggtataacaatgacttctaggttcacttttattttttggcagggccacttttacactggaagtttcttatgaaaatcaagtaagatatgcagataaaaatatactatcaactgtcaagtgctatttaaattaaggcacgattattttgactgtttacatgggaaagcattaagaaatattagcggttttcagaagccagatgctatggaagtcagaattgtttcattagctcacatgatattcaaatgggcatggaatgaactccagtgggaaagtgagcagtgtgccctgtgccttcctctccccctgtctccttttcttcctctttggagaaaccttggctccttcctccttgggagagagcagacctggatggccacagattttgatggacgtgctgccttttgtaagcaggagttgtcttggcccctttggtagatttagaagggtctgttactgcctgtcttcccactccatctgcccattccagtaaccagaaacaggcttgattgagaagctaaatttagagaactcaggatcatcaaagaatactgctgaacccggtgatggtgcggaaatcgtgaaatagcagaggagaggagccctcaggacagttcataccagaaacctcttttctagtttcctctgacctgtgggttgtcaccgtgacacagaactggaaagagaacagacggggtgtcacaacagcgaggcttatgaaatctttgcaaaactttccgcaagtcaggcttgaactaggagtacgagctgccctccaggtgggtgacacatctacgaccccgcaggaccaccagccccacgctttcagccagtgctgcccagagtgcggtgcccggaccagcagccagcaacctgagcccatgagaaatgcagaacgcgacgcccaggctcggccaactcagctggaattgctaaggaatctgtgtgaacaaaagctcaagagatttttttgtgcctccttcattttaagaaacaatattggccgggcgccgtggctcacgcctgtaatcccagcactgtgggaggccgaggcgggtggatcacgaggtcaggagatcgagaccatcctggctaatatggtgaaaccccctctctcctaaaaatacaaaaaaattagtcgggcgtggtggcgggtgcctgtagtcccagctactcgggaggctgaggcaggagaatggtgtgaacccaggaggcagagcttgcagtgagccaagactgcaccactgcactccagcctgggcgacagagcaagactccgtctaaaaaaaaaaaaaaacgaaacaatattgtaagttatgctcaaagacttttgtgtcagaatgtcagggaaatggatcacatggttcagtaactgtcagataatttcaaaacagcacatcaccttccccaggctcttctctttctcctcaagtgcctcactgggactctccttctcttttatctggaagcagaggccttgcaagggctggctgatcatcccacagttccagcgtttgcagggcagcactgggcattttgaagggca

SEQ ID NO: 381 - DNA, 3220 bp, Homo sapiens
gaggccggcggccgccgccgcggcggggagcgcgtctccgcgcagctgggacgaggcggaggcgcaggaggaggaggaggccgtgggcgacggcgatggcgacggggacgcggacgcggacggcgaggacgacccggggcactgggacgcggacgctgccgaagccgccaccgccttcggggccagtggcgggggccgcccgcacccccgggcgctggctgccgaggagatccgacagatgctacagggcaagccgctggccgacacgatgcgtcctgacacgctgcaggattacttcgggcagagcaaggccgtgggccaggataccctgctgcgctcgctcctggagaccaacgaaatcccctcgcttatcctgtgggggccgccgggctgcggcaagaccactctggctcacatcatagccagcaacagcaagaaacatagcataaggtttgtgacattatctgcaacaaatgccaagacaaatgatgtgcgagatgtcataaaacaagctcaaaatgaaaagagctttttcaaaaggaaaaccatcctttttattgatgagattcatcggttcaataaatctcagcaggacactttccttcctcacgtggaatgtgggacgatcactctgattggggcaaccactgaaaacccttccttccaggtcaacgctgctcttctgagccgctgtcgagtgattgttcttgagaagcttccagtagaggcaatggtgactattttaatgcgagcgatcaactccctgggaatccacgtcctagactctagccgtcccactgaccctctgagccacagcagcaacagcagctcagagcccgccatgttcatagaggataaagcagtagacaccctggcttacctcagtgacggtgacgcccgagctgggttgaacggactgcagctggcggtgctggctaggttaagctctaggaagatgttctgtaagaagagtgggcaatcctattctcccagtagagttctgatcacagagaatgacgtgaaggagggcctacagcgatcccacattttatatgaccgggcaggtgaggagcattacaactgcatctccgccctgcacaagtccatgcggggctcagaccagaacgcctccctctactggctggctcgcatgctcgagggaggagaggacccactctacgtggcacggaggcttgtcaggtttgccagcgaggacataggtctggcagacccgtctgcgttaacacaagcggttgctgcctaccaaggctgtcattttataggcatgcctgaatgtgaggtgcttctggcccagtgtgtggtctactttgccagagccccaaagtccattgaggtgtacagcgcctacaacaacgtcaaagcctgcctgaggaaccaccaggggccactgccccccgtgcccctgcacctgaggaacgcgcccactaggctgatgaaggatttgggctatggcaaaggctacaagtacaaccccatgtacagcgagcctgtggatcaggagtacctgcctgaagagttgaggggggtagatttcttcaagcagaggaggtgctgactcctcagggcacgacagcagaaggatgttgcttttttaagggagggccagaaagaaagttagtggattgcaaagttggttgcctggtggaagttagaacagaccaacattttgtgccagaaatttaagagttccataggtggaggcgcagttctttcgaataaatgtgtaactttgaaattgtgttcatttgcactcggtgcagcggttatgcttatgaaaatacctggcagctttgtgcaatgaattaatgttataaggaattatctattttgtcatagtatttaagtcataatgtcatttcagaattcagttctgtaggattttcttttctttaaaaaatgtatattctgggtagttttaattggtaaaaaaatgtaattgtgatttaatactgcatagtgttttgggtattttttttatatgcaaaggtcttacgagccaataaaactatttcaaagtactcttcgattctgtcatggttttcctgcctggatgctaggtaccagcgttgtcaccattgcatttggtgggtggatactgggaaggagaaatcaccccagatgggaagagtggggagcttaagttaagaagtcagtgttatcttgttgaaagttaactctgatctctttaaaggaatacataaaggaattctttaaatggcttgtggaagactccagtagtcccatgcccattttttcccacttgtcctggtttcttcttgcagctccatatttctaaacagtcgtttttcttttactttatgtgtgtcctgaacacaaaatacgccactccttctgctcagttaagagttatttgtccctactgctacttcctctccctctccttagttgcatgtcgtgcatatgcccacaaggatggccccttcaggtagtcggttctcctcctgccgttgcgtgatccctcctggggtcctcctgccatgtctggaaggctgccggctgttggcctgggacgtcctctgcctttattctgagtgagatgcccattttctggatgctccatcccgccttactggtttattccgctatttcagtgcaacccatcctctagtagttttatcaggctggagggactgtatgttgcagaggcttggcccgactggcctccctccttctgtctggagtggttgcactgcagtgtgcagttgccatccccagaatctcccttcatcatcaccctggagctttcctctgcttctccctgcaccccatctgatgacaggactgactgctttctggcacaggtggcatgtaccctctagtagctttatggagcaggggtgtgtggaggaaaagtatttttagacctcaggagactcaaaatgcttttattgtaccttcagacgtgtctgagggtttggctagtaataaattgtaggtaagaaattacttgtgcattgttttacactttcccacattgttgtcaagtttgaaggcatcctgatgtgtgtggtcttttgtttgtaacctctatcaacttgtagactcttctgtctttgctccccgtgttttaaaagtctgcactgggtacttgttgggcctttcaatctggaaactcctttcagttctagggaagtttctttttttattcaataaatttatttatttatgagaccaactc

SEQ ID NO: 382 - protein, 441 aa, Homo sapiens
MLQGKPLADTMRPDTLQDYFGQSKAVGQDTLLRSLLETNEIPSLILWGPPGCGKTTLAHIINSKKHSIRFVTLSATNAKTNDVRDVIKQAQNEKSFFKRKTILFIDEIHRFNKSQQDTFLPHVECGTITLIGATTENPSFQVNAALLSRCRVIVLEKLPVEAMVTILMRAINSLGIHVLDSSRPTDPLSHSSNSSSEPAMFIEDKAVDTLAYLSDGDARAQGLQLAVLARLSSRKMFCKKSGQSYSPSRVLITENDVKEGLQRSHILYDRAGEEHYNCISALHKSMRGSDQNASLYWLARMLEGGEDPLYVARRLVRFASEDIGLADPSALTQAVAAYQGCHFIGMPECEVLLAQCVVYFARAPKSIEVYSAYNNVKACLRNHQGPLPPVPLHLRNAPTRLMKDLGYGKGYKYNPMYSEPVDQEYLPEELRGVDFFKQRRC

SEQ ID NO: 383 - DNA, 3102 bp, Homo sapiens
tggtaattcattcaaagatgcagaataccacacttgttttaatctgatattctttccatttctatccgtctaggacgtaattgcacacgggcgcctcccatcatttggttgctaaggagacagaaggctggtgtttccgatttgccactattacacagcggcccgcgagaagcatctcttggctcgaagcgcgctgtaggtgaaccgcccttgacttaaacgccaacacatctaaaagggggcgagggacgctttattttcatttccctgaccactactgagaccactctggctcacatcatagccagcaacagcaagaaacatagcataaggtttgtgacattatctgcaacaaatgccaagacaaatgatgtgcgagatgtcataaaacaagctcaaaatgaaaagagctttttcaaaaggaaaaccatcctttttattgatgagattcatcggttcaataaatctcagcaggacactttccttcctcacgtggaatgtgggacgatcactctgattggggcaaccactgaaaacccttccttccaggtcaacgctgctcttctgagccgctgtcgagtgattgttcttgagaagcttccagtagaggcaatggtgactattttaatgcgagcgatcaactccctgggaatccacgtcctagactctagccgtcccactgaccctctgagccacagcagcaacagcagctcagagcccgccatgttcatagaggataaagcagtagacaccctggcttacctcagtgacggtgacgcccgagctgggttgaacggactgcagctggcggtgctggctaggttaagctctaggaagatgttctgtaagaagagtgggcaatcctattctcccagtagagttctgatcacagagaatgacgtgaaggagggcctacagcgatcccacattttatatgaccgggcaggtgaggagcattacaactgcatctccgccctgcacaagtccatgcggggctcagaccagaacgcctccctctactggctggctcgcatgctcgagggaggagaggacccactctacgtggcacggaggcttgtcaggtttgccagcgaggacataggtctggcagacccgtctgcgttaacacaagcggttgctgcctaccaaggctgtcattttataggcatgcctgaatgtgaggtgcttctggcccagtgtgtggtctactttgccagagccccaaagtccattgaggtgtacagcgcctacaacaacgtcaaagcctgcctgaggaaccaccaggggccactgccccccgtgcccctgcacctgaggaacgcgcccactaggctgatgaaggatttgggctatggcaaaggctacaagtacaaccccatgtacagcgagcctgtggatcaggagtacctgcctgaagagttgaggggggtagatttcttcaagcagaggaggtgctgactcctcagggcacgacagcagaaggatgttgcttttttaagggagggccagaaagaaagttagtggattgcaaagttggttgcctggtggaagttagaacagaccaacattttgtgccagaaatttaagagttccataggtggaggcgcagttctttcgaataaatgtgtaactttgaaattgtgttcatttgcactcggtgcagcggttatgcttatgaaaatacctggcagctttgtgcaatgaattaatgttataaggaattatctattttgtcatagtatttaagtcataatgtcatttcagaattcagttctgtaggattttcttttctttaaaaaatgtatattctgggtagttttaattggtaaaaaaatgtaattgtgatttaatactgcatagtgttttgggtattttttttatatgcaaaggtcttacgagccaataaaactatttcaaagtactcttcgattctgtcatggttttcctgcctggatgctaggtaccagcgttgtcaccattgcatttggtgggtggatactgggaaggagaaatcaccccagatgggaagagtggggagcttaagttaagaagtcagtgttatcttgttgaaagttaactctgatctctttaaaggaatacataaaggaattctttaaatggcttgtggaagactccagtagtcccatgcccattttttcccacttgtcctggtttcttcttgcagctccatatttctaaacagtcgtttttcttttactttatgtgtgtcctgaacacaaaatacgccactccttctgctcagttaagagttatttgtccctactgctacttcctctccctctccttagttgcatgtcgtgcatatgcccacaaggatggccccttcaggtagtcggttctcctcctgccgttgcgtgatccctcctggggtcctcctgccatgtctggaaggctgccggctgttggcctgggacgtcctctgcctttattctgagtgagatgcccattttctggatgctccatcccgccttactggtttattccgctatttcagtgcaacccatcctctagtagttttatcaggctggagggactgtatgttgcagaggcttggcccgactggcctccctccttctgtctggagtggttgcactgcagtgtgcagttgccatccccagaatctcccttcatcatcaccctggagctttcctctgcttctccctgcaccccatctgatgacaggactgactgctttctggcacaggtggcatgtaccctctagtagctttatggagcaggggtgtgtggaggaaaagtatttttagacctcaggagactcaaaatgcttttattgtaccttcagacgtgtctgagggtttggctagtaataaattgtaggtaagaaattacttgtgcattgttttacactttcccacattgttgtcaagtttgaaggcatcctgatgtgtgtggtcttttgtttgtaacctctatcaacttgtagactcttctgtctttgctccccgtgttttaaaagtctgcactgggtacttgttgggcctttcaatctggaaactcctttcagttctagggaagtttctttttttattcaataaatttatttatttatgagaccaactc

SEQ ID NO: 384 - protein, 279 aa, Homo sapiens
MVTILMRAINSLGIHVLDSSRPTDPLSHSSNSSSEPAMFIEDKAVDTLAYLSDGDARAQGLQLAVLARLSSRKMFCKKSGQSYSPSRVLITENDVKEGLQRSHILYDRAGEEHYNCISALHKSMRGSDQNASLYWLARMLEGGEDPLYVARRLVRFASEDIGLADPSALTQAVAAYQGCHFIGMPECEVLLAQCVVYFARAPKSIEVYSAYNNVKACLRNHQGPLPPVPLHLRNAPTRLMKDLGYGKGYKYNPMYSEPVDQEYLPEELRGVDFFKQRRC

SEQ ID NO: 385 - DNA, 2786 bp, Homo sapiens
gaggccggcggccgccgccgcggcggggagcgcgtctccgcgcagctgggacgaggcggaggcgcaggaggaggaggaggccgtgggcgacggcgatggcgacggggacgcggacgcggacggcgaggacgacccggggcactgggacgcggacgctgccgaagccgccaccgccttcggggccagtggcgggggccgcccgcacccccgggcgctggctgccgaggagatccgacagatgctacagggcaagccgctggccgacacgatgcgtcctgacacgctgcaggattacttcgggcagagcaaggccgtgggccaggataccctgctgcgctcgctcctggagaccaacgaaatcccctcgcttatcctgtgggggccgccgggctgcggcaaggcccgccatgttcatagaggataaagcagtagacaccctggcttacctcagtgacggtgacgcccgagctgggttgaacggactgcagctggcggtgctggctaggttaagctctaggaagatgttctgtaagaagagtgggcaatcctattctcccagtagagttctgatcacagagaatgacgtgaaggagggcctacagcgatcccacattttatatgaccgggcaggtgaggagcattacaactgcatctccgccctgcacaagtccatgcggggctcagaccagaacgcctccctctactggctggctcgcatgctcgagggaggagaggacccactctacgtggcacggaggcttgtcaggtttgccagcgaggacataggtctggcagacccgtctgcgttaacacaagcggttgctgcctaccaaggctgtcattttataggcatgcctgaatgtgaggtgcttctggcccagtgtgtggtctactttgccagagccccaaagtccattgaggtgtacagcgcctacaacaacgtcaaagcctgcctgaggaaccaccaggggccactgccccccgtgcccctgcacctgaggaacgcgcccactaggctgatgaaggatttgggctatggcaaaggctacaagtacaaccccatgtacagcgagcctgtggatcaggagtacctgcctgaagagttgaggggggtagatttcttcaagcagaggaggtgctgactcctcagggcacgacagcagaaggatgttgcttttttaagggagggccagaaagaaagttagtggattgcaaagttggttgcctggtggaagttagaacagaccaacattttgtgccagaaatttaagagttccataggtggaggcgcagttctttcgaataaatgtgtaactttgaaattgtgttcatttgcactcggtgcagcggttatgcttatgaaaatacctggcagctttgtgcaatgaattaatgttataaggaattatctattttgtcatagtatttaagtcataatgtcatttcagaattcagttctgtaggattttcttttctttaaaaaatgtatattctgggtagttttaattggtaaaaaaatgtaattgtgatttaatactgcatagtgttttgggtattttttttatatgcaaaggtcttacgagccaataaaactatttcaaagtactcttcgattctgtcatggttttcctgcctggatgctaggtaccagcgttgtcaccattgcatttggtgggtggatactgggaaggagaaatcaccccagatgggaagagtggggagcttaagttaagaagtcagtgttatcttgttgaaagttaactctgatctctttaaaggaatacataaaggaattctttaaatggcttgtggaagactccagtagtcccatgcccattttttcccacttgtcctggtttcttcttgcagctccatatttctaaacagtcgtttttcttttactttatgtgtgtcctgaacacaaaatacgccactccttctgctcagttaagagttatttgtccctactgctacttcctctccctctccttagttgcatgtcgtgcatatgcccacaaggatggccccttcaggtagtcggttctcctcctgccgttgcgtgatccctcctggggtcctcctgccatgtctggaaggctgccggctgttggcctgggacgtcctctgcctttattctgagtgagatgcccattttctggatgctccatcccgccttactggtttattccgctatttcagtgcaacccatcctctagtagttttatcaggctggagggactgtatgttgcagaggcttggcccgactggcctccctccttctgtctggagtggttgcactgcagtgtgcagttgccatccccagaatctcccttcatcatcaccctggagctttcctctgcttctccctgcaccccatctgatgacaggactgactgctttctggcacaggtggcatgtaccctctagtagctttatggagcaggggtgtgtggaggaaaagtatttttagacctcaggagactcaaaatgcttttattgtaccttcagacgtgtctgagggtttggctagtaataaattgtaggtaagaaattacttgtgcattgttttacactttcccacattgttgtcaagtttgaaggcatcctgatgtgtgtggtcttttgtttgtaacctctatcaacttgtagactcttctgtctttgctccccgtgttttaaaagtctgcactgggtacttgttgggcctttcaatctggaaactcctttcagttctagggaagtttctttttttattcaataaatttatttatttatgagaccaactc

SEQ ID NO: 386 - protein, 346 aa, Homo sapiens
MATGTRTRTARTTRGTGTRTLPKPPPPSGPVAGAARTPGRWLPRRSDRCYRASRWPTRCVLTRCRITSGRARPWARIPCCARSWRPTKSPRLSCGGRRAAARPAMFIEDKAVDTLAYLSDGDARAQGLQLAVLARLSSRKMFCKKSGQSYSPSRVLITENDVKEGLQRSHILYDRAGEEHYNCISALHKSMRGSDQNASLYWLARMLEGGEDPLYVARRLVRFASEDIGLADPSALTQAVAAYQGCHFIGMPECEVLLAQCVVYFARAPKSIEVYSAYNNVKACLRNHQGPLPPVPLHLRNAPTRLMKDLGYGKGYKYNPMYSEPVDQEYLPEELRGVDFFKQRRC

SEQ ID NO: 387 - DNA, 146733 bp, Mus musculus
  misc_feature (1)...(146733): n = A,T,C or G
cacctctgccaactactttctgctacttgtctgaaacccattaaggtagtagcattgctcggggaaaatttgaaactacaaatgacatctctccgcttgtcctgtcttctgctacccttgttattcctaggcaaactattcttccgaccacttcctcagtgcctttacccctttctgactcattaccaccctcctccaggttggtcccagctctgtacactttgccacatatatctgcttagcgtacgtaaatccctgcttccaggaaaggcttcatccaccaatgccatggaacccttcgctcagaaatcagttcctagccttcccctctcttcattaccctgttaaaagaaatttggcttgtctttagagatagtatttcctccaaaaccttccctcatgaccggctctcccaggtcacagagtgtgtgtgtttcccttctgtcccttgcacatagagactcaccagtctctttgagtctcctcttccttgcccttcccactgctgctaacacagcgctatgtcctcacatttcttcaggttacaagtctgagatcaggatgttggcagggttgatgatgtttcacacggtctctgtctttgctttctgtttctgtagctgagtaccataaccgaggtcattattgcctctcttcctcctccttctcctcctcctcttcctccttcgtcttcattttcctcttccttgtcctcctcctcctttgagatagagtttattgtaacccaggctagctttgaacccaacatagagctgagaataacattggtttcttaccctcctgcctccatctccaaaatgttgggattacacttgtgccaccttccctgggtctcaaattggacaattaataaagaatcgtttatctagctcatggttctagaaatccaagaacatagtacaggcattggctcagcatttggtgaggcccctcttgcagcatcataacacactgagcagatggggtaggcagtctcccaaaggacagaggcaacagactggctgattcactccctcaaactcacggatagacaggacgacctggaacttctgactctcctgcttctaaatcctgagtgcagggattacaggttacaccgaccccacgcttcctgcatcctaggcaagcattctaccaatggagctacatcccatggccccttttcctctctcctcccactttttaaaaatttttaaggaaaggcataatccagccaggcgtagggtgctcctctgttattccagcacaaaagaatctgagacaggagcattgcaagtcagaggccagcctgggctgcatagctgagactcaattgcagaaaaacaaaacaaaacaaaacaaacaaatacccactaattccatcccggccttcatgacttcttttagtcctatttatccccaaagaccccatttccaaaatctaccaatatttgactttggaggttaagatttagcataaatttgggaggggacaaatgactagatcatagtgtcctttctccatggcttgaaggagtctgctatcttatcttcttcctgtatcattaatatctgccccccctcgcaaaatgacatcagacagattgaatcaggacccacccctaatctcttaaaagatctgatgcagtgacattctgaggcctttggatttaaggcttacaagtgtattttgggagagacacagttgaggccaccatacttcctatgagatttatatatttttcttctcatctctgagtgctaaaacacagtgtcccataacagcctaagcaactattttgcatggttcctctcaaccccaccccttccacactttctgtggtagttccatccccacaattgacctacatttgattcttttattttttttattttatgtttgttttattttatgtgtagggatattttgcctacatgtatgtatgtacacatttgtgcctcatactatcagaggtcagaacttgccatcaagtcccttagaagttacagattgtcgtgagttatcatgttgatgctaggactcaacctgggtcctctgaaagaacattatatataacacagtgctttttttgttgttgttgttgtttttgtttgtttgctttttgtttgtttgtttgtttgttttgttttttcgagatagggtgtctcaattcactctgtagaccaaactggcctcgaactcagaaatccacctgcctctgcctccggagtgctggtactaaaggcgtgtaccaccaatgccctgctagcacagtgctcttaaccgctgagttatctctggtccccatctctctgatgttgcccagttcctcaacccagacttctccatctcaccagtatccttgaattctcctccccagggagccccatgcctttctcccaccatcagctcccgcctgaccccatcctgcctgctttcctgagtcacccagctctcaccacctcagcctcacccctaccctgctagtcacctttccctgttggtctggccacgcccacaccagcatttcatcccctgtagagatacggaggtcttcagactcgatcaatcacacttggtctgccttgctcatttacagtcccagctctgcttcctctgcttctactcccttggctgatctgttttagagcaaagagagaggccctcttgtcgctctgcccccttggggcatgaaggcacaagagggacactcaagaagtgttatgaccatgacccgatatggtcagcccgcgcctctttcttgctggtctagtaggtactgctgttttacacactcagggccatcagttactaacactgcttgcccttttcctgccccacccccatcagtattttctctatgtccctacaattcttccttcctttcctttgttagagaaagggttattgtggggctagagagatagctcagcggttaagagcacttgttgctcttgtggaggacccacatttaagtcccagaacccacatggtagatcccaaacatctgtaactgcaggttcagtggatctgatgttctcttctgtaggcaccgggcacaaagtcattacttctcagcctcagggccggatcccaaggctgatctctccactatgtggagactcaggtatttgcctccctccctccctccctccctcnnnnnnnnnnnnnnnnnnnntggtccctccctccctccttccctccctccctgcctcccccctctctttccctctatctctcttcctctctctctctcctctctctcctctatctcctctctctctctctctctctctctctctctctctctccctccctctcttccttccttcctttctgttgctccttccttccaaagctgctgctttctgcttcagatatctgtatttccttcctccctgggtctaaatttctttcctttttgacctcagttgtccgagtggtttatgcacgccatagctctttcacactgatcctctcggagataattttgtgagtgtctctgatctgaactccgccaccatggcgccatcaacacctggggccacagaattcttccctgcggagcttgttctgtgcaaggtgatgtattatgcagcatccctgacctgtatttatcaggggcctggagtacctttcctccaacttgtgacaagccagaatgtggagactttggtaaatatccctgtagaagagaactgcctggttaaaaaccgcttggggtagatgtttaggaatgtaggttctgtgctggtgttggcagatgcctttaatctcagcacttgggggcagaggcaggtggatctcttagtttgaagccagcctggtctacagaatgagtttcaggtcagccagggctatgcagagaaaccctgtctcaaaaacaaaacaaaattaaaacgaaagataaaaggaatgtgggttctgtcaagtggttgttgctagtctctgtgcaggggtattgaagtccacagttgtccaactaagacttcattcagcattgctgtgagcatacagaatacaatagttacagaacagaaaacgctctgtaccttatgattatataaggaaagaacaattataaacaaaaattcccaagactacaaaacgtgcagtcgcttatctttctgattaaattcttttttaaaaagagggtctcattgtgtagctctggctgtcctgaaactcgctatatagaccaggctaccctctaattcacagagatctgcctgcctctgccttaagtgctggaattaaaaatgtctgcaccttgtctgccttccccaaccccaataaaattcttgtttaaacaactgcacacaagttaacaacccttatgcaaaactccagtcaacagtattttattgagattatacaagacgatcagatggctttttaaaaaaaaatagtaatctatgtagctctcagttggctaacaaaagcaatcgtaatgaatatagggtcccttgggtctgatgtctggtttgcatctcagttctcccatcagttatatgcgattgagcagtggaacaatgccactgcttaacctgtaaaataggcacagtgatagtacctatctgaccagggcgcagaggggatgaagcaagatcttagctagaagctcacccttggaccagcgtctggcacagactgagtgtccagtaagaggtagctgctgtcttgagggttgcccttttcctttctcttccttctcagcagagcttcgggccttcacttccgtctcttccttaaccccttactccctagtccttgctaagatgatgccctagtcagtcttgtttttcagcgcttgccctttcccagttactagcctcaatggctctctggtttagggctgaccactgcttcccttagaggaaagggggagggccttcttgtgggccccactcccttctcctgatttcaggcatatggccccctactcccttcagtctgttggccttctactgtctctctagacccgtgtgctgaacccagccccccatcctttcccatgcataccttgcccaaaattcatggccctagtgagctgactccgagtctccattagtcacaatcaagggaccaaagctaccagattctgcctgctcccctcctgtctttgtattgtttctgcatagacacaggtgaccttaacatggctgaagtgacctcccttctttaacatcacacttcttggtcactgctttacaatttctttcaccttcttctctcccatattcaactggccgggttctcttcattctatggcctattttttttcttttttcttgagagagggtctcactatatatccctcccttgtactcaacaaccctcatgctgtgacctcagagggttccaagaatgtaccagtcagtcaccatgcccagctagtggcctaatgtcttggatcagttttctcccctctacctcagcaacagtggctgagttttttactctcttgcagttgaactcttcgactagctcttaatgagtgttcctgtctcatcttgtcatcttccagaccattctccacagtaccatgagggaagctggctgccctcctcagtatgctctttcttggatgaagtccaagtttgcttagtggtttgcagggccccctggctgctgctcctgccccatctctttcagcctccccctcccgcctcccccctcccaagctgctgtcactgagggaggtatttgaagttcaggagactaaccttgtgttgtggctccatgcccttgtgctggctgctcccagacttctctgtctggtgtgccgggctcctcctctctgcctgggagacacctacagggctcttaagagtccggagatcattgacacctcatccaggcagccttcccaatgccacatcctttccttcattatccaactcagaaggaaggaaatatcccattcatttccacctcaggtctcagggtcgcctactctgttaccttctgtctcaaataggttcccacctctcctcattttttctctcttatttacctcaggcacatgcctggtcctgatttctctatctccattttctccatttccccaagtctatcagatctttttctgacagtttttttttttctctctaagagattccctttgctcctcaacttgggtactgatactgaaaaattctatgttgtaatctcacttaactatgccccatcaccttcaattcctgtcccatgttttaatccattcatcctagaacctttactattttatatatatatatatatatatatatatatatatatatatatatatgtatatatcaaccagttgctttttttgttggtttttgatgtgtatgtgtgtctatatgtatgttttatgctggtacctcagaagccacaagaggacatcagagctcctggtgcctggtgctagagttataaacagttgtgtgtgagctacctgatgtgggtgctgggaactgaaatctggtcctctggaagaacagctgatgctcttaaacactaagccatctctcagtccttctatttttgcttgtttgcttttgttttgagataggcctatatagatagttctagctgtctttgaacttgtaataattctgcctctgcttttgagcactgggattaaaagggtgttccatcatggctggctaagttccacttgttttgtgtgtgtgtgtattcacatatgtgcgggcatggctgcatgtactttggtgcccaggtagaggccagaggataattttgtgtagtgctttctctccctccactgtgggggtttggatccatctcaacaaccttcatattcttatttaccgtttaaactatgatgactaatgccaaaatagatatttgtgtacaaatttggctgaacatatattttcatattttactatatgacttagtaaaactgctgggtcctatggtcaccacatattgaagaactgccacaatagttttcaacatggctgtaccctttcccattcttcaatttccttgccaacatttattcattggctgactttttggctagtgccattttagtggctgtgcaatagcatctctccatggtttgataacctcattcttccttgtttttaattaggtatctggtaaatatttgctgtataaaagatatcaacatttgaacaaacctttgaacaggagctttgactttcaagtttattaattagctaggtatgaacaatcaatagaatctaatattttttttagtagcttattgtgttttattgtggtttgggataggtttttacacaatagcccaggatgtcctggaactcactgggattgcaggcatgagctactaagccccattagaataaaataaaataaaataaaataaaccctaaaggtgactttttttgttgccagaattatctaccgtataaaaatggtgatgatttgccgggcagtggtggcacatgcctttaatcccagcacttgggaggcagagacaggcagatttctgagttctaggccagcctggtctacatagttagttccaggacagccaaggctacacagagaaaccctgtcggggggggggggggggaatggtggtgatttaccgtgagaatccatggaactttggacatttgaaagtattttacagaacaaactaaactgcaagtaaaactccaacttggatatagatgctgcttgtggtctagcttggaaacccaagtttataatctgagcacttgggaactgaagacagaaggatggggaataagaggctagcctggtctacaagagagagtgtcaagcaaagtaccatgaaacaaacaccaagagacaagtaaacaggtagtggtttttggagtgcccatcccgaccctcctcgttcagacagcttataaattggaagcccaagagtaagaatttctgtgatgaccttgtaaacttttgttttaaactagtccatcaccttctcagcagacaagtcctcaaaacaatgtttgatagcacttgggagacaggatggatgtggcaggaggcatagacagtgagtggtgcacacacctttaatcccaacacttgggaggcagaagtaggtagatctctgtgtattctaggccagcctggtctacatagtgagttctaggacagccagagctacagtgtgagaccctgtctcaaaaaaacaaaaccaaaaagaaaagaaaaaaaaaaaaagaaaaagaaaaagaaagaaaggtggagttgctaaggctattagtgcctagcacgaagcccatgctagcatgtcacaaatggggcacaatgatactagggtcataagttcaaggtcatcctcagctaataagttcaaggccagcctggggactttgtggggagaaaggaaaaaaaaaatgtcactgctaaaagtttcaccagatagagttttgctcagtaaacagtagaccctgggaaatgtaacaggttctgaaaacttatttttgatgactggaagtcaaacagttccctcgcagtctgtggtttagcctacttatctcaagtcaggggtaatggtccaactgtttttctttagttctagagaattctatcttggccaggcttcatttgttcattctatcctcagatagatacttctgttgtcagttgccacctctcccccacccctcaaacttgagttcattcgaaggaagacttcaaattaaagcccataataagctttacaactgtagggtgttcaggcattccaagaggagcccatggggtggagctagggcaaaggtcatagcaaagagcatgtagcaagctttctgcatgtataacatcaaccaagtagtcccaagtgcataactctatagccctattttctgtgcttttatcttcagaattggtgtgagtgtgtgtgaaggtaactattctgaagatgtatccaaaaccgagaacacgtcccttttggaacctaagtagaaactggttggaggttggaaacatgtcagctgctttatggaggaagcacagctgaggcctggtttccctgggctctgtgataacttgggccaaggcagtgtggtggcttcaggagccccggggatggagagaaattcgcaggaggacccatgcttttcacagttgaaacaggagccctctgagagaaagagatatttcaacgtggcttccctgacgccttgaagggagctgtggatgacacagcaccagtcattccgtcgcggggtggggacaaggtggcggtagacgccatccttaggcccctcgcaggcaggcagcctccgctgaagcatcgtgtatagagagggagagaaggcaaaatgataaaaatccagggcccttgcgtttgttagagaagagaagcactctcctaagtagctgcgctggtgggaaggaccaacctgggagagaaactgcaagaggttgggggcggggtgaagcgcctgctctttaatctccggccccatcctctaactcgccccacctggatgcagggcgaggaccgcgtacagaaggaactgtgcggctgggacatcactttcagattcagggggagcagcgctggatctggggtccaccgtcaccacactaccctctctcgggcctcctaggcgtccccccaagctcctctctgcatctctacctctgttaaaatagtgaaacaaaccctgttgtaaagtgatggaaagcctcgggctgagagccactggcagtgaggggttggaggggagggggcacggtggctggagctagtggccaccagtgagcgctgggtgggtcggaattgcgctcagctgtagcggccgagacccttcccctccggctgccgggcccgcccctggccccgggcgcctagggagggcgtggggcaaacttggggctgctgtagggggtgaggtgggaactccacctccactcatcccgggatagtggcaactgcggttgcctagctaaaactggggcgggggtgacgacagggacagccgggtaccgcggtcctcccgactcccccagctcgttcagccgcggctgctgcggcagctctgtaacacgtccccaggagactcgcaggagcaacacgtgatgtgtctacttatcagggtgagagggggagagcgagtctccgagtgtgcgggtgaggaagcggggcggggggccgaggcgggggccgggaagacggctagggcaacggggtcgccagctcctcgcccacctccctccctatgggagaagaggaggaggggaagtgactgcggagttgatgaactttgcacatccagaaacgccattttgattccttttccggaacaagtttgcatctctcctcgttctctccccgaagcccaccggtcctcaccgcatcatgcctgggagcccagcaccctgccgggccgtaagtacgcgtcccgggtcccccgcttgcggcactccggtggttgcgagatgcccggggcattgccggagcgaccttttaaagaactttttggggatggggagggtgaagtgtgcagagcgcggtgtacttctgaaactcggcgtttggcagaaaggacccgcgcaccctggcagcatgcgctcggttggggctgtggggtaggggagccgggatgagctgggcagccctctcccctcgggctgcgcgcccggccgctcctcctcctcctcctccccttcctccgctcctttccccttcccgagctgccggctctgccaaccagctcccagcgcgagccgccgcagcgccccgccagcaggacctgatgcgcatccatattagccgtccgagcgcaggaatccggcccgacccgcgccgccgagtttatttttaaccagccctgccgggactcggatggtgcgcgcaccgcgggccagaaacatcttcccagcgctgctctccatcttccgccctctctcccccgacatcctcccccccatgtgggaggggaaacttttctcctacatactttctagtccctctcgggtcgggaagcacggagatgacggagccagcccgccgccgcaaggtatccgggggtgcccacccggggtgcaggcgcgggggccgtgcgttcggggctgctcggtgggagcatccgccgcgccctgctctgcggactttgatcctcccgggcggacggcgccgaccgggaggggcggcaggcagccccgagccctctgcgagttcccggctggcggcggggctgtgagcgaccaccgtcgctgggaaggaggggaggcggcgacccgggccgcgccgacgcgtattgttggtgactccgaggctggctgggtacgagctttgggggagcccccgacgtggggcgagcctgcatcgcggagggggggctcgcgcccggcgccgtcacgagcacaggaaggaggccgggagcatccgaggcggggccggcgcccgccccaccgcccagctgtggagcgcgctcggaaacttttgtccgccacccgctggaccaatttttctggagttctgaggcttcgctttttcctcacaccccggcctgcccagccgaaagagggggttgggggaagccggtgtcccccggggagggggcaccgacgacttcgagaggcacgggcccccccatcaggcccagctccccgcgccccctccccgttcgcggtctcttaggaaactgcgaccttaatggttgctaaggagcaggggaggtccttcccgtcgccggccccctccctgggaggcggtgtgttttctgtacagggctagggtcgcatcgaggatgtgacccgctctctggcccggggtgagtgcggggcgcggctacggtgcctgcgggcagccggccgaggtctaggggcgtggggaccccactgggctcgggctcgaccgcttgacaggcgccgcgtgttgctagctgccctcgtccgcggtgcatccgtgatgggttataaaagaggaggaaagttatttttccttgctcagcagatttgccctccctcgttccttactggttaagagatagaacgtgagcccagatccggacgagcagttcacattccattacgaaattctacacggcttcagagccagcagcagcactcattcggggcatttcggaggagattttcttctttgggggatgctggtagtggtggtggtggcggagaccgatacagggtgaataaaaagcaacttttgtcggggtgtcgaaaaccttaccctcaggtttccattgttagactgctcaacactgggtctcgttttcgagttagagctaagcatatccttgtgaaagcctatgggaagaaagttggttaaataaagatgttgggagttggcaaagtattcttgcaaatgattctgcaaaggctcacttgttgcttgtgcatcccttggttgtgagattcctttttcagataatatggtggtctgtgtctgcgtgcgagttgttgtgcaatagataattggagtggaaggtggagaaatgagaacagccatgaaaagaatgtgttgatggcttttaacatcctctaggtttgatgctttcatgagcaggcaggtatagtttgtaatttaacccggaagtctgagttggaggctaaggtcttggttaaaactcttaagaaaattctgtacgtaagccctaaaagaatccatagtttcttcggaaagagttcagtatactcttaaaacacgtgcaagggtggactcgttttagaggtttagagttgctgtttgtttgtttttacctctgcccattggggtacctactgatgggtcttcctttgatgtatttggttacagtgaattaaacatttgaatggctctaatcaagttttaaatgtgtgaaaaaaaaaccctccccaatttttacaaaagaaagggagagaggggtactttgatttaattattttcccgttctccatttatttttgggttaagttgcactgtctccatcttacaacatacttttacggtaagatggctggctgtcttttcagcatgttttgttttttaagaaatgctttactcacttaagaaatgctgttgatgctcagtggtacatggaatattattctcggccgtttccctggataccgcattattcctcatcagaaactcagacagcataacccttgccgtggacgtgatggggaacgtttgcctgactcagctggttacaggtggtgcattcattcctaaccatttacatcatcaagcaagtgaccttttgatggaaggggcctttattttagatttcttcagacagaaccatctgagagagattatttgcatccagtacaggtaggaaggggaggggaatgcagtgtgttagtcctcatctgatcaacagctgtttattgcttttctgcccctaagtcaggcactaggtagcagctgttagcaaacagcttctgggttgctttttgtttgtttgtttgtttgtttgtttcacttttctgttttaacctgctgctgtattggttcacttcctaggtcagtttggaagtctgtctttctattgtgtgcccactctaacatctcttaacagcttcagctaagtaaatttcctggttaatgaagttgaaaaaaaaattctatcctcttagggttttgcgtgacatagttaatataaacttttacagaaattggttaaacaggctctctagaagcagctagaagtgggttcttttgatgtttttattcattatccttctgaaaagtaggtggtgcttagaaggtcataggataagggttgctaagcagctaaacagaaggatgctaaaattaactgaagcttttttgaaagggagtccttccctgttttacattacctactaggtttaattaatttctgaatcttccatgttctttgatctaggaaggtagtatgttaaagttggtctttgtttttgttattatattcaaataatcttccttttgtaagtgtctttaattgaagttcagtattctctcagtattctcttgactccttgctgtggtgtcaaatggcagcttgtctggggtgactttcttgtctgtgaagaggtagaacttcccttttgttattcacgtataacttcacctgcttttgcattaataaaggatttttatgtttattttggaaattctacataatccacaaagtgatgttttgccattgtatttttattaaacgtttgcattcaaaagatagaagtgcaatatagtatcaatagtaactacaatatagtccctcctgatgagaggacaatggctttctttcctcctagattagattgtggatgtggctgttcctggtccatgttaccctacttccctggctctgtctgttcaacccagctcatagataatcttttttttaagtactctaggtttagaatatatttggaaggactgaacagatgttagaaggcaaaagtattatgacttgtgtattgtcttagtgtttcaaggtttttgaagtttttcatgatgaaagatgcaagctggtggctggaaaccctcccttctgttgggtggcaggcccgctgcaaagccagcagcttccctgcctcaaggttatgcgtgttttcctgacctatcaagcaggcctccttgagtcatatttttatattcaagtgtaattaaaagattgataggttttctctctcttccccccaccccctcaatttttttagatttagattgtgcttctagggtgggagcaatcaagtacctctttgaaatgcatgcaggggtcagagagtggtttccatgcccaggggtgaggggtagggggtgggggtagatccgaggtaaaaggtgtaccgtctgaacccggagggaagtataagatgtgctttctgaaatgcatcatttacttttaacttcccccactcccacatggcaagcggaccaaggaagggaaacctggctgctggtgttttctttactgcagaggtagaagaatgaggaagatggggaggagccttccctagttagcagttagtctccttgggctgtgtcatcagcccagcttttctcaaggtctctcttgtcacgtcccttgggtgcccaacaaggtctgaagggcagctgagcatgcctggagatttcaccctgcttgttggcagctgaagaagagggggagggaggaggggagggaggagggtccagggagctgtgagctagcatccctggttcgaggagcctgcaggctgcaggctacccagtctgtctgcccatcagtaaaggtgactgcttgtgaataggtgcctcagacaaagcagtgggagggcggagactgtttgttctgtgtgaatcaggccactagtgctgagagcatttgaaaacctctgtgaaggccagggcctagggactggctgcttctgtggcgagtcacctgcaggctccttgaggagagggactcaccagctcacctggagagggagaatgaaatcccccactggttttgtcagacagccagactgaaagagaaaaagtctccgtgggggtaattagataaagcttttaaatgctctatttgtttttcccctgagcttgcttggtatttcatccttttaccccccgccccctttttcaagactggggaaggattgttacaaaagcagttgataggtagttgagttgcttttacaccctctccccccccccacccccttagctttttaggctaagtgtcagcctctgattgtgaagactgttagcaaaacttctaaagtttacattcagaacaacagggatttacagcgaggtccatcctgacccctgattcctaacttcaggccagcactgaaagctgatgctggttggaggaagtttggctttgaggacttagcatttaatatttaccgtgggtgtctctttctgtggtggtgctttaaaataaggtcaggcccttttggaagtaattctccgcttgaatttggaggcaggagggaagtaaacaagcacaaagcccattggctgcgctgctgccgctgctgctaccgatggggattcggttatccacgcacgcctctcctacctcccattgtagggaagcattgtagggaaggataaaatgaatgttccagaaagtcaaaaacctataaatggaagagagtggtatattttgagttcaggaagccttgcgggtatccactccagatttcctttccagaacttggttcctttacctttagctgaatttacctacaagtttctctctcagtgggggtggggtggggactgcaccttttgcttccagtgtggggagcagacaggcaggacaagcagatccctcttaatggggttcacttggggatgggcttgaggaggaagacaggagccaagctcagggtttacttttcaaagggatggtcgttatagcctttaagcaagagggacaagagatgccattacacttcctatagtggtcagggcagcctcctccacccccatgcaatggagacttgattatccattcagtctcagaaatccaggagccaaggtagaaaaaaaaatctacttttcaatagtaggatttaggacccagctctgccctgagtatgtccagagccctcaaacagatcacgagtaccaccaagaggggatggggtagggggttacactccatatcgcatgtattctgtgtggagaaattccatacagcagcaggtaagctctttattacatgcccgtaagggagctctgttggcaggttcaaagtatcacagacagtttgagggtggagcaatggttgcctgccggactgttaagtagatttgaaaaaccctgttactaagacagtcccaggagtcgtctgcttctaaaacaaccttggttcactgacaggaagctgcccctgtagatggctcaactctgccatcatgttttcagccacccttctgtcaggttccctcattttgtaagttatgtggagtacataacttttttttttaagtgtttgaactagcccctacttgcttgatgcttttgggcactcacagtctttctccgttttgtttctcagatttttgtacaattcttacataatcatctatcttttattcaagggcagctttcctgagcctttggctcagatgcctctagagagaaaggtgggttatcccatggcaagacaggatggggagggaacgaggagggggcccagggatggaggggagagaggaagtgcttgtttgtatgggaccccagctggaaatgtctagaagtgtcgggggacacaagtaccacttgcttccagccttaccctggtttttctcttccactgctcagtgtgtctcgctcagaccggagacaaggccccgagtcctggggggagagtaagggagccagtgttccagaacagggaggactgtgatgctctgagcttccagttgttgtgttgtgtgcctctggaccttttatctctcacaccagtggaccagctgtgctaaggggactcagtgccacggccgagcagacaccttgctcggggatgggtcctgttgcatccagcacttgggtgttttcctgccctcaacctatgaactggcaactcccagctttctacttttacaacttttgccagtgctgggcccttcaggcacctcgccctgcaggtacttgtaaaaaatgaaagccaatctagaaaggggccagaaagatctggtgtcctcaggcagccaggccaggcaccccactgtcttccgtggctggccccacattgggcagaaccccttaagggtgttgcaaatgcctctttagttaatttcctgtgcccagttcctcctttctgctgttcgccctgccctgttgtccacagagtggcgtgcattgtcttgcgtgcctcaaaacagtccttggctccttgtgtctacaggaagagatccaagtgtctccacatggcccacaagggccttcctccatcagctgcttctacgtctacgtatgttctgtagcctctccccgctttaaaccactgcccttctgagtaatgtctctctttcacctgggttgttcttcctgctgtgtctccagctaaaatcctttcttaattttttttttctcaaaaccttgtcttttggggactgttaggtcctccttacagcctcccctctccccctagtgttttcccacctcaggaacatcaccccccccccccacccacacacacacccctgtccctagcacctaccctgattgttggtgcttagttggtgctcatgccttagcgtgtgctgagttatgatacaaaccccaagtttttggagaagagccatatgtaatttggaactgaggcctaaacagagatgcagattcagtgaaggaaacagacaggcgttttgtttctttttctgcacgcccctcataccacagttcggttctaggtgcacattggtggggggaagacttggatgttcaaaaatcctaaaataaaagttgtctcagtagagagagagagagagagactttgaatgcttggttgctctaaaaaacggtcacaccaggggctttactaattatagtacttttcatggctcttggtttaaagtttacattaaataggagagatgagcatgcagatcaaagaccacatcatttcagagctccaaggagtgggcccattttctctgcttagttagagttttgcttcattagtggtatgagttaatagtgttggtctgtgtataactcaacttctccccacccccccccccactacttcttggacctaaaacaaaacaccaaaccagaaacccagaggatatggctggcccttcattccttctttatttgcttgtgtatgcatacacatgctccgtagctattagttctaggccatagtaatgacccgtcatggtttcaggggactgtccttgatgctgaagggaactgctacgaaacaagatgcgtttgaatatgaaaatcatctcaaaattgtctttaaaagatgagtactcgggctggtgagatggctcagcaggtaagagcacccgactgctcttccgaaggtccggagttcaaatcccagcaaccacatggtggctcacaaccatccgcaacaagatctgactccctcttctggagtgtctgaagacagctacagtgtacttacatataataaataataaatctttaaaaaaaaaaaaagatgagtactctccaggtatggtggcacacgcctttaatcccagcactcgggaggcagaggcaggtggatttctgagttcaagtccagcctggtctacagagtgagttccaagacagccagggctacacagagaaatcctgtcttgaaaaaaaaacagaaagaaagaaagaaagaaagaaagagagagagagagagagagagagagagaaggaaagaaagaaagaaagaaagaaagaaagaaagaaagaaagaaagaagaaagaaagagaaagaaagaggggcactctgtttagcaatggatgttctggaattaggggggggggtatcaaaaccagcatgagggatcagtttgtagagcatttgcttagcttccatccagaagccctgaatggcatactcagaactcagaaactggagccgggaggatcaaaagttcaaggtcaccctcagctccatagctagtttgtggcaagcttggagtgtgagagcctgtttcaaaaaaacaaaacaaaacccaaaccacaatacacagagaaagagagagagagagagagagagagagagagagagaaaaaacacatcaccaaaaagccaaacatttacagcatcctttatgaggatgaagtctgaagtcttgattgcctcaggcatggtagcttacttatctcagtcatcctagattttgggagatagaagaaggatcaggaattcaaggttatcctctgtaggacgttcagggtcagcctgggttacatgagacttgtaaactcagcatcctttctttttttctttctttctttttttttttttttttttggtttttcgagacagggtttctctgtgcagtcctggctgtcctggaactcacgttgtagaccaggctggcctccaactcagaaatccgcctgcctctgcctccggagtgcggggggggattaaaggcgtgtgacaccacgcccatcgtgcatcctttctttaaatcctacttggaattcaggtgtggtactccatatctgagatcccagcacttagaattaagcaggagaagctcccagccaggactatacattaaaatcctgaagaaacaaccaaaaattattgtcatactgccaaatgtgtgcgaggacatggctctgtcctcctgtcatgtacataagtcatgaagccgtagttcaaacagatctgctagatgcagtcagaaagtaaacgttttgttttttgggacagggtttcccttctgcagctcggactgttctggactgttctggacttacctgtttttttaaaaaattattaattcttatttagtatacattggtgtttttgtctgcatgagggtgtcagatcccctggaactggagctacaggcagttgcgagccaccatgtgggtgctaggagttgaacctggatcctctggaagagcagccagggctctacctgccaagccgtctctccagtaatgagagtaaaatttttgaagagccattttctcttttataagacatttagttgtttggagaatggtttttatagaagtgtttggtgaacatctccaaatgggccccatagagtggttaattaaatctgtgtatttggctaagcacttgaagtttgaaatctagtataacttacctttgtagtgctgggtaatgaatttcaggcgctgcacatgccagggaagtaccctctgcctctgagttacagccttaccctgaaacgtgagtgcatgcatgcattccatacttatatgcatgttactatgtaattctattttttgaggcacaaagcaggattttactgtatagtcctggctgggagcttctcctgcttaattctgagtgctagaatctcagatatggagtaccacccctgaattccaagtaggatttaaagaaaggatgctaagtttacacttgggagggagaaacaggaggatctctgagtatgaggccagcctggtgtacacagagatctgtcttaaggacaacaaaaccaaatactgtatcaggggtacagtatccattcagtcaggtcactcttcatcaacttattacaaatcccatggtatttgtttaccatgttacaagacagggcttagtcctccaggctttattgtgggggagaaagacacctactctagcttatagccttgaagcggctatacagcatactgcatacaggcaggcatgtctggcaacacaccattgatagctgtggtagaagttaatatgacaagaggactgtgggtcagtggaggattctgggtgacaggtcaggattaaaatcctatgaaaaggtgccatttgtgcaagtacctgataagaccatagaaagagtgtactttggggaacaactttctcaaaggccctggggttggaagagggaatgtctctaaggaaggaaaaaacaaaacaaaacaagaattcaaagactgcatgataaaagagctgcaggcagggaaggctgcagcatcagcctgaggtacctaagagcaagttgtaaaagccaggccagggagtggcattttgaaattagcattttgaaggccacgcctacctaccaaagaggagatcatcacacagatgggtttcaccttgtgcctgcagagcagttagagagctagttcctgacaactcttcctgtggatgcagaaatgggcacatccgtggactcaagtgtgacaaaaggtaggaatgtcccagagacctcgagacttgggtggcttctgtcaccagcttttctaattctctgagactggaatgtggggctaagtaaaacttaggaaggaaattttcttttaaaaatcaattctcttttttttttttctttaaaaaaaaattttttttgtttacctgtaatgtttattgggttaagaagtatgtgcctggcatagatgaagcatgggaggtctcatgagcgggacttgttaagtaggatcttttcttctctcttctcttctatctcctctctaatttcctcatcttaaagggagcaggaacaatttgttgtctgagcttctgagcagtattcagaggagttaagttgcatttatttttgagtgtggccttcatgctatagcacatgtgtgaagatcagaggacagcatgggaatcattagttctctcttaacgatgtgggtccctaggatggaacccaggttgtttggcttgctggcaagtaccattacccactgagccatcttaccagccctttacgcacaaggctgaagagctggtgggtttccactcattttagtgatacttgtttcatttatgagcaaagggctcaagggatgaagatccgagctgggaccctctggattgctcaaatcagggttcctttcatgacctgattttccaacttagtacatcattagaaccacccgaaggcccttggtcacgtgatgctcttggtcacatgatacctccaccatcttagatggttgcatcaatattttccctgtcattaaacttgtgtgtcttctgtgtgtatcctaggctttcccttagatcttcagatagataccaaagacaaagatttaacagaattccacaagggagcaggagcttgttccggtgtagtggctgtctgtctggtatacactctgatggcggacgggccacccatcaaccaggcagtcttcgggttttacactgttaacctctctccctagctgacagcaatctttttggaagcagacagagtgttttccgctgagttggtacacactggaggctggcacgcaggcgtgtcccctgtgctcttgccatgaagggaagcgctgcaatctgactcccagaaagttccatggggttccagggctgagcagcaagtcgtcatcctcgggaggactcttacttcctgggggagggagtatctgcctcactcggctgcatagccacccctggtgcctgagttgggcccactcatcagatggcctctcggagatggcttactagcgctccagatttggttagtgcttgtctctgaggccactcaccccaggtcagcccacaaagccccaaggatgttgatggcttattcaccattaccagccttgattctcctggacagagtttatctgtgtagtcctagctgtccttggaattagctttatagacacccggctggccctgaattccaagatctttgcctgcctctgcctcctgagtgctgggattaaagacgtgcaccgccaccgcccagatattctcagtcttgattggtgaaacctgaacattccatgggacacccccgacacgcccaaggcagctctggtcccacattgtggggagtacacagttttccatcacttgcttgggatcctgtaagtttttacatcatcggtccataaatcccatcacagctaaaaccacttttcctcaagcctatatttgataaagaactgaacagaggatgtggagaccttttctagccaaagcctataatcctatctcacactttaaagagatggaggcaaggaaaatcaagagttctgctacataatggcaaggtcagcctgggcttcacacacccccttttctcagaataaacagtagcttagcagatgctcagcaggaatgaaaaaaaaataataaaatttgaaatttaaaactgggaaatttagatactttgtgaacaatgtttgaggggcctaggagaggcccacaccccagtatgacctagcctctgtgtggatttggcatctgagctggttgtaagtgttgttcactagatagttgccctgtgatggctatctgcgattgtcaatagttccttcaggagccaagttttggtgacaaactcatgaagccaccacttttggacagtctatgcataagcccctattttgatgtcctttaacagactcgggggcacgagcacatctgaggtacatctcctcaccctacctgttgcctagcagtaaagtggaagctttctgtggaaaagctcttgagactgatagaatattgggagggaggggaatgctttggaatcccaacaagctttgctcataagttcctcatgatacacatcctgaggctatctctgtccttctgtgagcccagagccacctttatcttgactgactgtgatcttggagtatttgctagcctggtaggcatggtggtacgcatctttaaggcaagaaaggcatgctgatctctaagttcaaggacatcctggtccattaattattggctagcctgggctacatagtgagaccttgcctttaaaaaaattatatacaacaaaaagacttctactttttcctcagaaaagtgttttgtacagtacggtgtttgttgtgtccggcagttagaagggaagacggggctgggtactctcttgcttcttggttttggaatgctgaggaatggagcggttcacaccaggcaagtcctctgctaccaagccacatctctagcccatgtgtccttaatgtccagtgagtcaaaagcagatttattttagaatatatccacaaagctcatttgaaatacacatggtcctatgtatggttcagtacgataggcccagcttcaatgttaattcagctttgatttaacaaaacataccttagtatatgcttcatggttggtttcaaacattggaaatgacatgtagtttttctctgatggctttgcatactttttttctttttttgagatagtctcactatggccttgaactcagattttcttgcctctgcctccagaacagtaattattaaaggtgtgtgccatcacacccggcagaaatttcaaatcttattttatcctctaaagacaagacatttctttaccatttccaatgaaaagttggccaaaaggtattttcggagtttcagaataagttgtaaccaagttcattatataagactgtgagttttggtctgcttcccatttagcttttagtttaagggattttctttgcagtcataaagcaaagcatcgaaaaggattagtaaataactcgaatagacaactggtacacactttttttcttttttgaagtgacgcttggtgcagctgtaggtaagggtggcatgtgcacggtgactgtcatcatgctctgcagtggaggggagatggtttgtgatcacatgaccatagcatcttatacccaagaagaggagggaatgttatatgtatgccggggaggcagagattagtactggttgtgttatgattttcaagagcagtggggagaaagatggcaggatggctcagtggttaaaggtgtgggctgagaaacgtgacagcctgggtttgagcaataggctggcaggagtggactgatctggccttcacatataacctgtggtctgtgcatacccagacatctacacatcccgccccccagccctgcatacatacaatacataagtaaaatataatttggaacagctaagattcacttggtccttgttctggaagggctgtttgtgtaggtttgtctcaggaagtcagagacagtcagctcagctgcagtgtttctggtttctcggcagaagattgaagacaggaaaaccggtctttttttttttttttgagggttgaggtgggtggggagttctctaagatagcctaggatggtctgtttctcctggtcctcctctgtgtctacttaagagttctaggataatacctgcacctccaccactgcagccaactagaaatctgttcttaaacaggagaaactaccacatggttcttcttaccataaacgagtctgtctagatgacatttggagaagtacggcaaatcgagtttgagttctgggtcacctttagcggagaacatcacccgccggcaaggtgcgcttgcctgcatgtcctttgaaacagacacagcataaatgaagaaagcccccttttctcctgttcctaccctactaaacccatggaaccctactctaccaccacagcctaaagtgattacactttgctttcacccacccttttggtggtggtagtctgttgtgtgaaaacaactctccgcacgatggtaggagcagcagtcatagctattgagaacatactaattaccaccgtcccacgttcttcacatgtgccatttcgttcatgctttacagttctgacacagtgaggtaggtacaattattatccccatgattcagatgaagaatttgagacccagagaggtagcacacagtcgattcagtgatgtgggctccagagccttggctactgctgtgcccaacctgatacctgaggtatcgttgactcaagatttgccaaataactccttgaaatttttcttcatacagatatgatggtatgatggtcagtaaggtggttgacaaacaagaacaagtaggttgtgacagggattctagcttctggaaacttctcacgccatgaaacagctcattctgctaggagtagggagttagacctactacctgcttgatttagtgaattagaccttcaggagggaggggtgactggagactctcagagtgcacaacttgcccagacagcaaagcagctgtcttctaggatgctcctagaaagggggtatagggagacagtaaaacaaaacataggggcccatgactgtgggaaagacctggggggactgggaggggtggttgggggggggggctgggcaggcctaaggaaaacctatggacaaagggaattttcaccaggtcatcactctggagaaggtaacctcaaaggataggtggtaggagggaggaagttggtcttctgtctgccagctggtaggatgctctcctgaatcactcccaagacacccatgccaagacacccatgccaatgtcattggcagctcctgagctctgctttaacttttgagcacttttgagcagagtagagactgcatgcgctccacatgagtttgtttgtatgtatgtatgtatgtatgtatgtatgtatttatttattgctttgggtttctgaaggggaaaaaaaccagcccattgtttttgttgtaaacttggtttgtttatttgttttgggtttttgagacagggattttctgtagttaatggcttacctggaactatgtagatgaattcaaggtgggtcttgaattcagagatccgtctgcctcttcctggggtctaggattaaaggctaggaccaaagtcatgggccaccaagcccagctccataaccacttgtttatttcctttaacatacggaaagagtttgctctcagctgctgttgtggcgcgaccctcagctcagtgatctgtagtgtcaagtatgacaactgaattcatctcacacttgtgtcttcatatttgcctagatcagctaagagagcttccgtttctttgttgattttcttgctctttcattttgaactctcgtccaaaggttgacctgggattcttggtcctccagccttagcctccaagtgctgggatcagaggcatgaagtaccctgtggagctgtttcatttcataaacaggagacagcgtggactggaggatagtcagagagcatcctacctccctccttgttttgggggtggggctcatcataatgctttgctctcttcaggggccctggacgagttgtagagctggacctgaattgctgtgagctttgccttttgcatctggagggtctttgaaaggggattgcttggaaactagaaacagaatctaagttttgcatgcttacgggctcaggttatcactggcccacagggtctgttattatttataatcggtgattttgctcgaatgagaagcaaatcaggttaggagagatctgtgctctttatttctcaactatggattgcatgcctgtgtcggtcactctgccttgacacctagtccaggtaccaagtgccggggaggcaaggataggcatatggttcctggtgtaagtctccacagcaactggcaaatcggcgaggccatactgcagagatgccagtgtgctgcagccgggaaagaggaagtgtggtcccagccagccgtggagggcctaccacgtggaggaagaggtggggaaggaaaagcaagatgcacttctcagctaaaacagccatgcgcccaatgaggcaggaaaatgggaagctgatttggggatagaataagacagttgtgaaggttgggtttgtgggtattctctagagtggagatgtgggaagtgttgcctggttttacaagccgccataggctttgctttcaagtagagtcatccagccagcgcttgggaggaatgcaagagagatggcatcaagtgtgtagcacacactcgaaataccgtgtcttcttttatgtaactgggctggcctgcagctcactgtatcgagctagattggaccttgtagtaaggctcccgcctctgcctcccgaatactaaggactcaggtatagaaagccatgcttagcttggtatcctcctgaatagaatagtttctttcttttgtggaagaatttccatttcagggctgtgggttatttttccaagcactgttaagtaataactaaggagtgtgggtagaatgatcgtagcactacaaaggtgcatggtttctgttgttgttgttgttgttttagtttgtttgttttttgttttgtttttgtttttgttttttgagacagggtttctctgtatagccctggctgtcctggaactcactttgtacaccaggctggcctcgaactcaggaatccgcctgcctctgcctcccgagtgctgggattaaaggcgtgtgccaccatgcctggctttgttgttgttttattttgctttgctttaaagaagaaaaggtcattgaaaggtgggagaatttgtttgcaacaaatagaatttaatcagacactgtttaaacttcctttattgtatcctgctaattggcactttaagttcattagagagctgaagtctttagtgggctagagactcatctttcctccactcaagtgttgcaaggattgggcctgggccgggcacggggctcaatattaaggtatttgtctgcacaaggttctggagttgattcccagcaaaggaggtgaatgccaggagtctagcaaggaccattttatttactgtgactcttgctttgtctgtcctcatggatccagtgcgctccagggctgagtggacagagggctagcaatttcagtctcgataacaggggtagacatcttcaggggcttagcagcttctggtggaaacaatctgttcataaaacagaatgctgtctctacagaggtgtcagctcggctcctctatgtaacagttgccctccccctaagggctccaccccttaggtgctccaggccctgctcctccttgcctgtatgtagatgggatagccagggaagggggccatgcccagggctttaaagtattttggtgggtgtgaaagcagccagatgggaggctccacagacaattagtggtttaataattattgtagacacagtgttcccttggactctgaagttttctgagttctctgtcctctggggaggaaatattaaaatattttttattggcctgcctttacatttcaaagcctatactcacagactaaaggagccggctgagaaggttgggggaaatgtacgtaggcccctgtaaaattggtgggccaaacagcacagagaccttctagtcactcacttaaaaccgatcggtgagacttcctggtttttttccacattgcttagttttgtctttaacgttggagctacaagtgtgcaagaggaagtggggtcctcctaagctgaatcaggattttttggggaaccaggatattgggaggcctctgaaagtgcagctcaaggcttcctttggtgtatgtgaccagcgggagggaggcgcctgttgtgatctgtgtgtaatgtccatcaccgtctggtaggatgtagctgtttttctcttcctttaacaaaaatattgctcttaggttgattttatgtggatgactgctttgcctccatgtgtgtttctattgtatgtgcatgtacacatgaaggtattggatattctggagacgactgtaggctgccacatgggtgactaagactgttcagctcttaactgctgagctcctgcccccctgtctttcttgtaaaggaaggaaacagaggcttggagacgtttgtttagctagcatcttacagctaatggtagttttccaggaagctcaatggctcattttccatagcattagggataatcttttgttgttgttgtttgttttatttttcctcttaccttttcttttctttttttttttttttttttttttttttttggtattttgattctgggtatggaactcggagtctcacagatgctaatcgtgcgatcttttgatgaactacacccccgccccgcgcatttggtcatttttgctgtggatgatcttcacacctgggtacctgaagctttctattccttaaactccattcttgtgccttgacaagtacctcgtgagagtgttgcatgcgatttgattgcctccaccttcagtcggtaaatggccttaattgagcagctgtattgttgagggaattgggtttaggttttggcaggtgaagcacggtggcttttgcctcgggggagtttatgttgtgaaaggaacccacaatgcctaatggtcccccaagccaagttcccatgggaaggccagggttcagagaggctcaccgcactgggtctgcacttccaggaaaaagtacaagcaggggccgaggtcccagcaggagaggacaggccggtttggaagtccagggtataatttgctgttgaagacgatgtaccaggagataacaggattgacgggttacttagagcccgggtcaggtggggcagaagttgacctttccatcttctggacatagggaccctaagatttgagcagagtagtgacagtctgtcctcccagggtcttggcagcatccttacaagggagaaggaggtttgagcattggtgctttggtgaccaccatgatccaaagcagagaacacatcccagggcacctggtacaggatgcactaagctaagtacttaggatgctaattgccccgagccactgcactgatgcacacacaaggaagtctcggtgaaaagctgagtcacaatctctggctccatagctgccgattcaggcgagccacctttgagaggtgtaaggaaggtgcggccaggtagcaggcgactgaattctcgctaggcctctacttggaaggcttgggttcatttccctttggtctgggaagctcttttagggtgctttgtgtttctaacgttggcagctgagcctgtgtatctgtaaggaagacttctgcacatgtagtgtggagacagctgccagttgggtcaggacaccaggtactgtggctctgcccggggtctcagtgttgtttcctgaggcctatctcttcttgatttcctttctccatcctggttttggggctgctggcttctgcctctatccacaaggagaaaaaggtcttccttacctggtgctcagcagggcaaggcaagtctgaatttatgactgataataacccccaaataatcattttgatcctctacagccaactggccttcctctagaaacctgcaaagcagtagtaaatccctctgttactgcactgctttgcgctcctcagccctctggtaaagctggaagtgcctgaaagagaggcagccagagccagggccagggcccacataatccacacgctctggacgtcaccccgggtgactcagattcggttgcgcttgccgtttcacaaccacctgcatctgatctccctccgggcaaactctctgcctggcgccctggactaggagcatcgtgctcttccagggatggcttctcccagtttgttttttttaaaggagcaggtatcgtgagagctgaacaagtcctgcgcgcattttaactgctgccttcctaacaatgctggcaagtgtgtatacttactgtttcagacattcgggagatctgatcgccatccctgtgacagtcacctctgcatccatcttacgagcaaagaagctgcagcttagagaggtgtgccttatttagggatactacagctagtggggcaaaattcaaacccaggccagggtcccacagtgctcttaattctagcccttctgaggttgttttttttttttttttttttttttttttttttttttttttttttaaaagatttatttatttattattggggaaaaaccccgggggtttttttaaaaacccccaaaaagggggcttaattttttttcggggggggtggaaccccccatggggggggggggttttaaattttgccccttaaaaaaaaaaagggggggtttttccccgggggcccttttaaccccccccgggggggttttttaaaaaaaaatttttttttttggggggaaaaaacccctgggacttttaaggggggtttttttaaaaattttttggggggggggccccccccccccccctttttttaaaagggaaaaaggggccttttccttttaaagggccaaaaaaaattaaacccctttattttttttcccccaaaaaaaaaaaaaaacaaggtttnnnnnnnnnnnnnnnnnnnngtatacttactgtttcagacatttgggagatttgattgccatccctgtgacagtcacctttgcatccattttacgagcaaaaaagctgcagcttaaaaaggtgtgccttatttagggatactacaggtagtggggcaaaatttaaacccaggccaggggtcccccagtggttttaattttagccccttttgagggtggttttttttttttttttttttttttttttttttttttttttttttaaagatttatttatttattatgtgtaagtacactgtagctgtcttcagaaacaccagaagagggcatcagatctcattacgggtggttgtgagccaccatgtggttgctgggatttgaactttggaccttcggaagagcagtcgggtgctcttacccgctgagccatctcaccagcccctgaggttgtttattaagtaaaattatctcctttgtggctgacatagcctctgttactttcattgggttctttttttaatttttttttgtttgtttgcaccccatccctccaattgttaaaaggcagaaagtgagctaatgcatatcaagtgtccaataaatatcaggcactattttgttttgcccctaaaaagaagtgaaatcaggtttcttcatactggagtgtaagctcataaggccttttgtccttttatctttttttttttttttttttttttttatgtatactggctcatccctaggtgctcagccaatggccgctgtagacgggtgagatggataaggcagggttactttaccagtttggcaggtgtagacagagaaccgggggcttcggattcgggtgtgcagcttccggccccatctgaaacagcctttgcttttgcttcacaccgcagggttctgctttgttttgtttttgtttataagaagcagatcctttttacacatgtaagctgagagtgatcagctatgccgtgggattacagagcatgatataaaacactataaatacccaatatccagcacggtataaacagcggataaactgagctgcgtttgtcgttgctgcgcatgcgtcttgtgttttgggcaggattacccccacaaattagtgcagctggaagcgtggtcgtcagtggaactcttggaagtatgttcaagtctaacgttcaggcctctgcttttcaggggagcgaacttagtgaaatcagctcagctgcactggggcggcgggcaagtagttagaaataccagcctttggttaatctcttttctgatcttcgtttacaaccgttgtgcttaaaaacaataccgtggtttacttattctccttacaccttaactagtgaggaaagatgaggtcctccgaggtgtccaggtgcggaccattgatcttgcatgtttgatttccgtagacatcagtatgtccctgcctacccaggagatccaacaatgtggtgggtggggccccagttgctcacattatcctgttagcaagcagtttatatcaataatctgctaccagctagtaaatcaaaatcacaccatggggctggagagatggctcagtggtgaagagcactgactgcttgctttgccagaggtcctgagttcagttcctagcaacccacatggtggctcacaaccatctgtaatggaatccgatgcaatcttctagggtgtgtctgaagacagctgcagtgtactcatataaatagaaataaataaataaatcttttaaaaaatcacaccatgactgtaaaaatgtttgtattcatggtagataatgagccatttgaagaaaaagtgacttgtcttccctttaagagtaacgaggagcctggcaccaggtgtggtggtgcagggagccttaattccagcactccagaggcagcaggagcaggtgaatctccgagtttgaggccagcatggtctacagagctagttccagccaggacagtcagggctacacagagaaaacctgactcaaaaccaaaccaaaccaacaaaaaagtgagaaaggaaatagccctaaggagttaattttttttctatgagatttaaatataacctttaaagatttattttatgtatgtgagtgttttgctcacttagatctgcaccatatgcatgcctcgtgcacaaagtggtcataagaagccattggattcgctgtaattagacttctggactgtgggtcctgggaatcgaacctaggtcctctgcaagaacaagtcttaaccgccgaaccatctctctaatcccattagattctaaaattattttcctgcaatatgatttcaccaaggaaaatgaattaaaagaataacgccagtgggaaataaagtagttttcctgcaaacctgcatgcagcatgcaggtgggtctgtgctgtcctgaagccagtgcatgccaggcaagcactctaaccactgagccacacctccagctgaacacaatataaaagcaggattcatttgtgggtaagaaactcacttatatacattcccctttaggttatactgtatctttttcaatttaagaatgtatgaccagtcttttctggtctagtcaaccttatattggcataaaaatcacattattttgatgtggcataatctgggttctcattacggggaggaggaatgtttcctcatttaaaagaagccagtcgggctggagaagtggctcagtgttgggagcactggctgctcttccaaaggtcctgagttcaaatcccagcaaccacatggtggctcacaaccatccataatgagatctaatgccctccttctggggtgcctgaagacagcttcagtgtacttacatataaaataaataaaaattaaaaaaacaaaaaagaagaagaagccagtctgggatttaaaaacaaaacaaaacaaaacaaaaaaaaacaatccacaatcagaagtcggttaaactttatgtaagaaaatactaatgacaaaagtgtttgtttttgtttagaaagtgacccgttagtctcagtatcccaaacaagctggagtcaacaatgaaaaacaaatcgagccattcgaggaggccctcaaaggggccagactctaagctggagttgtagcaaggtcctgggcttgagctttcaaagggaaaacaacaacaaaaagtttaacttagaatgaagagttgagttagggaagtaagaagagggggctgggctctttgtttagtgtctttaaaatgggggggtgtcacatgtaggagcaaaagttcttttttgtttttattctcaacatagtactggatatgacatgccatttcccagaggctatgcctctgtaggatatttcattttaatctgtcatatttgggtactctttcataatcttcaatataggctttcttattgctattattaaaacacacatacatgtacgtgtacacacacacacacacacacacacacgtacttatttgtagggctataggcttaaacctagggctatatagggatagatcctcaaacaacaaagcaagctgggagtcgtgcctttagtcctagcatttcatgaagcagtgccttgcctgcatagaaagttctaggctagaaggttacatagtgagtcttaaatcttcaagaccaagtacgcttttattcttttagactatattggaagctgtaatgacaaagaagccattaatagcattttagtggcatttatttattgtcattagttgtaggagagtctttatatacatgcagaccaatagtacttacatgtgaatatacttagctggtagataacttactgaagagataattaagtggcccccttgaaacagttccccagaggctcctgcccagagacagttcctgtgtatgaatcacgctaaggactaacgtcaggagaaatagccatgaggtcagctctgaactgtaaatgggatccctcaactcagcctaggaatggcctcggagtggtgcgcagctgagggccattctctgagaagttagggggatgggttctgttcacacaggtgggtcaggagagtgacattccctgagcaatgtccaggacagcccttagatcacagtccttcagaacaaagaattgagtcaggggagtgaattcaatctgccaggttgtccaagcatccttgcctaccttcattcctccaaaaggcccttttaattatccaccatggtctgttaacatgaaccctgggcttgtgagttaggagcccttaacccaaattcatctgccttaattatgtttagctttagtttttctcatccctgaagtggacagactatatatcttgaaccatattgttaggcaacaaaacgatgcccctcaccactcctcccccgcccccacctcaccccctgtctaacagtgcatattaatctgtgggaggagagaaatcattatcttttcacataaaggaaaagtgccagttgctttaaggtagaggaacagaaggaaggagcccgtccttaggaacctcatctccactctcctctggttgtattttcctctttttacaatgggatgccttctgtcctcaccattgagggccaagttactgcgctgatgaactcgccaaggcgcaggtagaggtgacggccatctcagggaaatgtcctttgctatctgtaggaagactatattacatgggccctattccaccatgtcctattttctaagagtctgggccggaagcaggtatgctgtttacattttaggcgggtctgtatgtgctccaaaacatttaatgtgtctctatttcaagcctttataatctttccatgttgttctcggaactttaggtggcagcttagcaaagtaaaattgacagtaagaacttatcagatgagcctgagaaagtaccgggtccagaaatggtcaaatccaggcagggataattgggggaagtggatcttgtaaaggaggtaggtagcaggtgacctgagggtctgccagacctcagttgaagaacttgtgaccgcctacacagtgcacctgtgctggtaaactcagctgtgaggaaggctcctctgcccaactagaggcctagtcactagggtgcacagtgacctcatgaaggtctcatggggaaaccctccaaacttagtttagaaattccagagcaagtttggttctggctgaggttcaagtgggagggtatctccacagcaggacctccatcgcctttgtaggtataattacagttgttttttttttaagatagaaatgggttgtgattgatatcttagggttttagtttgttttgaagtcttaaacacctaggaattcctctccccaccccctccagtagcttactttgggtctcagtgattagaaataggcacattgtttgtaagagagaagttattggagaaaggggttatggaaacacacacacacacacacacacacacacacacacacaagcttgaacaggcctactttcttgagaagaaagtggttttttttttttaggtgtaacagatcataaaataaataacattctctaaagacacgaatctataaacaaagcataaatatctttatttaaaatggattaagttctgaagcctaatggctttgttgtagtaccatgtggcttgttcaggtctgtcactaaacgtgtgttgccctcagaattacattagaaagcaggcatgcactggctcacagattcttaagtgcagtgcggtggtagtgaaacagaaactagatacagatactgaggaggctaaaaagatgaggtcgccacacacctggtcctttcccttcccttcttccctttcccttcttcccttccctttccttcccttcctcccttccctccctttcctccctggccctctccttccgttnnnnnnnnnnnnnnnnnnnnnnnnnnnnnnnnnnnnnnnnnnnnaaaaaatgccaatgcttaacatgtaaaataggcacagtccctcccctcccatcccccctatcccctccccattcccatcccatcccttcccctcccctcccctcccctccaagtctgctcttttgagatgttcttgcagaagatggaggaagctctgcccttagggtcatctttcctggatctggagatgggagtggctgggtactgagactccttccccaactgtgctcagctgaccctttgctttataggctgtctggaggtgggcagtcctgcctgtccccaggctttcccagaagggctgggaggagccggaggaacaaggagaatgttctgctcgcctagacacttcctccccaccccccggggtgccgggaggacctgggtagggagttggaatccaaggagccgggctgaagggtctgaaggctgtaactgccgctgtctgtgcggtccagaagttgcttggctcttggttctgcacggtaactcgagtagggtgcgcgtgcacgtgtgtttagatgccccaatgcataggcaagtaaaacttacgaagccaaatgccgagggtttggttggtttttttctaaggaattgaaactggcttttctggcccaacaatggagtcagctgctcaaattacttcaggtagtcctcgtcgtggtaaaaatgactgtgggaagatgcagttgtaaagtgtggttctgaagcccccccccctcttgtgcctttttttttttttctttttctttttctttgcagtgctggaagaagaggattggagaagtcacttggccctggcctgactcctcctcttcctctctctgcccagagctgaagccactgtgctcagggtgactgcctggtgctcagtgctgtggcctattttaaagtatctttaagttgtcggcatgtcagtcattacatccagggttccttttcgttttcgagggcaccctgtctaaccgtttagccaacccaccccaccccttttccttgtgcctccagtcggggagggtggtcatgttaactgatcgactggcttcagaaaaagcgttcattaattagcgttttacatcccagtcagtcagaaggcattcgcacatttgtatgaaaggatgtcgaagatccaaatctttgaggagaaatacatgggaaggaaaaaaaaaactgcatacacacaaaacctggcactctttccagtttaagcttcgtgctggtccctgttgagtgggtatttgtcccttagtctggaggtgatagaaaatgccagttactgtggtatttaactgacaccaaactgctgtccaaatacttcagttagaccgaggcttctttcttaattggtgggaaggaaaacccacccaggaaaaggaggaacctgcactttcattggacatttaaaacatttcaggctggagagtctgaagagcacacgacagtgtttcattttaattcacagctcatttgtgatttaaaaaaaaaaaagtagtcaaatctctcctaaaacttgagccagtcaaatggttcatttatgtaagggttcagcaactgaaagctctgtactctcccaaggtcaaaaaagtaattattgctatcgaaaatttttctggaactggggtattttaggtcactataggaaggtttactaatactagaaattacataagccagttaaggcacatttgaaaaacgattatgttggcatattgaagactaataagatgccttggtaggaataattagatgaaacatggttttttttttttttttcctccccttaagcaacttccttgttttctggagggtgagcctcagtaacaagatgtgctttatatttcttacaggtatctaaaacaattctaaagataatgaaaagtttttatttttgtctcttgtttttttttaaactttaaatctcagtttctgtatggtgtctaatcaaaggctcacatgatagtgagcacttgaattttagtaatgaactactttttggtgcattgaatgaatttaatatgttaatactcctgtaaggcccagaactgcctggctgccccttgccctgcctgcctggtactggctgaaaaggtaccattgtttgttctacaaacactgggtgatgttggtttccaaggtgactgattctattgctgctctttaagcaagggggatggggaagagagaaagtaacacctgagagcatcctatttgtgacagtccatgtgtgttagatgtgtgtatattgacattttatattaactgaggttatttgagaaaagggattatgtagaaatacagtgtcaattaacagcaagttcagatttaatatgatatatagtaaatatgatggatgttaagggatgctagaataaaatctacttaggctgaaataaactgttaaccttggacgattaaagagctaagtgagagatattttagaccataacttgaaatatttttcttaaccttttcagttataataacccaatttacaaaaactgttcagataaatacttagcagtatcattaaaattggttattgataaagtatacaagtcttcagaaaaatgagagtccatgaaacatacatttctggtttgagttttgttattttttttttttttttctgacaaccctgtaagatcgtggaggtgcatttctaccagaaaacttccagaggcaacaaaatggacccagagcatttattcatggctgatagataattgacataattcatcagtttggacgtttgtactttctcactgagaaatttcaggttcaaaacttacagaagaattttcttccagccaccacccccccgcacccccacccagtgcatggatgcagttaacagaactttgcctttttactccctatctggtttagtacagttcatgcgcaggtttcaataaacattaaccacttttatcagagcttgcagtgtgctgaatggttagtaaagagagtgtactgcaggagacagatgaaaatgagagtccaaggtcagaaggctggtggatttttttttttttttttttgattattgagaatttagggaaaaagcaaagtcattatgaggcctactgggaaactagctcttctgcccagcattttatgtatcgagacgaacacgatggatttgttcagatgcagtgcgaggcaagggtgttctttcatgagaaagcatccttgaaggatgcaatgttctcaaggtctccgcaaagaaatgaagtgtggcattcattaggtacttttgaaggttgcagggatttcttttattcctttcaaaaagatgtctcgtgtctgctccctgatagccatttgtatcagttagtacagtcctaccggtaaaccaaagcgctagaattcaatatcgccaaatacagcataaaacatgggagctccacatatcatgtaatattctagtagagctctggctgtcagctctgaaagtaagaacctggttctcccataatttttttttttaagcaaaaataaaatttcaaacgcggataactaagctgccctcttcctgcccctgcgacccaggggttttaaagcggcgacggcagaccgggtcgcccactcgccttgctgtttgcccagcggtcggtcgctcctgggtctgctccgaccacaggggcagtaaccttgaggttaaggttgccgaagaaacccgaagccctcagtgtacgctttaaacgagcctgggcgtcctcaggcccgggtctgtccttgtcaggacgcgccgggtgaccccagagcttccaggcctgtgaccccgcggggcatctctcccgggttgggttcggcttcccagagaagggcttgagggagactggaggtgagcagccattatagaggcacgcgtaggcggggacaggaggcgcccgagccgctaagccaggccctctaggaccggggtcggtgacctcctccggccgaggggacttgcggtgcttggccaggcgccgcgggacctgctcgacgctcctcacctccgctccagtgctgggcactccgcgagcgggccgtggagctgtcagtcacggcagcgccgccgccgattggctgaggcggcagcggggggtggggcagagcgctggcatcccccgatgggaccttgaagctctgctctctccctttcaggatctctggctggagcagcggctttaagtggcaactagaggtttccccccagagcccgtcgaggcatgaagccttagaaagaattctctcagagacggctttagaaaatgtgggtgctctgagcaggacccccatcttcctctttacgccttcctcctcctggctagctcgagggcttttcttcagctcgtgaccacgtttccagttttcggaagttttcagaggcctgtgctggcgggcttgctcgcattctgtagttttcccctcagaaccaagtccctgttcggatcttgggtttccctcgatgggtggcggcgggggctcactggagggtggtgctgggctggcccgctgcagagctggaatccccgcaggaggccccggggagcaggaagtcagggacttccatgtggggacagcagcggagtggcagcagccaggtggccgagcaagggagcgagcgagcattttagcacacacagctcagccttgcctttctgaatcccctggtcagaaggggcaacgggtctctctaaagtgactctcccctggagaacagaggcaggcctgcaactttgcatccttcatgggaagcccacacgttgcagtcactgtgatgaaagtggggcgcccttgtctcatctgagggctgtttcaaatttctcttctcagaaccagttgttagaaaaaaaagggcctgtttagctatggtgtggtttccttgcgttccgaacccggacatcacactagcaaggagagtgttgtcgctgctactgatggccaaaggtctcttgccacagagccggcctgttaggtgtgctcagtcttatgctaggacagtccacagggtcagctttgaagctccctggccagttctctagaaacctttcagaaatgtaactcagacaggactggagccagcgaccgggatgcagcctcagagaagtgaccctcccacatagtacgtgacagtcgcctggatcatttctttgtcttacagtgtgatgcctggccgactgcactttgggatttgcctccttttttgctttactgtttggtgaccagctttctcaaaacggatccatccgtcaccagggtgagaactcttccatgctacaaaaacccacccccagaagattctgattgaactagttgaggtgaggtcaagggtagaaacaggtcatttagagcatctgtgtcaaaaaattttttttgatgaggtgggcgtggtgacattcatcttcctcctaagcatctctctgagtttaagccagtcagagctacatagatccaacacacacacacacacacaaacacacacacacacacccctgatgagacaaatagatgtgtgtgtgtgtagctttcaagagccagttcttggtggattttgggaagagctacatagatccaacacacacacacacacacacacacacacacaccctgatgagacaaatagatgtgtgtgtgtgtagctttcaagagccagttcttggtggattttgggaatggaactaaggtccctagacttgtagcaggtgcctttaccctctgagtcattttcacaagcccagcaactagggaaaaaaaattttttttaaacatggatgtaaggtaagccccacattctcctagctgatatttgcttgctataaagctcagtttgctgttagatagcgcactgtggcacttgtgctaggaccatcagggccttcagcaccgacaggtgcaaatgccactaattaattttttaagaactcagagctccgagagttatgctgagtagcaggcatcaggtgcttcttttgttaaagtcgtggagaagcagtgtttcaggggatcaggctatgtttaatcgcctactctgacgttatggagcttgttgtattgagtattttctttaaggaggaagaagaggtggtacgttctggtttctagtgtgcctttcccttcacagtattatcttggaggggttgcctcgattatcattaggcccaggtcctgttagaagagggttaaatggtactcgggcctctttatctgagctgttttgccacagccgaagttgacagcctgtgcctctaactgaattcagtcctttttcactgggaacaacagtaaagtcaggggctcctcatgccgagaagactttacagcccctgaacagcctttggcttcccagttcatgaatgcaccatttgttgttttgagcacaactgttagatacaactggtcttgcggcccactctgcccgtggccagtgagcatcagtgtgtttggattcctcccccaacacttgcctttatttatttatttatttatttatttaattttctggcatggaccaagattttattcacactagaatttctttgacccaatttatattttttaaaagtgcaaatttcagaaaatcaggtttttggtgtgctaaagctggcctgagaaatttgaataagtaattttagttgattaaagaaaaatttggtgggcggtatgtggtttacttttatacacatatgctgactttaaaattgaattttaaattgaagttacaaagttattgttacatcatctcttaatcaaatattgccttcaattcagaatttaagatcctagatgctttcatagcaaaaataagcatatgaggtagtgggttaattttgtttaatttaaccattttacaatgtatacgtctatcaaaatgttgtgtatatactataagtaaatacagccccctatccctacctgctgctcagactcaacccagagtctttgctgtgctaggcagtgactactactgagatacatatccagtctgacatgttttgtcaaccacaccgtaataaaacttattaattaaaaaaataatttaagggagctgtcagttaaagtttaacacggtgttctcaagcatttctagaatattctggataacttggagcagggctgtacgcatgatagtgcttgtgctagctttttcacttctgttttcttttcctctcacatgctggtttggggccctgattggttgcagcaggtgtttacattgaagttattccttctttatagtttaaggtattctagctagagagtattagtttccctttctgctctggtttgcatgtccatactgacctttccagctattgttggtcttggatgggccaaggacacaaatttctgattactatgttttaaacatcctgtaacaatggatcctacatgcattgatatcctcgggcctctaataacggcactgttgggctgctggaaatgaagaagttctgcttgttgaatctttgatctggtttggtttggtttggtttgttcattttatttttcagaccaaggtctcactttggctggcctggagcttgctttgaactcacacagatccacctgcctctgcccaaaggcatgaaacaccacatccctagctatgtagttaaatcttaagtaaattctctccctctgtctgtctgtctgcctgtctgcctgtgtgtttggagatagtcttgctctgtagcccaggctggcctccttcaggctcctttgttctgggatgtttatctgtctttcagagaagttatggagaccctgcattatgtttgtgtttttgttaaaaattggcgtattgaaacacgtacaggaagaaggtacagtctggtgtgggatctttctcccttcactgttcttctgtgaagatgtctcctgagtggtagggagggggagggaggggaaagcaagttcatgtttaaaggtcctgggcagcagctttctcagccctgtcctcaactttatgcttggttttgatatgtgcctttaaaatgcataaagttgcatatggctcgccttctaccacagtttgtgtgtgtttaattatgtgtgccatttgaaaaggcagctaaagcaccagcaggaattatcagcaggtagaaactgcctttcctatgtcagagcagccagtgtggcttagttgatgcttctgttgctctaagcaggtaggtttctggtctggaggctacccattaaccctataagtgcctaactgcagactggaaagataaagaaaaacaacccagtgttttgtccgactgcaagacaagtgaaacagggcagtttaagcttgatatgctcatgtagaggccaaggaggagacctgggaggtgatgggatgaaggctcccatagctgatagtgaaggtctcagcaatatgatcagaattcccgtgaggaatggggttagctcttctctgtggtattttctctgtaagcctgcctttaactgcccacatagctgtgaggagaggaagaaggaagaaaggggttgctgtttgcatccatttgccagaaaggagttaacagaacataccacaaaacaggttgggcaagactgttaaagtcagtgatgaagcctgcctcctccccttctcttcttcttcctccctcctcctcctnnnnnnnnnnnnnnnnnnnnctctccttcccttaaccattttcaggacttgaaaacgtctttggactatcgcttacatccccctctctccccctgcacccccaactcactgcctggcttcccctctcctagtcagaacacttgatgtgaataaaatactttgtgcggatgaggagcttgtctgcgacaggcaggcagcctggccagctgtttctcaagcagtcgatggtgccctctgtcatgtaacataggccctattcagcagcagcattcttgagtatgcatttatgcctctgtgggactgtggagtggacagcttgggagggagggagggagggagggagggagggagaatgtggaggctggaatgaagaaggagtgtgtgcattcacacagactcggagagcaatgagctacccaaatgccactaagtcagaagacattgtttgaagcatctttagtgagctctgacttctggggtgtcctggggcctaggatgcaggagacctggtttcatcgcaggccagtttgtgtttgatataagttgtccatggtgtttgcattcattcatcccataaacataccatatatagtcacgcttgagctccctataacatcacaagggaagcactcctaatgcacagttcctttcttgctcagagaagcagactcacacgggctatttctggtgtcttgtggcctgctgtctttggggagggggagaaaaaaaaaagaggctcttgcttttcatagttacactgtttgcaatgtttctgattcttgtttgcctggcactctgaaagttaaaagaattttactgtcatgggaggaaaaacagaatcctctgagtgcatctgttttagaataaaagtctgtttttgttagtgtctttagtgtcacatacgttttgttttatgggtcctgatctcccactgttcagagagcatccttttatgtcgttagggtgacataccctggaacatgtagccgttctcggtggctacagagaggttttccttctgtttcctctcagccttgctgagctgtccagattatttaccacgtatcatattagatggtcaaggcaggacatgtagcttctgtgggactgatggcagccttcagaacctgacagagcagggttggccgagtcgaggtgacagtgagaaacaagtgcagtccctttgtcccacacctcgaatactgtatatgagcttggagtgcccatcagagcgtttgtggctcagataagagatccgtgccccctgccccaccccgcttacactcctactccccggagtgttttttccctcaggactcatgtaaataacttgagggaaaagatggttgccaagttgggacttctgttttgctttctttcattggcctcatcagagcggatctgtatctgactgtgtgacagttaattgtcccatcctctcctttccaaggctgataagacactgcttctatcaaacctcactgaggagttcttaatgcagtagaacaaagctatctttttctttctttctttctttctttctttctttctttctttctttctttctttcttttgtaatctcatccttttaacttacataatggtgtttctccaagtagtgcaagctaataagttaaaagtttcttcaaaagcatcagtaagttcatatttaaaaagtggttaacattctggagtcagatggggctctgtgagttcaaagccagactgatgtacttagggagaccctgtctcaaaaataaacaaagtccaaacagatgtctgaggagatgactcagcagtcaagaacactggctactctgccgaggactcagattctgttcccagcacctacatggcagctcagaactggctgcacctccagccccaggagatctgacgccctctcctggcttccttttgcaagcacgtggtgcactctacatttgtttctaggtaattgctaattattagtagtaattcatcagtattagatgctgcttagaaaatccagatgacctgatgccactatggagaccacagcagcctggttaacatggggttgactcacttttggggagataactcacttggcactctccagtacagactgagtgagagctagtgtggtgaatagtatatatggtggtgatttatagttttcaaaagccacgcaagtgttaagaaatcccggcagtaactccctaaccttgatttgtgtagtatgctagcaatatttttactgtttgtttgttggagacagggtttctctgtgtagctctcaaacaggcctttaatcccagcactcagaatgcagaggcaggtggagctctgaatttgaggccaacttgatctacaaatccagacagccagggccacctccacatacccaagtgacacagtgcatgtgagtcagctgacactaacacctggctttgtttatagtcttaattatagttgtgtttttttttttaaggctaagaggagctgatatctctctctctctcccccccctctctccctccctctctccttccctcccttcctccctccctctccttcctttccttctttatttattctatgtatatgagtacactgtcacagatgcacttgaagagggcatcggatcccattacagacagttgtgagccaccatgtagttgctgggaattgaactcaggacctctggaagagcagtcagtgctcttaaccactgagccatctctccatcccagtcttaattatggtcttaatgtgaattgtcttttgtgttcatagctagaatggtatgttagaaaagatttattttatgtgtatgagtgtgttgcttgaaagttcgtctatgcatcacatgtggatgtcagaagagggcatcagaccttgtgagctgttatatatgtgaccgcacatatatgagaacctgggtcctctgtaagaacacacacatgctcttaactgttgagacatcaacccagctccaggatgccattgaggttttttaaaattatatatatttttaaaactgtctctggtataaagaaaaaagatatctctataccagagaggtcataggtacctggaagatactctttatagaaaaataattttggacttgtgctgtgagtgtgtaaggtttattttattattccgtagatgtgtgtatatatgcacgtaagtgcaggtgcctgagagagtgtcagatacccccgagctgaagctacagtagttgtcagccacccagcatggatgctggcaaccaaactcaagtcctatgcaagagcaaccagccctcttaactgagctagccctaacctcactgggtgtgcatgtttcttttgttttaaagagacagtaccctactttgtagcccggacatgctttaaaactaattcctgtccttttgcttcagccttccatgtgccaggatggaattgtaggctcagaaggaccatgttctaataatctcataggtacatttgaatactcaatacttcaatatattagctttcttctgtgcatttaggtttgctgtagcacatttctaacactgaggaaaagcataaacttttatgttcctttccaaacaagcccttggtgtttttcataagtgaaactgttcatttgaatatttaacaagagttaaagttgggtcttgcagtatccagggaaactctgactgcagattgccacactaaaggttgaaagtattatcttacatggtagtcactgttgacactgtccagcaaaggaaaatgcatttgaactacatataagaaataggaattagttgtctgcatgctagatgttcagaacagctggaaaagtaattaaaagcccagacttcccaagaagcaagtagcaggtttgagagctgactctttgaagtggggttaacacagggtacatgtgcagaaggggtgttgctgaggggttgcgatagtttgtctttgaaatccgttgcaactggcagaagtgacctctagcaggttgtgatggctactcttgtttttagatggatcttgtcatatccgctggtgggtggagcctcagggacaactgttagagtggagtggcagaactggaggtgcaggtagggaagtgtccaggcatggaatagaatagcctctgggtgccaggagaacagcccttgtgaatcataggcatcgagagcttgctcccgttggagctaatgggtagagaacaggaaagtgagtgcagttactattctgtccctgcagagctctgaatctgaagataccacagacattgctgggctgttagtggatcctcagtctgccatagccactacttaaaagctctttcctctttataaaagcctttaaaaaaaaaattaagctagatgccaccaatcacctttaaagctaacgttgctcttacagataccaagtcgcttattaagggggaagaggagactcagatagaaaaatttgatcaattgatttaaggttgttggaggattaaaatgttacttgattgctggccttatcttggatttgggaatttcaaggaaaaggggacaatgctggcttttgtccaaggatttcagcagtcacatgatctgtgtacccaatcccaggggcagagagtgctggcaacttgtgtgcctcgcctcatccattgagaggaggaactgctgagtgggaagggtgttctggcttgggaatcgtttagctgagaactgactttggtcctgaccttaattttatacaaaatctggcacatcccaaagttatgacatgaatgggctatgctatttggctataagttggagtttaagggaggcaatagcaaggaaaccagtcgaggcagtcacttccagtcccctgctgcacggggagaagcaagcccagccaggttggggcagagcacagggatcatcgtgataaactatcttgaataatttagagatatggacaatttattcaaagtctgaagctgcagatctctgagcataagtaaatggggatctgggttatataaagatagcatttataaacccccaggaatttacttacagctagattcccttgtgatgggcatgtgtgtagaggtgaagtgatcacgttagagcaggagagccatgcgggattgctttatatggctttgttttctcagggttggatccccatatctcttcctttcacacagaagcatgcaaaggactgtggtttgatgaaacagtaccagtgttatgaagccacttggctgaataataaatcatttaggaacctcgtgggaaagtcactagcaagacatgatgctgtttcatataatttaataagattcttttctaacagcacacaattcctgttactattttttaatggtctgtaagagaatattcaatgctatttccttaggaagagtgaagaaattatcccccttcaggattcaaatgaagatttattgatcttcataacacaaatagaatgacattgtttttatgtatgggagtaatttaaaactaggttttcagggctgggaatatagcttagtggtagggggcttgcctaacaagtgtgaaacaagtttgttttctagcatggaatggtggtggggtgggcacctggatagggcattttgctgtgtcactcaaacttagtgactcaagcagtcctcccgcttcagccttcagagtagcaaagctacaggcatttacccctgcacccaacctaggttttctccttttcttttctattctcttctttctctcctttggtttgcttgtttttatttttcgagtcagggtttctccatgtagccctggctgtcttcaaactcacagaaatccacctatctcttcctcccaagtgttgggattaaaggcgtgggctatcacaatcacctggcagtgaaaaggcatgtgtggtggtggggtagggaaagaatagaggccttttgttctatatagaaagatgatgtgttccagtagaaaactctgcctcctttgaaatgagttgtagactagagtctccaatgatagccttccaggatgtgcagttctggctcaatagagtgaaagactgtgtttgattctgttaaatatattactttattgtttctttccaattctttcgattttatgtgttttgttttctagtttaaatctggcattttggtgcatggctaatcttagcacttggggaaaatgaggtcagcctgcctgggcaacttcgcgagatcttgtcttccctgcccttcaaaaggagtgagatcccctcccccctctctataggcaaaataagttatcagtccacatacaatcaaatggaacctttgtgcttttggtctgtcccaaagaagcagaatgaaaatcctaaggattccagtgaggagagagaaaagcagtcacccttctcatctgcaggcaatagctcccaagatcccttgccacaggatgctaaactttagtaatctctagattatttttaatatctaacacagttcttacgtgacttccctttgattcagtatagcactccaggtacagcagatctattttcctttagaaacttccagacttgggcggggaggtgtgcggctgggtgggagtgaggggtaaggttatagaagccatggtacagcaggcttctgtggattcttcatctcatccagctcatgttccaagtcctccagcgtatttacgtttcaccctggaaatacttgtgagcatacatagttttctcagtgagagttgcttcatgagcatactgcaacgagggctttttataattgggccaaaacagacctcaaataaaagaacatgaaaatttgctgataaaacttaatgaggatagggtagacatcctggctgattacacattcacccttagacacacatgagtttattagaagcagtttgagcacctttgtcataaagatgataggcattgtttttgtttgttttgtttgtttgtttgattgattgattggccgatttgtttggtttggtttggtttggttggttgagacagagagaagatctcatggttgtagccctggaactcaatgttggtatggagctcactgcgattcacccgcatgagctaccatatctggtacagatagacattggttaatttaagatatactgaatgaagtatcaaataagccttgaaacctaagacatttaactcatgcctcatggctgacataaagtcttcggaagagttataacttgttggtctagctccctcccaggctgcagtgatgtacatggccctaaccagcaagtgacctgcctgaatgtgaagttattctctgaccagtcagttattgtctaactagtgagctgcctgccttgtcttcctttatcattttatctcctgaaggtttactttgaacataaataaatgaagacttagacccaaagcctaaaacatgaactgttcacttaacagtaattctcaaagtgtgattccccaagtaagtcacacaagcatcacttggtaatgaagactctcttatactagatactagagggctggcgggtccatggtagattgtgtgtttgtgtaaggccctaggttcttggattgataattagcaccataagcaaaagaagaaactgcagtgggcttctgcaaaacagctatagtcagttattgaggtatcggaaaggtcaagagtgacttaagttttagcaccagtcggattcatggttgaagaattaagcctaaagttttgataagcatttactactgtgaatgtctgggaaacatacctgggatcacacatgaaacagtaagtgttagagggtttgtactgtgtgtcccagtctaccctcctatcaaatgtcttcatctgctgcccacagcaaccatacgatgtagctgtttttattgactttgtcttttagctgagaaaaacgagacagggtggtgtcacagggtcaggatgcaaatgataaatgtaagaactgaacccaggcacaaagagtggctcagaaatccaccccctacccccaccacagacagggtgcttgcgtgcgcttgctcatctttagcttgacagtttactgggccctatcgttttttgttttgtttttttaacatttttttgaatggagacaatgtgagaaatagcaggaagtgtggtgcgatggcgacagttcatattttaagttaagtcccctcaccacgagctccattcgttggtggtttacatgtgtggtaggctactggcagtattggccaatcatggaggtgcatggctaggttgtagttgctcagccatttaaaaccgaacaataaacagaatgaggctgttaggggtagaaccagggagttagtgggaagtggtttctcagagtgaggtgtagctcagtcaacattacagtcttcagttaacatatgtgcaatctctgggcttactagggaggccctgttctcatcgccttcccttttgagtctcctccgacttttcatctctctgccctttcagaggtgtctgtctgtgtgaagctggattccatcagacactttaaaagtttctgttgagtcttcagtgtaatagagaaaatgtgtttttctttccaagagatgggatagaacagttgagccacttgagaaggctcttggaaggagttaatggaggggatctaatcgttagcatttggagccaatgaaaatgcttccaaatgacattaagaattgctgatccccttacattcttttaactttagtgacgggctggagagatggttcaatgcttaagagcaacaatggctgctcttccagaggacccagggtcggttcccagaactcacatggtagcttacgaccttgtgaaactccaatttgaggagatgcaatgccttcttctggccttcttaggcaccagacatgtatatagtatacatacatgtgggcatatattttatgtatgtattatacataatacacaaacattgtgcacatatatgtgaacatcatatcatacacattataaaaataaatacatctttttaaaaaataaaatgtgacgatcaagtacattttccagacaggtctgaaatctgttgctgttcgtggtcctctgctggcccagcaggctgcagttgagatggctccctggcagctctgcaggggacagtgtcttggctgactctaggtggaggataaagatagagcatcgtccctttcacgcttcgtattgtctggaaacaactgctatgctttgtatggctcgagcatatttcatttccaaagtgctgacatttttagttttctgcaagcaaaagcttaaccgaggctttgacattccaactttagcataggattttcccttgaaaaacagttgttcacctagcagttgaatagagatgggaaagagcagaggtaggtaggaggagaaattgttttcaagctccatccatctcttttcttcttgtcggtgtaagtggttttatttgcttaataatttgatttggcccaaatgatggtatatatatatatatatatatatatatatatatatatatatgcatatgtatgtatgtatgtatgtagttttatatatatataaaactaaagaaaatcttgagtcaaatctgaagtgaaagaaagaactaacctggaaaagaatccctggattcacattgattgactttcagagtgggccactgggattaacctctgagaactgaatcacaatgctcttgatgggccttgtgcttgtttttgctgggtttggtagcctgtgtatttgattctagcactctgaggtctaggcaggcagatctctgagtttcaggccagccaggactacatagtgaaaccctgtcttctgtgactttccagcctgcattttacactgagccatatctgagttagagctacaaagttcagcccagaaagaaaaaggtggaagtattttgggatgaatgtttggaaggtgtttttttcttctctgaaagacctggtgcccttggtatttgtatgtggaaccctctagtttatatttaactagagaatagctacatgactgcattggatatcagttggaagaaaagtaacaggcttgcctttaactactggggtataagatgtgcagtgttcaaaagaatacatttttcttttcctttgccagcaatcaagagtaggaacatggtgcatgccatagactccttgagtaggagtggggctttccagaagtaccacttaactgtccctggaaccatttagttatgtgggtgcatgcgtgcatatatgttttgcacacctgtccgtgtatgggtgtgtgtgtgcctagtgtgtgtttttttgttttttgtttttgtttttgtttgtttgtttgtttgttttttaaaagacagtcctattgtagttctggctgccctggatttacaatgaagtcacgatgaccttgaattagtcttgtctcgtctcgggctcttgaatgctgccaggattacaattatagatacatttggagtgtattttgaggtagacttctgtagcctaggctggccttgtatccctacttggttgagcatccttgaactttctccatccttttgtttcaaccttgaagtactggggctgtagacatgaggactgagagagcgccttgaggtcatttacctgtagagacttaagaaccaactgctccccctgttcagcttcattctctgaggctactgggctggtggtaggggttgggggtgggggtatctttttatctctggcagccactgggctgtctccctgcctgctctttgggttcctttgttcactacaccatcacttgccccattctcttcttgggacttacagctaggaccaactgcctgttttctggagattaccagtcagccaaatatttgagttcctactgtgtgctacagattaagactctccagcaaaggggcctccttgaaccctctgggattccactctaccatattcagatgaaagggctctgtccactggcctgtatgcctgagggggtggggtgtcacttctgttccctatttcaagtttcctcccttaccacttctacactgccatcaccttctgggcctctttccatttgcttcatactcagagtctttagaacagaatttagctcagctaattccatcaaccatgtgcagctttttgttggccactagactgtggctgttcttgtccctcctggcctgcccgcctttctttgaaagttgttctgttttaccttctctatttcctttgttcccctttctagtcacccgcccctccacccccagtcaccatgttcaaacacgttttctgaactcttacatcatcttctcagactaccgtgcgcctgtgcccctcactaccccaaacccagctttcccagttccccataatttgccctgcacaccctctgtaatcatcctctgcccttcagcagcacctggcgctttctgacgatcagctcccccggcagacttcccatcccttccccgtgcacacacctgtctgcttctgatgcacttgagcacctagttaattccctgctgcttctgcttcttgcttgtccctaggtgacaagctcttgaggagtcccctatcccttggacctggtaatggatcttttgggggggtgtttgtgggtgggagggtggttttatcataaatatttgccaggtatagtggtatattcctttagtcccagcactagaggagcagagacaggtggatcactatgagttccaagttaaccaggactgactatacagtgggaccctatttcaaaatgcatatatacatatacatgcatgtgtgtatatatgtatatgtatatgtatatatgtatatatatatagtatatatgtgtgtgtatatgtatatgtgtatatatatatatatttgatgccttgggagtatttcctccccatatctttgaaagtgagagtgcaagtcttgttgttcttaaggaacttttttttgggggggggtgctgtgtgaaacagtctcactgtgtatccctgccaggaccttgcccagtctggaacttgcaaaccaggctggcctcaaactcacacagacccacctgcctctgcctccaaatgttggaattaaaggtgtatgccaccatgccaactcaggtttcttttaaaaactccttgacagcctgaaagtaagaggagaaaacattagttttatcttcaaaggatatgagcaataagaaggaccaggctagctcagcactaagtacctactaaagcacagtcacactcccagttcctcatgagtctgttttattcgtccatgtattcccctgagtaggctgtttatggattgcagtttggtgggggcacacacaactttaagggcatctcagctttttattgatggtttccatttaaaaggctcactaagacatctgtaaccttttgttacttacaaaacattttccctaagtccacctcctagtatggtgacctgaaatccccaggagttgatagtatggggtgtagttatacaaccctaaggctctcttgcagcccctttagagaatgccacgatctacaggctgaatgttttcttctagcgatcagcaaacactctgggatcttagaatacacgggacgtgaacaaacctgagtaaaggcagtgacagggctgaggctcaccagttcctcttcctttctgggaaaatgagccatccttgggaattctcatgcttgtatcatgcctcaggggattttcagaagctgatttggttaatatgcattgagttattgtcatgtgttcctatggaagttagttgtatgctttaactcttcacaagaaaaagggaagggtagaagtttaggtgttacactattcattgttagctatatctgggtgctggcctgccactggtgctaaatgtgatgaagagctgtaggtgatggtagatggaatccagtaccaggtagatggaatctatcccttgcaccggggaaaaaaacaaaacaaaaaggtcttgctgtataacatacataccccaggctaacaaggaaattactgtgtatcctaggctggctttgaacttgggttcccaatgtctcagtacatgccaccatgcccccctgtatgtatagttttaaaaattcattatattcatttaatttttaattttcatatttctgtacttatgtttatgggcatgtgtgtgtcacactgtgtgtgcaaatggaacaactttttaaacaatttttagttttgtgggtatgaatgttttacttgtatgtgcacctcatgtgtgcctgttatccttggagaccagaaaaagatgttgggtccctagaactggagttaggaatggttgcaaggcaccatatggacggatgctagggaccaaacctgagtcctctgcaagagaatccaacactcctctaacagctgaacttctctacagtccctagataggacaacttttagaagctggatctctcctccttgtgggtcctaggaatcaaacttgggtcttcaggcttgatggcaagcacctttgttcactgagcctcacttcactagccctggaagtaattctaaatgctacacagttagcacggtgttatgctcattttagagcagcttcgtcaatgctcaaatgtgctagcttgctattttatggttgatttgcttttgcagacctgaagcttaagcccagggcctcaggcaggcttggcaagcagtctttagcaccaggctacacctctgctcccatactgcacttgaaagtgacctaaatgtataagtttcccagtgttacatggacttttgtgttggaggcaggacccagtttgagcaggatctgagcagatgggtagggtggaaatgattgcctgcttaggggatgaccctgtcctgttggtttcatgggctgtttcctccatactctgaaactcatacttctgaactacctcccatcccatggccacagggaaggccatactggactttttttatccctgccttggggtgtaaaaacaaaggcctacaatctagtaacccaagattaccagagaaacagcactggagacctaccccgtccagatcgcaagcctctggtcatgactaaccatttaaagtagactcatgtaagagagcctcttgccaagcctgagacctgggactttcttaattttgctgttccataatcagtcatgatccactatatggcccatgctccttcctccacgaggaatttcctccatcttctaaccactttatcatccactgtgttaccagatgcaggcagtccagggtcattctgaacaatgccccggctgcaagagttctccgtttgtgatgctccacctccacccccacccaccccgcagtccctcttcatatctggccttcaaactatcatagttgcctcctaactgggttatgtgcctctagtaatttattttttaaattgctgccaaaagatttttaaatatggatataattagttcattccaggccaaaaaaataaaaataaaaaataaaaagccccatcagtgggtttccacagtggcaggctaaagttcacccctttcccgatggaaccttgacctccgagtcactctgccagcctcatctttgccatttcccctactccactctccctcctttctcacaaagtgcagtatgctctgagcactcccaggggaacgtttttcatgggtcagaaacaaagcaaaaggtttgtagttagatgtgggggggaggggggcgagagggggcttgtttcttttgccaagtaaggaagggcataagaaaataatctcagtcattttaaggagtgctttttaaccttaaagcccaagcaatttaaatgattgaatgaatgaatgaatgaatgaatgaatacaaaccaattaattgtgggtgtcagcatttcaccagagaagggtaaaatggtaggatttgggacctcttgctttctccacatggtgttcttgttgccaacatctggtttgcctttgccccactgccctcgtgttccacacttcttacctctggtgagccccacagccttttgcgtttggctcatggtccactttcccttgggttggaatttcactctttgtatttgctctgtcttcccatgaggggatccattctctttccctactgtttagtgctgaggatccttggcggcaccttgcctgctgccctggctttggttttctgaaagtgccagaattatacacatgcatggtccattataccagctatagtttttgttttctttattaaaaaaaaaattgaattcccattgtgatcgtgccgggatatcaccagcttctaatatacttgtggaagtgtgcgtacaactgtgactcaaagcaactgctgttcacttgaattgtattttgacttacaagtaagcatgtgtgtgcctgagtttagtggactgtgtttgtttgtttgtttgtttgttttcccccttctggaattgtaatgaagcatctttctttaatagcttttaagtttgttgaataagcactgtaaataccattgttttgcacattttctattatctttgtataggttttttctgacttcatggcctggggggagttgagggtattgaagggtgcctgctgttgagccgaaccagtccttctggctcctagtccttcactgtctctgactggccaggtcctgtgtctgtgggtcacaggccacgtggatggaggttctatctagcctgtggatagcatagcatagcatagctcctttgtatgtgcatacaagcacttgctctcagttccaatacaaagaatagtagcacataggagttactttaagaatactaatgtatggaccaggcgtggtggcgcatgcctttaatcccagcactcaggcagaggcaggtggatttctgagttcgaggccagcctggtctacagagtgagttccaggacagccagggctacacagagaaaccctgtctcgaaaaacaaaacaagacaaaacaaagcaaacaaagaatactaacgtatgtagatggaataatgacttacatctctaatccagtatccaagaggttgagacaagaggatcatgggttcaaggacaacttggtcttcatcgcaagatcctttcatttaagaaaaaatgtatatatgtaaatggtgctttattctagttagtttatccaacttaaagacagatattgtgttttctgaagacacagcaaattcataagtgaccccagaaagtatgttaggcatgtcaggtctctcccacaccaagactgcagacggtgagatgatggttcagtgggtaaaggcacgtgccaccaagcctaatggcctgggttttatccctcaggacccacacagtgaaaggagaaaatcaactcatataagatgtcctctgacctccacacatgtgccccgggtacacttacagcacatgtgcacagaaaataaatgcaaaaacagttttaagtgggctactttattggaccgcaaggttgttgactttggagctaaaatgggtgttgggtaggtgttgctcagacactgtgactggcaggagaggcaagtatttggaacaagtcaaacagcccctccaggatagctacaggaagtccagctcttggctttgagtggtcagtgggagataaggtgtggactgttagagacttggcccctcctatcactggatggcaaactgtgaaaggaagataaagagagtgggggtgttttgaacaacaggagagtgcctttatcacacgcttggtttatgattatatttttggagaactctgcttgagatgcaggtctgcgttccacagacatgtgaaagcaattccatgtctttttgattgagagtgtgcaaatcacttcttacctatgtaaataggcatcagcttggtcatccaaatctgtgtgccaggtattatgctaaagtatctgtctctcggaattgtctagccatccagccatgtccagatatctaggaccctccttgggtctctgagtggcactggggccagggcatccctttccttttagctgtgggtccagtgttagctaagtgaatatttatagatgagagggagttcaaggaagggacctgtctctctagggttatatttcttgccctgtcattttttttctttgtgtactttgtaactcttggtgggaattcagttctttgtaaaagaggtatctgttttgggtggggcctgtaagatgtgaactgccgtttagaagcctgggcatgttcggcacctggtagggtaggagatcaacctaaagcaaatgagcctgtgtactttggcgacataggcttctttcagtggagcacagcccttctcagcagcaagaccaaacctaatcctgcaagccccacccctgggagtacagttgccatgaactaatcatccttccaacggtcaaggccagggcaggaccagagcctcagacttccttcagtactgcattaaaaataaatctccccaaacctggacttcggctgggccacagtagcctcttggtactcagtatacgccacgatttcctgacatgcagtgtcttgggagggggcaagtcttgctccattgttacatttgcttgcaagtcatctttggtttgttagtgtatataatcaatactaaccaaccacttgtatatcagagtatttgtttgccttcacacatatggtggtgagttctttttcagagggaaaattggggagatggggggaggaaagaccatctgttctgtgcacagagggtagcccatcaggtccttgggagctcagacacgtcacttcccctggcacagtcattctcagctgacagttggtaatgtctgattacccactgtaaaatcttgaccacagctgaccacttttccaatgggcaattgaaagatgtgactctttctgttccaatgccttctagaagaggccagggaaggagcaatccaaacagtggtttttaatctttccccaaatcattttctttttccaaggagtgttgccctgcaactgccctgaattctgggaatgtgcagccccttctgatctgaggttaaccatctgccctggagttacttagcttgcactcctgcagggaagactggagaatcctgattcgtgtgcaccctttccccagtatatcagaaaggcctgagtgagacctcagggctcatgaaagagttgcaggatattgcccaaaactctacaaactgctactgaactttaccccagcttttctcccaagctgtaaatgtaacaggatacttagttctatttcagagaagtacccagaacagccagatcactgcagtccagttgcagaccaggcacgtagctgggtgtcagctgctgttcaggtgctgcagttgaaagagaaaggctgagttgggggatacgagggagaaccagctatgccctatgctgcccttgtggtgtgagttctttcgtggtttagcaagtgtggagctgagcgggatttgtttcatcggcagtgcacaaagccggatgggttttatttcctgtttgctgtgcagcgcctggagaatcaacagctgttctgctccttgctatcagtggaactgcatttgtgataagccaacttacgtatttttaactgtctcactggtgggataaggtgggattttttttttttttttaaacagcgatcatcacactgggctgctgtcagagctttgccaatataataagagaagctggtaggcaagtagaggtagactgactcacaccagaaggaaaggggcaggggtaaccagaatgaatgttgggcaaagaaatttaatatagttagctcagactgggggtgccacactgtttcccatatgctttgatgactccatgtcactctcagataggagaactgaggctcagaagtatgtaattcatcagccagaagaatcataatctgatcagacttttaaaaattatttttttaatatttatgtgcctattttggttattccctctatttgaatatacccaggtgaagcgagcttatgactgacctcatgggccttattccattcaaaggctgttgtctttcaaagccttggtttaaggctggcgagatggctcaacaaaggtgcttgcctctaagcatgaaagcctgagtctggttgacagagagccagctgccttctgacctccatacacaataaatacatgattgtttggtttttgtaaatcccaaaccagagctagccagtaaccagcatctgtgcactgctcagctctcctccctgctttcgggttcctgccctactatccctcagtgatgaactgttacccaaactataagatgaagtgccctctacctagcaaacaagcagaaagccctggccttcctccattcgtcatgtttgtcctagtgggcctgtgggatgaacacatgggccttccagtcctgccgcgtttgcagccagctctgtgtgtttcaggaagtactcttcattctcaacctctctagcttcaggctcttcttgtttttctactgacttggtttcccaggcctttagctttctcatgtcctctacctgaaaggggtttcagtggtctttctggtgacttgataggcacaagagcgttgaagccacagaattcagatggagacctgttgccatcccacaagagcagtggaacattcagcagataacagtcattactatataggatttacaggaggattaaacacatataaactgcttactgcatttctgacatagaacttttgcctcaggatatgtccccagctgttctctggaaagatcatacatgaatacaagcaggcttctggtatactcttaagttgaattctgttttctgtagtcgtagtcttgtcttttccagttttaaattctagaacaggtatactgtagagcacccgcctccccttgctctggaggtagggtagagtgggagttaaggtcagttcccaccctaaaccaggtgaccaccatgcactacaggtagacaagggcatttgcttctctcttgctctctgtccacacaggcaccttgaccacttacgccggctttccctaggctgtttggtatagagtgatacaggcttctgctaagctaggcaagaaagtgatggaatacaggacctggtagccaagcagaaaaacaatgtttaggaaaagtctggcctgcctggggaaaaggccagggactcgctcttctcacagcccagtgccaagggccacccgtgttcccctcccaggggaggagggtgctgggtgacaaatggctgccaggtggcagctgcatcttggccttgtgaatttggcagttgttagatactgtctgtaatatgtgcttcctggagaagagccgcaaggagcggactcagcttcctccgtgcagtgtgcttataggagagcctgtgatgcgggaaggtgctgcctgcctccttcccgtgaagaagcaaggaggcattagaggaagagtcatgactgtgaaggggttcagtccggtgggcacctaccagaaaactctcttcccagcagttcccattttgttttgttttcatctttatggtgctagggatagaacccagggcctggaagatgctgaccagggactgagctgtggaaggagtgttctccactcgctcttcctccccctccctccttctctgagtccaagaggaggcgtgcctcagtagatcctgagctaacactaaagctgtaggaagcagtagccatgctccctaactcttctccccccctctgccctttgtcacacattccttattgcccaggagtggcagagaggaaggcacagggaggttgcccaggtccacagaaatcctggccaaagggctccactctcaatgtgaatttccaaggagtagcatgggcttggagaacagcatttgctggagacgaggcatgtagggtccaggactacgtggtctacccatgtgttgcagtccagccctacccggtctggtgcttatatccaaaatgtttctccaaagggacccaggaaacaggccttgtgtagatggcttcctttttctcttctcatatttagttgtagtaagtaaacacaaagctagaactagattctgagtctctacttcagtgcctccgtgtttgttcagagctttgctaggccagtggctctcagaaaggttggtggtggaaatcctggggtgtttgaccttgttgaccttcacgagctggttctcagggctgactaaatacactctcccagagaactgtgaggaagggctaccaggtcttcccacagaggcgtccgtttgaagttgaagccatgagttttcatttctggtgataggctaggctatataggtaattgccaacttaaagctttcaacttgtacagtttgaaaaatagcttatgatgaagttattacacatttggtagaatgcattcttgggattttgggtttggatcttctctcccattagcagtggtctgatcctttctcttgatgctgaccagatcgccacagttttattgcagtctacagttgggtctggagacaactgatgctctgtgatgcactatgtatgttactaagcttggggggtaaggtggacttagattgaggagcacctgtgcactttgaggtaggtaacagtgttcacacgtcagcttcagttaagcttctcactgtctagataaaatcattagtaagagttcctttaaattatatttgtctagttaatctatactacctaactactgccctttgtctcctacttttttaaagagacatttgttttatgagcaagtgtgtgaatgtattatatatactgccatgcagatgcccttagagcccacaaaagggtattgaacccctctgaactggagttccaggtagttgtaagccctgatatgtgggcacggggaactgaaccaggatcctctgcaaagagcagtgagtgctgttagccattgggctatctctccggcccatcccctacttctgatatacatacctggttggtttgttaatttgtcacgactgtctgccctataacccaggagtgtggactcctcttatccaagcccacgtacagtttgtgtggaagtagacataacctggaaaacatgggttctcctgttgatggatacgttggaatcagccattccacaggaccgggccattaaacaattgaagttgacctgtgggacttccttttagcctccctgaacttcatttgaaggccagggtcccattgcacagccagagagttgtgtctcctttgagccagacctgccttgttcctttgaccaaggaagagatgaggaggaaggggagcactcctttttttttccttgcccagatacagatgagaaatgaaagaccaggccttgggtaattgaaagacctcgtgctaagattgttgagcaatcaggagagcacctacactcccaaacgctacaccagagagtcacacattttgtccaaaagaaacttaacagagttcagaaactttacatcaatttgttctcccagataaatcacccagtattccaggggcaaatgatgtcactcctctaagtaatggcttcatctgcatagcaaggttaatcctcagagatatcacttgatggtgatgctgctttaaaaaaattatcattaaatatgatagcagagttagatatgtcttcttgcttggaatgaaaaggcctgagtccatgagagttaaagaggtgtcatgcacacttatgggcaagaaacagtagagtggtagccatgggtactggtgagtgctgtgagtgcactagaccagagaacaaacttgggctgaagcctggggggctgttgagtgatgggttaaagacttctcatttcctgtagtttattgaaagaagtagagaagacaactagagaggaagatcatgcatctttcttccatccctggatgcccctctcacccattaccatcatgcttgtctctcaaatacacttgaactgtgcaaaactaggcaaaaatacacgcccaatctcttagcaacccatctttactcaaaaggaagcaatacagagttgactatagcaccccacagtgctcagttaagtgggggttgctgctgctgcatgatgcttgggcttccttcattataccaacgcctgtgccattggggtggggcttggtgactttcatgggttatcaccctatccaaggcatagcctagcccctaagccaagaaacacatcaacttcctggaactcagagagagagctaccatctctgctctctctgccttcagagtgcacacaaggccatcctggttagcagacacaggtttgccttagacttgggggttggcagtcttggatttggtggaacatctggtcaggttaggttctgtctccagcctagaccatcctttagatgttttttgtggcttgtcaagtgctacagccattctcatatctgagcttctactctttttagcttgcatcttgttctggattggcctgatctggtcaggtcagcgctctcctcacacatccctgacaaaccatcccttgtatttgtgcatattataggggcttgcgctgtagccttttcagtcaagtattataaaaggccaaggcatctcaacttactccgtatttcatgggagcccgaggacagattttttagatttcctcttcagaagctggggtaccaccctttacttctagaccatccttgcttttacctttcagctctgtggctatctccgtagacctggagacaggctccttaatcttctctttctggctttacatagcattgtcccttatctaggggggtcggaggtggggctggcctccccctgcccttcctcctcccgcagagacctctgccttctgtaagatatctcgcctctgactttgcacaagacttctgggaaggaacatccagtattcagcatctcagacccacccccaaatgctatagaaagtctttgtcacatttttctcttataggacataactagaaataaccccacccatccctccattcttctgaggtagtggtgatggaggtaagaaagaggtatcttgaagttccttttgaaagaccgccttgtatatttctatcctgtaagctttgtggctccgatagacctagtggaactcacctagggaggtggctcttgtgatccagctcacccaagtcactcccatccagcgctagagatgcagctttcagagccactctcagcctgaccctgtgctgggagcgcgtccttccccctcagtcctttctgcttatggggaagctacctgggcctgcttgcgtccttgagtgtctaatggaaagagaaggaactgggtctaaaataattttaatgcgatttttaggttctggaaatttttaattccgatacttgtctcccactcaagcatacttatagttgactccatgtatttggagatcttgacagttcaaaaaaaaaaaaaagaagctgctcctttctaagactatgctactaaacttattatattttaaaaattgcttgcactcttactgtcattatttttttcttcagtggtaagcattgaacccagggcctcaactttataaacaaataccctaccatgggagttaaacccacaacctccaattattttaaaaatgaatgcaatcaagggaagtttgtccttacccccacctcccacacacacacacagtgatataagtggaagggatgaatctaagacctcaagaatactaggccgatgctttgccactgagctatgtacttttttttaaatgtttaatttctttataagtattaataagttgagataggtagggatgatctacaggggtattttgtttgtacaattctgaaaactggataggcattctaagttgatattatgtatgtatttgagacagggtcttactgtacagcctatctgatccgcccacctctgtgtacgctactatgtccagcccctgattcatattttaaaggatgctgggcaaatagttaaccatggagcttttctttaacgtgtgtcatatagcagtgaagcaatgatcctgacccagtggtccctgggtaggcgtctcccatcacttgttttaacagtgaacaaaaatgttgagtatatgactttctgtggcagcatttatgcttttcttacctggagaataactgggttgtgtcaggggcctccagatatgagggtctccctggctcattcagagccttccctgtaagttgctcctgtactctaaagtccaaagaactttttaaagagaataacataaaggaatagagaatggagtcactgaagtatgaaaacagaaaaacttctggaagaatcttggtgtcactacccacccaggaactgcttgtgagagtaaagggtggtggagcgttctcttccacacagatcagtcctgccccacgtgcttgggagctgtttgtggaggactccccgtgagatgctcaaggatagctatgtggtacacttacgcaccttgtttgtttccagatgctctgagaaaggaagaagtgagaaactgcaggacagctgcacctcagcatccttgcttatgtgggacctttctttctcctctttctgtggtgccgttggggaacctggagctcacttctgtgcgtgccaggcagatgctggctctccgagctatgtgccagcccttcagcttcttaagtcctgtccctgtattgcaaccttcgttgctgtgttgtggctccagaacatgctgcatgcccccttcttctgggctttcagggtccgtggacccccagagcagacattctcagactcccgagggacatgcgcgaagatgttttctgtatcttctacagaaagaacagggcatgcatttggtcctagttgttcagcgatgtccccgtatttgtaggaatctctacctcaaggcattgttagttgtacatttcttactctcttcagctctttttcctctcctctgtttctgcttgcaccaagtgctgtttctcttttcctcctttatgctggagaatcagctgggtctgttcagccatttttgtctctctttggtgtttatggtgccgaagttgaaacctggggcctcacatgctaggcaggtgctttgccactgagtggtccgtgcattccagtactattaccacgccactgggatgctcaaagctccacctagagctagcattctgagcattctcctgtgtcgttaacaagccctcagcatctcgggaatggagggtgtacttgggcagaggtaatgggggtcctagctgttgaaggcacacttgtatgttctggtggaatcagctaacagcttgcttacaggtgcagatgcagggtgggaactgtcctcaccatggacactgagtagaggaaactagacagaagcagaatttttccttcttttaaacatcttttaatgttatcttcttttaatttttcaggttgttgcaatcctgtgctccagaagtggtggctttgaggtgtgaccctgcccacatttgggcccagtcctcaccagctcctcggcagaacgaagaaaacaggtcagttaccctgcgtaggcttccttgagtccaagcagtctcacgtgagtgagtcttcaggcactcccttgcctggacttgaattgtctgctgctttcacaggccctctgtcctgtctgtccctttgtatcttcctcctcatacctcatccattctttctccccaaggcatagagcgaaatcctgttaaaatcataactgcatcttgctggttcttgagctattgagtctctggtgtgtgggatgaggcgtctcagaagaggatgcgcagggcacctcacaggaagcaaaacctcaggcaaccctccttctccttcctcttttcttctttcttcccaactcccagttccaaagtgcaggttcaaaactagagcaactaaaacggaagcaatcagtggtatcaatcgttcacatctgtgacttgagagcttcatttggggtccttgtctgattccagctggacatgtttagtaaaacagggccagtgttttttatttgaaagattttagtgtggtgggtgtgtgtgtgtgagagaaacctatcgggtctctctccttttgacatgtggatcttagggactgaattcaggttgtcaagcttggcaccaagcgctattaccacagagcaagtttatcatttttatttttgttttaaaaatgagcttagttgcagtacctaggacaatacggggaagaagcaattgcgtggaagagagaatgaggcatttctaggtttgtgaatattaggttaaacaaacacacactacacaagaaccttaaactattaaaactatattagcctagtaggtaggagtcctaacagcttaaccccacaaggtaggggatttcagcccctctggtacaagcacagaattctctctgagacttggaacatatgttaaagagtgagtattagtatcctctttaaagcatgcacaggaaatggcattgtatcaaagggaaaaattgtctttcctaacacagattgagtatcagcaggcttaaatgttttcatttggatggttgtttcatttcattattgctggatagttacagaggatcaactagaactagccagcttgtttctggttaaataaattatcctttacctcagcattaatgtaaagataaatgttgtttttaatgtttttctaaagctgaacagttaacagtgttgagtttgcactaggcttttccttctgccctgttccatgaccccaaaggaaaattcccaagccagactcagccaagacttagcagactggcgtgaagctgtagcccagctctgaggacagcgtgttggtgcttctgaaacatcctctcagcatgtgttcaggcccctctccttttgttaactgcattctcatcagaaatcatagttcccctttaaaaccttgctgctgtttacttaacatttcaaatatggaaaggaagtaaacaaacgggttcctagtgccacactttacactttatcccctagaaggaaatagatgtagccagcgtcttcctgtccagacagcagggaacatgattgcaaggcttctctccttttcaggtaggaaaaaatgctaggtagttagcacacatttatatagctagctatatgtgctcttgctggattgacatgtggggcagggattattggtaatttgcctctatggagggaatatatgttttgtcacttcctattgagctggacatgatggaacataaccctaatatgtggctgggcatggtggtgcacacatttaatcccagctcgcgcgcgcacgcacacacacacacacacacacacacacgatttcacttcctaactactgcttacaattactgcttactgttcacttcagcctcaggtggcagtgggagacatcttcatagaagagtagagacagaaagagtcatgccaggctgtattcctgtatgtgtctatttgccagttttcaacagaaatatcaaagtaatcgagagtctacataatttctttgaaaaggctataaatattccagtatgaggatatctgaaggaggccagcctgggttacaatagaaagactgtctcttaaaataaacaaacaaacaaagacaatagataaatatgtttactttttagattcatctatataagcgtggttgtacatgtctttaatcctagcactcctgagatgggaacattgggaatttctgtgtgttagaggctggcctggtctacatagaggattgcagggaagccaggactagatagatagaccctgtctacaacaaagaaaaagagaactgtatagataaaccctgtctcaaagtggggaaaatggtaatggtacgaccaaagaccagcatctaaacttgatataaattggtagaaagatatgttttctctttaccaacataatagaattatagtgaccatttctagtcacctatcttaaacttttctgtacattaaaaatacatagaagagcgtttaaaagaggtgagttcatttaggaataaaatgggtatgtatacatgctggttggttccagcaggaactgatggcgtgcttgttatcaatgtattaaaaaagaagtaagtgtgtgctctcttctgggtgtgcactcctgcctttatggttttttccaaagaaaggagagaaaccaagcatgcagacaccttactaatttgaaatggtctgctggccagtggggagacttcaagcagcattcaggcttgagttttgtttctttccttggagaggcaggttaagtctgctggctcctcctcctgctgctgctcccctcgttggatctcactaaccttctaaaagaccccacccccaaagacactcatcagcctatgaacttgagaattaagtttctaatgccaagtttcgagggaacgcatcagattgtaacagcatgaggcatgttttgcgcagggaggtgctggggatcaaagttccgtatgtgccgaacaaactccctgctcccatatatattttatcttttggtttaggaataaggtcaattttgatgtggcttgagttatgaatttccttttggctgtttgtttcctatcacccagtgtcttctagatgtggcttaatatttattgttaggctctgagctcttaggaaatgagaaatggagtgagtcaagtggagatctgtgaaaaaatggggtgcagtataagcgaaaatttgtgtgaaatggtagctgagaaagagtaaaatactgtaagaattcctcagctgttgagtgtctgtgagacagcaggagacgataggttgaaaacccacatacagttttataagaaaaaggtgacttactttgtcctccttgtatttcatgagcatgatctgagattacagcaagttaatggttccacagtttccttctaagcaaagagactgaatctgtttcttttccttttttgagatacaagtttctaagcgtagcccagcttagcattgaactcagattctctcacttctgtgtctcggctcagagggtcaaaggcgtgtgcccttcactccccaccaacagtactgagtcgccttccttgatgaatcaactaatgcagtgtctcctgtttgtcttccagcataaaggagtgatatccagagaataaaagggctccccagagtcatttcctactccatgtggatgacagcaggagcaagggactatcatttggggcagaaaatggaggtaatttgcaatggagacagttcttttatgaggtataggtaactttttttttggaaacatgctttttagtgttggttttaaatttggttgtaattacagcagtgttggtatctatagaatcagcacacacatcctcttaaaactgcatccagttagaggaaacctgaagtttcctatcagctagttcttaagtctagaacttttaattagaagaaagcaagtacagggtacgtgggaggtgctggccaaacgggagctctgtttcctcttggaaaggctcaggcctttccaaactctgctcacgaagattagggaaagcttgggctcaggagatggcacactggataaactgcttgctatagaagtgcaaggatcaaagtctgaatcccccacacccacattaaaaacctaggtgtgtatggcacaccacacacacaccacacacaccccaccccaccccacccaccctgtaacccagtgctcaggaggcagggacaggatacttaggtagaccagccaaatcagcaagttctgggttctgtgtgagcacttcctctgggttttgtatgagacacttccttgtgcataaagaaggcaacgatcaaggaaacgacacaataagcacacatgggcccacttacgtgcaaacacaaaacatgccacagtacatgtgggataaacaagaaaggggaaaggaagatgcttcagaaggcttgaattgcactggtgctaagcacttggaacagaaaagccttccatcagtataaaaaagcttaagctgctttggaactgggtgtggtggctcacacctgtaatcgcagtacttgagagcctgaagcaggaggattggggagttctggtcattcatggctacatagtgtggccagcctgggctacattgcaagctcctgtctcaataaacacaatgaacaaactgaaataataattaataataataataataattttgagctctcttctgggtttgggttgaactagggcaagggtgttgggcatttctgtctcttttaccatggtagctatgattagcaccacatgactatgataatcctacactttctcacaaggacatcgctgacttctctttttcagttctatagcagagacttcttagaagcataaaaccctgtcccgatgacgtcgaattcgcccattggtttagaaggctcagacctgtcttccatcaacaccatgatgtcagcagtaatgagcgtagcgagtgtcacagagaatggtgggagcccccagggcatcaagtcccccatgaaacctccaggaccaaatcggattggcagaaggaaccaggtgagggtgtgtggctttggcgggagcagctaatagatttcatcttgggagaatgtagagtagaagttcccacactgcctaaagggacaccctggatacatcctgaattaaaggtagacctaaaggctgtcatcatttttcaggagcaaatattttcatgatttatatccttgcatggagaaaaccctttgtgccatggtatctttcagggagtgcacccttattctttgcctgtgatttgacttcagcacaagcttctgtttaatagagtgaacttggctgcctctgctatgatgcagaggaaagcccttgacacagctgattaatttgtttgtttgtttgttttctttctaagccagctccttgtggaaagaaagaaagaaaaatcttcaaataagttcctgtttgttcagggttcagcttccctattttgccttttggcttcagagaatcccaattaagatccatcgaatggaaaaggcttgtgctcggttgcttcatagcagtgcaaagccctgagttcagtcggcttaatcctcttgaattttcactggtcacaggatcaggagagattggaaagagtaattgcatcaacagaaattgggaggaatgaatgttgtgagaaaagcccctgtctcctctactgggaacaaggcattgtctttttcagttaatgaacaaacagggcacttttttaacaagatagataagggggcagagggcacataattctcagttcatctgtgagatcatgtagtgtacagtgacttccccgccagtttcttgttggtataatgtagtcacactactccttgtttggagacaaggtggtggtctcagagcatctgtgagcggcatggacaggacaaaccggtggggctttggtgaactaatggctgttcttatgcagactactctctgagaacatctatgatgacctttgacaaacgctcaggtttttagctcaatgtgccctctaggaggtggagtaacagttctacgttccctgcagcatgtaagtgtgcatgcctccgttcctcacctcaagcctgaggcctcgacagagctcaggaatgttttataggcttggagcattgataactctctttctctctctctctctcccccctgccttcgtgtgcctctcttcctgtgggtgcctgagaaaatactcagcctgagcacagaaggaacactagccctgggaagaaaaggtttatttccactctcatatgcctgtctgtccatctctccatctgtctcactgtctatcaactcatttaacaataggcctagcttctatttccattagctactctgccaactatgagatgtcaggtcattcgttgtcttcctcatccttctctgctttaccaagaatgaatggaacatgggcaagaacttttccttaaatagcacagcgcggcatagctgccccaagtccaggctctggttccttcccctacggagacagttagggtcattccttctgcctctggatctggaggtgaagaaatgagtgtgcagtgtaagcaagtgagccactttctacctacccctttctcctcagggatccaatagagttggatctttgtgtttagaagggaggcctaggccagaggtagcctgctaaatacagcaccaaattcaagaaaacaaaacacagtgcatagacagctcaggatgtgaagaagtggccttcttacctgacaactggacagggagagtagaatggagggagccttggggaaggttgcatccatgtgaccatagcattccaggagagattagccacagccggatgctgacaagggtgccagattgtttcattatggactggtaagttatcacattagctgctaattttatctctcagctcaggaagtttgtttctctcaccagcgtgactgtaataactgggctcagaagcctttagcctgagccgtttccatcatcacaatgctcttttgctattctgttcacctttaaaagttagtaaatctgcttccacagaccaccacggtttgtgaacttacattacagcctacacgacagcgctgccagcttcaagcttggcagaggttaatgatcaaccccagagtcaatatcagtcagccctgtgtgcctccacacaatgtgtgcctggtgtctacttcaaggtgaccacaagatgatttcattaaaatatgtctcctcaagtgactggccacttggatgtctagaggttattttgagacaaggtctcacagttttgccagactaacatgaaccttgaaggctcaagcaatcccctgcctcagtcttctcagggactaaagccagtatctggctgaggtttttttctcttctttttttaaatgcacactaatacaatgtactgttgaatcttttccttatataaaaaaatctacatagtattgttagtctgatgaatggattaaaatacctcagagcttgacttttcactggaagtcttgacctgtgaggcatcctcttattgtgcctgggagagaactagaagtgtactagaagataactgggtgaagccagattcctttttttttttttttttttttatgtctctgggatcttccttagaatctgagacagaatgcttgactggcctagttctctgacccacttccacaaccagaaaggtgcttacactgagactcgagagagcttcaaacaagacatccccacacatacatccatctggttcatggtgccatttgttttcacagtctttaggataccttattctcataacctctcatgaacatcacaagggtattgcttttctgtgcctcagggtcagacttataactgtatcatggtttgggtgtgggcctttgaacagttagtctgaggattaagctggtgtcaatacttcattgttctctgtttggagcaagtcccttgtccctctgcactctaaagtttccttttccagaaaatgggatccctaataagtggccatctcctagggattacggagggaaaaaaaacaagcctgatgttgctataaattgactgatcaacatgtgatcaacaattagtcttaacagtggagaggcaaaaacacagtcaaatgagttcagatgagaagaatctcctcagagatatccaagaccagaaaaggatgtggaggttggccagagcatccagccactcttcctccctggcctctgactttatttagcactaacatctcccctaaatgctttctcttgactggacttgccacagtgtgagctctgcatccaggtctacatgagtgctcacgaccgtctggtctagccatcagtgtcttccgcggagattttaagacaaacagatctcaagagttccccccagtcctggtctagcatgttgagagtctagcagttggtattgtacagagctcctggatgatcctgctggttttgaaagcctggtgacataatattcagccatcataattcctgatcgcttcccagggatgagtccagtgcattttaggaacagagactcatgtcaaaactcgtgtctgagttttgtgtgagttaggaggtaatattggtcattccttgtgatttcccaggaattagttggcaggaggaacttttaacaagtgtcagtgaaagaagtttgccttttttgtaggaaggtaagaatatattgcttgaaggaagcttgtcctgtatgttttgaagaaaaataaagtgagccacctaaccaaacagtgagctgggtttttgttctggtttttggtttttttgtcacctcgtgtagaatcttgagtctgggctgtcatgctgactggctttgctgaggtcagagctcttcttgttctctatttatgggcactgccaaaaagatgctagctttatgggcagagccttgttagacccctgagagttactgctggggcaccaaggaagccttccactggtgggattgactttcctgttgtatctctttccctctattatgtttctgagggtgcttgagacctgtgatcctagcacatggaaggtcatggcaagaaaatggagataaggaaagcctaggctactgaaagggtttcaggccaacctgggctgcatggggcagcaacaaacacatacaacaaaagacaatggtattggagctggggtataagtgataaacacctggtgccccatctgtgcagagcaccatggctctgtctcctcttcacccatcaatgtggtcttagcacagtatagccagtgtcgattttcccacttataaacaaggaaactgagggcagattggggagtgacctgcacaaacacctggacaggctccagtgtaatgactgcagctgcttagacccagctctaattcatgggcttatgacagaagtggaagacaccagttcagtgtgatgggaaaatcatcccctgttttatccttgttttaggaaacgaaagaggagaagtcttcctacaactgtcccctatgtgaaaagatttgcaccacccagcaccagctgaccatgcacatccgtcaggtttgcccctacttttgtattgtttttcactaacaggatgattttattttaattaaattgaattgtctagtaaattataagctatgtttaaaatttagtgttttagcaatcttgggtaattatggagtgatttttgcatagtcacgtttctatgatagtctaagacagaatgtccaggtaacttatcacttatcttgatataatgctttttactgtttgtaaccatattgactaaccctcataatgaaagactatagtatggttctatatatgtgtgtgtgtggaggaagaggaacagtcatgggggcctttacacataatctcacaccatgatgacgctgagttctgtctgtagcttctgtcccagaagctacattgcaggcatctgtcaccacacctgactttccccccttgccatgtagtcagctggctgaagcccaaagtcctcgtgtccattcctgccctttatttaaatggtaccagtgtacttcctgcagccgaggagttcctggacttgggattgtttttcccttatcataggatgtatccttgtcctcttatggcattgctggtttatggcagactgctggtgacagagggaacagtggggaatgatgatgcattaaagtcttaagaagctactaaatagtaacgacacctagtcaccgaggaaacttggatgtggatagagattttccttgtcattttcaaaagcaggaactacctcattcaggtttctgttatctaacaaccagcctaagtcttcaaactggaggagggactgcagcctcccagtgtgtaaacacactatttgtttctcatattggctgtatagttaagactcctcctgtccagaggagttcataatatatgttagtttaaaccatggacctgcagactagttctgagttttgcatcagagtggaaaataatagaacaaaaacaatcatatgcccatcttctaatgcctttggctctttcgaagacactggaaaagaaacctggagggtgggggtcgggggttgggagatggagaaacttcactgttttttctcacagatctccagatctgtattcccagtgccatcttctcagtgaccgttgtcccgattgcttctgcagcacaacacagacacgggaggagctgaccacgcatgcagtatctgtgggaagtcgctgagctcggccagctccctggatcgtcacatgctggtgcactctggcgagaggccttacaagtgtacagtgtgtggccagtctttcaccaccaatgggaacatgcacaggtgggtgttgttccttgcttgggtggctgactgcaccattgagccattagtagacttgcctaaaagcttcagagggtttttgttgagtgtttgtttgtttgtttgttttttctatttcccatagagaaaaatctgagatgattgtattcacttactcgcaccatctcagggtatcagaggcattgcctaggctaaaccttggcccttgagttctttggggtggaacaatcttatttctttcccctgtgccactacgagttttcctttgttagagaggtagaggtgggcagctcgttacaacaaagcacccttaggacaaggcagcatcacagatacaacttttcagtgtaaacatgtccccatatgcctaccagatctgccacagatttttctttgcggagtggggaattctggagcctttgatagttaagtggcctggttctgaagctttagaaaggagataaagcagggtgtaagaacatctaataagtgacaggaggtgacttccgggaatgatgcgctctcaggagtgagacaggaaatagaggcaggtttacgccgagaagagaagccatgggatatgtgttatggaggtagcatgggtttcaatcagagcagaaacagcttttaaatgttctctcgctctctttcaaacacaaacgtcttaagaacattttggggatgaagaagagactcagattgtcacattctcatggtcagtgacacagcagaatccaggtctcctcaggtgtttgtaaatttctgaatccagtccacttagtcggtttaggatgaggattggaaagtatgaatttagcaaatagttcccagcccatggtaagcactcagtaaatagtacctactgttattgggtgtctaagtaaggctgcaatcatttaccactggcgaatctcttgtctaagcgtccagaagtgaggtatgcttcatgaaaggcctccgtatattataattttatttattttatgttatgtgtgtaggtatttacttgtgtagtacagacctcaatagtgtaaagtgtcctgctatacttccacctctgttgccattgggtatcaaagcacgacgaggacccttgcatgtgtttctaccttctggttgtttctcttcatagctaggaatgaaaccctagggactcggtccatcgctgagccccatgccagcactgtcactgtcaccttaacaactgtttcctgcaccctttctaggcttccttcttcaccctcagagttatttattatttagtagattccttaagattttctgttcccaagattatgggatttactgtagagatggctccgttcttctttccattctaggcgtcactaatttcctgggttatctcttgaggtgcaccaggagtatagttctaaatggaagtaaagtgtgtcgacattattgtcttgttctgatcataggaagaaagcattcaccttgaagccctacccctgctgcttgttgtgggtctgatatcttaaatgaaatttacctgctgaaggaagttcctaactattccacatctgctatggtttttatcagggacgttagattttgttaatgatctctgtgcttgttttctgtcgttgttttctgtcattcaatcctgtcctgtgctataggtcgaatgagcctcttggatacaagcatttctaatggtgacaggcttggttgactggtattttgataaatggttagggctgtgatcataatagatgccagtgtgtagttttcttacgctgtgtgcttttcatgtcagacttactatcagaaaatgaactgtggaacattcttttctcttttggaaaatactctggcaagttgatttttgttgttgctgatggtggtgggtactttggttgattggtttggtttggtttggtttttttataagttcattagtgaccacacctgagtttttctctttttttttttgcagtttttttttcagattagcagccaacctcttagatttcctattggctacattcttgaagaattctggccatttcatctcactagtcaaagtatttgccacacaggcttcccttttaatgattttaacttgtgaggtccaaaactttaataactacactgttttcattttttgttattgtttgtgcttttatttgttacttcatgtgttggtgagtgtgtgtacggcatgagttttatgtgtaccatgtttgtggaggccaggaggagtttggatccccgtgtaattgtagtcacaggccccgtgagccagtgtatggatgctgagaactggacctggagtcctgcaagggcagcaagctctctgaacccagagccatctctctagccctaattatgggatttactgtagagagggctttgttctagttctactgacgttttcctctttatttttttttctatttccacagtttgggcctaagcatcatttcacccttcctctcgctccaggctctcttcttcctttttcaggtgttgtcaagtatgggattagattgtagacttgaagatattttgaatacaggcagtaataactgcatttccatactttggggctggaggagtgaagaggggattcttgttgtctagaactgtgtagggcaggctggtcttgaactcacagagatctgactgtctctgcctaggattaaaggtgtgtgccaccatgtcaggtggatccataagttttgtatactatatttttttgccatttacctccatgtattttctaatttatctcatgatttcttctttaatgtattggttatttaggaatatgctgttttagcccacaaatatgtcttcccagatttctccctatgactgatttaaggtcataatgctacatttattttgtctttcctgccaaaacttgtaaatgctgggttaaaagaatatttgacttttgctaatcaatcacaaagtcattaccaccttcatttgttggcagagctgtattttgggggaaaaaatgtgaaaatattcacaaaaatgtgtcagagtggagttagatgtatttgcatgggtcgatctattccaggatctgagactttggtggtgagctgggacctctcgtaagcacagatccgagctacattgatcaggagccacaactgcgctgggatgtgtgagggatttagaacaggggtgataccgaggttcttatgataaacatggttagaggaaagcagtcaactgagaagctgtatttgagaccagagtgctgtcctgcatttctcctggaatggttttctgtatttcagttgctgttgtcattacatggacttagcagactgttccatgtagcattccgtttctccgaggaagagagagaaggatacagtgtcactgaggacactgccttcccctcctgctctgaaggctgtgtgtgtgatgtgcctccatgaatacattggccttgcaggtgaactctgacctcccggcagttgcctgtgagaggggtctaggctccattccagttttttttttttttttttttttttcctttttgctaacacctggggtgggggtgggaggttgacaaatctcacaacacaaactctaaggatccagagttcagggtattcttagcagctatccaggtgccttcaatggaatacttctctcttccttggtcactagctattttggaatgtgttggttaaccttgattttaaggctgctcagtcccttctctgtatgattgttacattagtaaaataaacacagtgagctagcatactaaatactaaactgttatgggtagtcacatcgacagttgcttcgcagcaaccatagagcctgtatttcttagactttgattacactgagtaaattgacatggtttgttttgtgtatggatgtgtgtgggtcagttactcattgactatccagtatgctgtccaggactctagggctcatgccatcttcctggcacctcccaggtactaatactacgtatgcataacaggacgcccaacatagtatgctatcttaaaactaaaggtagatagagtaaagaaattatgagaaagcttagggaaaagagggatttttttgttttgtttttttgtttgtttggttggttggttttttgagacagggtgtctgtgtatagccctggctgtcctggaactcactctgtagaccaggctggcctcgaactcagaaatccgcctgcctctgcctcccaagtgctgggattaaaggtgtgtgtcaccacgccagagggaaaagagtttttgaataaagtattatcatatgttgttcctatcctgtaagtgctcatgctgtttaggttggaaaatgtgtgtgtgtgtgtgtgtgtgtgtgtggtgcttatattcttatggatttttacataagctggtggaggcctgaaattgtctggtaccttcttcaggacctgacttgctctttaccttactttttgacacaggtctccaggaacctggagctcaccgatccaactaggctatctggcccagccagcgagctccagggacctgcctgtctcttcctcctcagtactggacctgccagtgtgcgctgccagactcggctctgtctgtggatgctggggatccaaactcagctcctattcttgtccagcaagcagttatcagctagatcttctccccagctccctagaactaccctattccaaacctatagcttggtttgtgaggagaataagagtctcccgtcaagtacggaaaataatttacagaaccctcactatggctccagcttctggctttcccaaatgctttatcagatgctctcatgttgaaaatttggattaaacagtgcatgccttccaaatcaaacttgggaaagcaagccagaacacaccctccaggtgaggcgaatgtaggggaaagggcatcaagctctggcacttgcaaaagctgttccagaagccctcagtggccgagccgtgaaggaatgggtgcctttagtggagcacttctctcctttggccactcgctgttttatgaaggtcttggttatcctagtttcaaaggctgctcactcagtcccttctctgtatgactgttatgttagtgaaatagacacagtgagctagcgtactaaactcttatgggtagtctcttgaaagaggagatggggacagaccttgtatgaaatgtctataaaatgactactttttttgaaagattgtaaaagtaaaaccctgcagaccataatcgcctttgcagagagggaaacccaattccattttgctcctcgtgtcccatactttaagctataaagaattgcatatattgattaggcttaaggagttgctggagcctgatgagtgctctcgaggcagccttcctatttactctgaaaaacagggatgtatcctcacttgacggtcatagaacggggaaaagggaaatcccagagcatcgcctacttgccatgaactgatgggatgtgcattgaccctgaggatgctgatggataggaacagaggcttatgtgttcccattatacttaaagaaaacctgagccccacagaaatgtgaccacgggagctctggattcagcatgcttctctcctatgcttgagcggagcctgccgatggctatctggaacaggggccagcactaatccagaaaaggagcagaggtgagccactgtctacagaggacaaccacttcttcactctccatccccaccaagaggaagagcctcatgaaattctcccacagtcatatcgagtttcttaggacaccctgtaacgaatcctgagacttgctgctctcaagtgtggaggaaaccatgcaaaggttcagccagtcccatctccaaattacctgttcactctgccaccatgttcctctgtgggaaggaaggtgtcaggcaagaaattagttccaggacaaaaacctgtgggtcattccaccaagaacagattgtaaagtcttgtttccctagaaatatcccctgcctgttcttgtttgtttgagatatggtttttcatggccacccaggctggccccaaacatcaaggctcttagttatccctccacctttccctcccaagtagctagaactaagtaagacacctgaccttgaccttgacatagttctaaagaagaaaaaaaaaaaaaaacatttcagaagtcatttacaatgaaggaacctattttgaggaaacaagatcagttaaaagggaattgcttcaggaactggacaccttaatacctttaattccacatagaagagggcacatcaatagttgggcacgtggtgtgcacctctaagcctagcagcggagtctaaatcagaggatctcagagatgcgtgcgcatcagcctaggctaaggagtgggaccctgtctcaacataaaacagacaaaaagagaacatacctgaatattctgttgctttatatgtagtgctttactgaggttcccaaggatttcctgtggggctttaattatgtatacacaacaatattagcagcactgaatatatgtaaatacataccatcacacacacatatgtgtgtgcggtgtgtgtatatgtattataatatatacacacacacacacacatataaaatgtgttgagtatttgagtgttagttttatggtgatagtattaagcgttgtcagcatatctaatattttatattcaagtaaacacacctctggtatagtttagagggcttttttaaagatggaaacttctaaccaggggagaaaaaatcaaacaaaaatatttgtgcattctagtccttgcttcttccccttaatatgctttgtgtcctattgagagtccatgtgactctgtggcctgttgctttccctggacagtgacatttatgaatgtgttcaccatagaagaatgtctttaagttatcaatttctccctaattatattattaaactttcaacagagagctttcttattaggttgtatataaaactttcctgtttgatcctatttaaaccttttcctcctttgctgacatctctgtgacggaccatgtctgagactcgagggctttcataaacgtggcatttggtggactgactacttacttctgtagcctctcatcaggcttccttccattcctttctgttcgaggggctccatggtctggatagttagcctactgcttaagaacttgtccccatattcttcctcttaagtatttagtccagcagcctcttctgcatgccggatcagctcacggttttgcgaaaagaagaaaccgacctgtgccttttaaaatggggtatattctaagagcctaagtgtagagtggtgttttgctgggaagctaagtgctagctgcctaagtctccatcttagatcatgcaaatccccattgccatctcaaggcatctttctgcctcttctgaaatgtgtttatgtttagtgtggggtgtggatctgcactgagctcttacatgatattctctggctcctttcagcgcttgcacttggtagttcagaattctgcaagttgttgaacactactattattctccgaaaaagagtaggcgagagtggcctattgcttgattttaatattcaaataagatcaaatgcaggagaatgcatcaaagcagatgctagctcgtgtcaattgagtctcttgagtaggagtttagagattgtgttttctcttttagtgtggtttttccctctctattatacttttaaaggttcactacagtttcattttcaagagaataatttaaaagtgtacttgtgcctggtgcttattttttatttctttctaaaagaccagtttgagttcagtgagttggaagggaaggaaagatctcataaaactgtccgtgcacggggtgttaaatagcagtccggcctcttctcctagtgccgcttctcaaattcatgatttggttcgtgatcctttatcacttggctggctggatgctaatatttttaacaacctttcttctcttctggcagtgggaacgtttatctattcatcttcttttggagatgaaataaataccaaagttttctctgagatgcaggcagtgtgatgtttttgacatattttgttaaaatatttcaaaagcttaatcatactgggtgaaactagtggaaggcatcaaaacccagagcatcatgcttgcccacacttgaacagcccagtggttatgagagctgagaactaggtcacagcaaagaagggataggtgtgttgggagcaggatgagaaatggagagtctagcatcatctcttctactgggtcattggcccagacatgggtgtgtgtcctgtccagtgttataacaggaaattagcaacgtgaagtaggattctgatttccagctctagatcacagatcgagacccgcaagtgtgccggctgcacttccctgggctttctgcctcactgttttctacctttgtgtaaatatccagcctgtccgaccagtttgggctgcacaagctggtgctagcaaacactgaagcgtgcccactcggcagccagcctttctctgacttgttaaggaaggcaacgtctgttcccctcacccccttcaatgaggaaatgagctagcagcaaggaaacctttgcctgtgtgtgtggcacggaatcaccatctctcctttggtgcccatgtgccccccttgaactgttctttactgctctgagggtttggggtcctgcacagtgagggtattggtctttggggagattttctattttcctctggccagattctgtttcataacgggctcagagggagtcagcagtacattcttaggttccgggtttatgtaacccagcctcactctgggggagctgcagccagctctacaggtgagaaaactgagggccaagattagaacctgctcttccaaggccccctccctgccccgctggccgaattagaacagcgaggctcttccctcaaagcacttgattgtgtcatctgtggaaagcacaggccatctgtgctgcacacctgccccatttaagataaaaggcagccgtgagtgctgcagtcatggagaaggagctctggtggtttggttgggtgatgagtctctcagctcatttgtcttcttcctccaggtccagattcctcctacttcctctgatgtttctcatggtcctgaacggtacaaggtgtccccagatggtggagacctctctactaacattgtcttcccctccacccacaatagtgctctctgctttttcctttgggcatgaggtgaccatcttgaaaggcccaacctaagtgtttcttgttcctcttctggaagggctagggagtggcaagcattgattcatcattggcttactatgaagatggttatcttttcctcccccacaaaaggaagatgagtgaatgaggaggttctgacatctttcagaaacctaagaagaacctcctgccaggctgaggtgacaaatggtctcagtgacttgagcattccattctaccatgaaacgtaggtttgggcttggtttgacactgttattttagcccttgctgcagacagtctttctctgtggtgaagctggcagtgaattcccacagaggtaatggctctgagccagtgaggccactttgagagtagtgacttcatttggggccccatcacctgagtctcattttcaagtcaagactgcctataggtgtgtactttggactgcaggctacagggagaagttaaggaaaatggggcagtttagcttatcgaagaaactgcctgaagtagagactgttgggtggaatttgatgaataatattgcttgactagtaaaaagagcctctggtgtctttgtttctcaagaataagttatttttgtttgtgggtttttttttttcttttttttagacagggtttacctcccaggctggccttaaactcctggcctcagcatccctggtagctagaacaaaaggcgttgacctcaactggacaagtgtgcagaaagaatgtatacaaaaggtagtaactgagaagttactttaggggaaaagtataggcaataggggattaagtagtatatggagtcaaaggtctagctgttagaaccctgtctagagtgaagattgacatgtcctgattatgagtcaggacagcaaggagagctacctgttgcagccactcagtgcagggtgagggagctgtactttctaaggcaacagatgacagccagaggatgccatccacctctctatgaaagccactgcaggaaggggaaggagaagaatgtaagagccaaagtcatttgtgtccccaaaggataactggaacttggaggaaaaaaaaatacctctcaagtattggaatcgcagctcatttcttcagtgaggaagttttgttttggggtcttacacagagccaagaaagaaaagaaattgtcgctcagtggatagatgaggatagaatgccttttctaatctcttgaagaaacatgacacaggagaccagaaattagtggtccagcctgctgggatgaaactctgaatttaggatgagagattggccctgagctgacgatgtagttcctggaaatatatattaataaggaatgtgaaagcagtgcatgcctactttgaagtaagattctccatcctaaataaagttgatctttccttctatactggcaccatcagagtaccctcgactttggggtcatgttacctgagtattgtggggaaagtgagtctcaggaaagtagcctgcgatcatggaagatgtggtctctgcaggggatgtcggaatgaatacatttcaatcttaggactaagggtcagtttcaccttgttatagcctccacggggccacacagtcctatgaaaggacttggacttacctggtgggtaggtttactatgtgcagggcattttacccaagcaccagagatgccctgggagcagccagccaagacattcccacagagagcctgcagacagaaagaaggtttttgcctcatgccctgctgactcctagacgtttctgagaatgctgctgttgggtcagtcagcaaggcggcttacacatcatcagatcttcctccacaccctgacatggctgatgtgacctgcctctggacaagcatgactgaacatgaacaacaccttctagtaaggcggcagcattgccgtaacgggtggggcaccctgagaccgtcttgccattcctcttccagctgtcttctcctctgtcttcatgctccagccccctcttccgcgcacagaacttgactgactgacatcgcaagcatcactcgcagcattcctccctaaactccttccctaggcatttgttacaaaagcaaacacaagtctttgtagaggcatgctcttctacagtcagaaatgcaggctctagctgagatgctccttagctctagtcaccccttcttggcttatcacaacaaggtgctgtgcggagggcaagaaaagctagcaccgggtagatggcgtatctatcaccagattgccagaaacctgtttgaaccagttaacttgagtagtgaagaggtgactctagaggtctgtgtagtgatggggtgacctttcttgtaatgtcatttgttcagagtatcaaatgcttcagcccctccactaatacacctatgaggaaattaagtcttgaaagctaacaaacactggaaatatctagctctctcttgagcactatccttctgatgtaaattagatatgggaggcttaatgaacgccacttaactgggtgtgtgtgtatgtgatgggggtggggggtgggggctgggacagagaaagaatgggttctttcctgtgagttcccagatcaaactcaggctgttatccttttaaaacacgtcttcccatcatgtgtctaccagaacataggcaaagacagcagaacctctagaagctcgcaggttagcaggtcaggcagatacagcagtgagcaagaagagatcttgctttgaatgccggggaaggtgaggaccgattttcaaggtcctcctctgactatgacgcgtgttgtcacgcctgcgcctccacactctcgtggactcacacattctcaaccagaacaagtctgtgcagttagggtcatggatgtatgtgtatttaaaattcctatctgtgatactcagctcaaaaagatgattatcagttttctcgtcaactagcactgtattataagaccatcatttttgtcaatcaagaaaatgaaaaactatcagtgacgttgctcaagggaagagcagagaaggcttgttatgaagctgattgaaggactctggagtaccttagttcacaacacactgggaatgagtgtgttagctgagcactggctcagcagaaacaaatccgcctactttcctgtcatcttcactgggccatgtgtggcggtcacgtgctctgccctcttaagaacgtgtttgtttaaatgtgtgtttgctgagtccagtgtgggatggttgttgcttagcacacattcttgagatcagctagggacctatatgatttctcagacttgtgtgcagtatttggtgggctacagtgttttagttatggagagagagcttggaaaaatggcgtgctataatcctcctgtgctgtttgaagagctgtcctgtgggaaatagtgtaaaccgtcactgtgttgcctctgaggacaaacggccacttaaagcaaaggaggaacctcacagtggtgtggtggggacagagctttccactgagaacagcaggtgaagttagctttccttgtggctgggagcacacgggtgaaactgggggatgcacactgtgatccccttagctggagagagacttcatatgctgcgtgtgcagctgtggaatgtatcagtgggcttcagcctcactggccttcactggtttgagggacatggacgttagataaaatcaaggaagaggacagactctggccttttaaggacagggaataagagttttgtcttccccacccctccttgctgccatgccaagctgataggaaaaggccattactggctcattggattggcccatccatgtcctatgaacctttggaaggatgtgtataggtggagttgtcattcctgtctctggaggctagggaaggaggttgggtgagacttttctaaagctctttggctagtaactgacatgaaatctccagtcctcctgccactattgtcaatgtggggctagcaggacagattgggagctctgccatcctgtggccggcaaccagaggtctcaccctagatggaaagtgtaatcgcattttgaatccagcgtcccagcaggacttcgagagtaggatgaactgctttgtctgtccaccctttatgtgccccagagcgccagctctgacctgccacccctgcctgctctttgcccttagcactcctgcagttacaggcgtgagaccagtgagaaggttctgcagtccttcattgagactgaacatcgggagtattctgtgcatgaggcccctccccgtcctccctgtctcctgttggaatttgccacctgttggatatctgctattctgcattgcaccacaggaacccgataaggaagtgcctggggtcaggttacggtcctgagtttccagcaggggaactcactgcctcatgtggcctttagaagctgtcttgcttagtaggaagaccatgaagtcctgttggttcgactgtagctcattctgactgggaagccatggctcatctgcaccagaactgttccatctgtagaatggacacagtcagttaaaaatagcgttctcatgaagtcactagatgctggttccagaccctccttcttgtctgctgtgaaaacagtttctgtcatgaagcccaagagcaaaataatacaacattgcctgcatttccgtgtgttctgtttcaggactggcaatatacagcctaaaatgctccagtgcttacagccatctttctcaaattaatttctagtacttttaccattgttgggtataagatcagactgatatcccttacaaataagtttttcaaatgctagtttgtttttttaccccaaacttaacatctcttaaattgaggtgaatcatgcaacaaacatcaaaaaggaatatatctatttgcccttcttacctataaatgttgatattaaaaagagatggtttagccaggcataatggtccaaaaacccagtgtagtgtgcatctctgattttgaggctaacctgttctacatgattaagtctgggccagccatagccacagaagtgtgacccccgtctcaaaagcaacaaaaggggaagatagtctcttagaatcgcaatcagtgcagcacttagaacagagctattcttttcgctttcttgtggtttaaggcagccaaggactgataaagcttccttccttagaatctaagcaagggattatggggccatggcctggttgtaattctttgcctatttcctcccactaggtgatttagatctttctgccccatcacaccaattcctacaaaaagaatagaattttagcttgagccctcttttcccaaggcctctgctctctgacctctctctctgacatctccccctgccccccactcctggcagcctttcagcagatgtctatggtagctatagtctagacaggacgttctaattctagagcataagtatgaggcgaaaagagtgatccctgacactctgcagcatccctcggccacagccttgtaggaaaggggtctgagtgtaaggaaaggaagcgtgtcctctccacctcacatctttggcttgttcaccctctatatgtgtcctgccactgagtcacaagacagcctccgagaagcatgagctaagctgcttttcagagtgagggggacagaacatgagaactgctcccctccccacactcatattcttatgaacttcttggaactgggcctaatggtgccagcatgtaatcccagctaactttggagactgaagcagaaggatcacaaattcaagggctgtgtggactgtgtgaaagaacagctggagacagggagaccctgtctcaaaaaaaaaagaaaatattattgaacagatgtggataaaggtccactgtagagcacttgctgtcatgtgcgagctcctaccttcaactcgagctccatgaaaatgaactatggggacaactgcttgtcgtctgggtagttctcggtggtagagagttcctacctagtacccacaaaagcccggttctctcttcagccctggtagccaggatgaggaaggatttggacatctcaagtaaaatcatcctttaacataattatttgtgaaaacctacgtctgtattcctacattctgcacagtttggactctatcctgatagtagtggtggtggtcattagcatagtgaaacccttttaatttgtctatatgtcttaggacctttcctgagagtgttgctttaaaacttgataaagtaaagccatatacataggtcgtcacccatcaggtaccctttcagaactgactcatacatactacttatagtgcttcttgtgtgtaccctagttctgtagataacaagagttacaacatataatgcactcgttgaattgtctggatggtttcatggtctgttattaatccacattggtcttaagcactctggtcatgtgatctgtctgtcagtatacttccagtttgacaaccccagatgcttccacaggcagggagaaaatgacaatacaaccgttagctggaaggtagttcctgggggctagttcagaactgaggcttggtatatgatctaatgcaatgatttaagaatgcgggggttcttctaatatatatttgcatgactaaagtaagttttttattcaagtacatcggattgcctgatagtttgtttctatcttattaatgccagtcaagtttgtgaatgttttctaacacaaagcaggacatcaatgggctgtgcttgcaagagcttgaaagaattcaaggagatgctaaagttttaccaagaccaaaggcactatagaaatgatgctcttaactagcaaagtgttggagtgtggtggtgttcagggattcaaggtagtgggctccacccccacacttgagaaggatagtgatgactgatgggaacattcgggtaaccctgtctgtgtgtaatatattgagggaaaataaaaaagactggggtttgtgttgtcattgccagatcacattttctgtgtgtgtcttccttctagacatatgaagattcatgagaaggataccaacagtactacagctgcagcccctccatcccctctgaagcgcaggcggttgtcctccaaaaggaagctgagtcacgatgccgagtcagaagacccaggaccagctaaaaaggtcctctgagtttatgacacagacatgctccattgtgtggcgcttggcagaaatgcctctagcctttattatcacagtgtgggacttggaagagatcaatccgggaccttttgacctggatggaggggtgggtggaggggtcggtgaatggatggatgagtggatgagtgggtagtcagaccttggtactgagtgaaaaccatactttttagcacttcctagactaacgttaggcttccttctaaagcaacctgtgtgggagcccccttggtgatgccagtctctgctttttcctaagatggtagaagacgggcagtcaggcgatttggacaagatgagcgatgaaatctttcactgcccagtgtgtttcaaggagtttgtttgcaagtatgaactggagacccacatggagacccactcagataacccactaaggtaggggaatgtgaacagaacctgtggtctgggaaattactgtctcatatcccatatgtcactccatcatgggctccagcaactgagttagttcacaaggacattggttggtaaggcacttaggaaacacgtggtttggaacaaaggtgagatggtaagcaaggatggctgttcactttactcccttgttcttcctggggtcccttgagtagtcactgtgtctccaagcattggcgatcgcctgtcacagggtatgtcgtatatcagacatatttcctttgcagaaggttttggccgcccaaatgattgcttgctatacacggataagtggtgtatatgaagacagtgcatgcatttcatgttcgcaacacagcactgacatgtatgtactaagtgcttaaactgaattagatgtacagtgccgaaacctgaagcactgtaggtgagagttgctggcatgcaaacgggaaagctggctacacagtgtgagttctcagtgcttgctctgcttctttggcctctgttggtccttaacaaccctaatctgatcctcagcttcaaggcgctgaaagtgtgcatggtggtacgattttttttcctagccgtggtagagagaggaacactcctctgtctttgtctaacttctcttgtaactcaccagtattcttggtgtacaaatggagttagaaaatttccctacagaattgctgcagtttatatgttccgtctattttcagcattataaaggacagagggccacatgggaccctcagctcaagcatgtagctgaaggttcatctagctacagaggacatcttgggagtacaggatatgggtgtctgtttgcctgaattcccttctgttagttttatgacagggtttcactggaatgggaggaagaacttttgtagaggttaaagtgtcaagccctgaggatgctataaagcacctggatgaaactttccaggctgggctggccagtgtcccatgggattccacctccactctctgtgaggggaaaaagggcccaatccagagagatgccaggaatgttctaactgtcctaccccaagcccgcctctactcccatgtagctcccatcagctgcatctgtatctctggtttcccagttctcgttgacatagaataaggtcactaatgcctgtattctctcccactcttctccaattctaaaatatttcttttaacttttatctactacgaaatcgctcttcctcttgtcaccgaccactgattctgagaaactcagaaatcatttgttttgttgagatgagatacctcagctgtcctggaactcactatgtcgactaggctggccctgaatacacagaaatctgccccctttgctcctagagtacctaggattaaaggcatgcaccaccatgcctggccaagaacctagcttcatactctcatccgcacagcatcctcgagtgtggagccatggtgaacagtgagcagtaagtgacgtaagcctctcactgtgtggcgagggattagaacagcacagaggaccttgattcctccagccacgcagccattaatttaatgcccccgtgtctgttttacctcacttcatattttattttgtgatcagattttattgttggaccaacctgcttttgcttttcctggtaatcccatcatataggaaagtaacctggctcttgtgagtgatttctaggcaacctgagtctgtgtggtgaggagggaagactgggtgtctctttactgagttggaaatccttctcgtgcagagaaaatgggggtgggaatcccattagacatgggtccatcatgagcagagctatcttggccatggtgtacatggctttgaagttgaacctttgctgtcctgtcctgttaaccaagtaggtttcctcacctacttgatgatgacaccatttggggaggggttggctgaagaggttgcttagcaccagatggacttagtccttttaggcagtattcattccaccaaccccacagcagcttgccatggatggctcctaagaagcggtggcttgatggcttgtgtgcccagagaacagaccagctccagcttcgtggctttatctagtaactcttatgaggccagatggggctgacttttaaaaagcgaaaggagttgattatagaacatagttaattccccttttctcctctctgctcagcttccacataataacctactaccagaggaagccttggggccaggcatgggccagtaggggcctagcccgggtggtacattgtgacagtagctgatgggagagactgcttgttaacccagaactaaaatagacaccaactccattttcaaatcccagaggcgcagagccacagtgggatgctaccagtttagaaccagagtccgtaacttaaaacagctgttggtttctttcctctgccctcgtcccactccctcccctccgacccaagttggcgaggtgcccgtgttccttaagaaagtgttggcaatccaaagtagtatatatgctgagtcttttctcctgcactctgccgagtttcaaaatcgtgaaattctggcattgaacaaaaggaagacacagcaccaccgctgccactggtagattcctgttcttaagatcgggtattgcttaccaccccttctggccagctcctgggtgaggggtgatagggcagagaagagagccgaatagagacatccctggcagtgagtggccttcagagatgaaggtaggggacagtgcacagggcaagtgtgcagggagggaagagcggcaggcgctgaatgtcttgctttgttgttggggcagaacactgtgacagacagactgcaccactgggaacaaagtgaggtggagcaatgtgcaggccgctgatgttcagcagaacggcgtgactcatgtgtcgctcgacgtctacttgcacattttaaagtgaaaagtggattagtagtgtcatcttaagggtgggacacacagatgctcagtgtctgtgaggcctaggattcaatctgcacctccccaaggaaaaagtaaactaagtgctgattaaattcatttaagtcaaaatagaatgtataacattctatacttacaatcagcatacaattattagtggtacatttttactttctcgctatcttatgtttagtaattgaaatctatgcttattgaacagtcataccccgtcttaatggaaaccagtcccacaccaggtacctatcagcccacagagcaggttaaaagacaagccagaaggcagtgaagccttccccaagactgagctgtgtagctggatagtcactgtgttgatgaaggagctgccaaaagcaaacttgctccaagttattgtataatcttaggtggttccttgattaaaggagattgggtaataagtaattttaacatcattttagttaaaatatatccaacaaataatggaggcctcattgtgacaatgtgaggcatttgaccagtcttgactaaaacaggaatgtctgaggtgggacccagggactggttagaaaaaaaggaggcaagttcagagccaagaaagaaagactcagtaactaagagctttggatctgacattggatattgtggcactctttgttccttctacgttatggccatcattatggtcacagcattgatctttaaattaccccaagtttaaggcagtgtccttgggttagtcaggaaataggctatgggaagctagcagggtctttggcaggcacccagggctctgaagggacaccagagcttgttgcaggcccgccagtcccttactgtgcatcctggcaatggggccattgggtgagacatcccaggacgttcttgtctctgtttcttgggtattctgaggaacattcagctcccttcactgctcgccaacacctgctgagagacgctgagactcttagtgtgtcagcgaccccatctattctcaaaacactaaacaccaagcaaaggtgaatagaatactggaatctttattaagactccaggggtccaaggatcagcccagtgggagctgggagtggaggacagagacttggagggggaggtacctccctagcccggcaattggaggtgtctcagtcggactttcacagcctcctcaccacccaagggcaggagcaaggaccagtttcacctggctttaggggcttctcttcctgtcccctatgagccccttagatactccctgcttcacgacatgctggcttaactgaacagacctagtgaggtgcctgtctgtgctggacagcctgggtatgttcctaggatgtggcaaggggaagctacccagccaggcctctgtcacaagccagcattgctgctcacaacaactgggagagattactgcagctgtgggtgtcagttctctccacaggatgggcctgggagggtaggctgagggaagagggatgtctgggtgaggtggggctctcttagagagggattgtttgcacttagtcctttcggtctctggagacaaagcaagaaaaatgaagcatgaaatccccctttaaaaagaatgccatcaaaactctgtaacaagcacagaattaggcgtctcagggaatccggctgggtcccccttccagcagggagtcataggttctgctcactgcatttgcagggaacacggagttgtcaggatcaggaaaagtgcccaggcattgaggatgtgacctgggccaacaaggagcctagacacatctgtaaatgacaatcctctgagcaaacggggttacagacagcactgtcccagcactgcctggcacctctgtgacctcaggcaagtggaggctcggtttccccatctggaaaatagatttggcgacttgtgagtatgaagagagtgatcttaggcctgaaactataacgaatactgagttttttgttctgatactgttacttaggatgtctttttgtttgtttgtttgtttgtttactgtggaggtgagggcaatgtgctttcatgtttgaaaattgttgtcacacccagcttttatgtaggtgctggagggggttcatcatacattactgaaccgtctccctagcccaccgtgtcttcctagcatctcaagtcctccaacagaacagttaacattttgccgtggtctttcttggctatcccattccagtgacaccgaggagtcaaattccagaacaacctctcccaagtactatgtacttgacagagcatgaaagcatttgtcctttgctctctattgtcatagagagccatttttatcttgcgttgcctttgtaaagtttaggacattaaagagctatttaaatggagtctgaggcctgcgttctgagtgccgtcacctttacagactatgccaaacaggcaggattagcagcttggagggcctggatgcctacaaataagagaacgacacttcttttggtaggatgttggagaaatctacaattgtaaaaaagttccttaattttgatatttcccctgtagtcttttgaaaatatattttgggtcgttatttttttaaagttagctcgttaggcttaagaggagggagagcatctgtctatccctccactccgccagcttccctttgtttgtttattgaggcaggttcttcctatttcaccctgcctatcatagaacttgctatacagaccaaacttattatacaggcctagagctttctcctgcctctgcctcgggagttatagggttaaaagcatggactactatgcccaagttgcttgttttttgttttttcaggatttattttattcatggttatgtgtatgtacatgtgtgtgtgtacctacagcgagtaaaggtgttggctccctggaactagacttagctgcctggatgggttctgatcattgaacttagttcctctatacgaagagtaccacctcctatccattgaggcatctctgcggccctctgttttcttggagggaggtggtgtttgtttggggtgtcactgttttgttttgagacaggctcttgctctatagcccatactggtgtcaagttccccagagtcttcttgctacagcctcctgaatgctgctattccgggcacacagactagcacccagttcccactgccccagaagcgtgcttgctgggactgcacaagaggccttgggggacatctgagtgcctgcctctttaggttacttttttgaaacactcctgctgacttcaggatttttatctttagaacattacggtcaccagacaaataaataatactgctgtagcagatgctgaaggagcacatcccagtgccactcagctacgaagctgacagagaagacacctgtcctttttatttttattttttaactactttggactggatcattgggtccctgtaatggatggacatgcacaccataatgcacaccatgataccactccatttccacctttgcctcggtgttttcttgtttgtttgtttgttttttccgagacaaggtctctgtgtagcaatgttttcttttaaaaaaaagaaaaaagtaaatgaaagaaagatgccttttaacagggatgcttgccatccaagggatagatatctcagttcccttcctagttaggcacgtggcatgcagcagttagcaatttcctttcaggtggcttggcttctaacttggtctgcagctgcagcccgctttgagctcttggtcctcctgccctcacccctgcctataaggtcttggggttgcaagtgtgtagcaccatactcagttttgatgctttttgaatctttgactggatttgagtatgaactccagcactgcttgttgcactaagatgtcttttaagagctggaagggcaaaacctcagctcgtgttcccttgactcggtggatctgggtggcccactcctttccgaagtgagcgggttgcgtgctagttgtcagggtcttctcttctgtggcttgctggtttgaggctgcagtggagatgagttcctgtggagccagacacattagcaataacatctctccaacctggcaaaagtcacagctgggatgcgatggcacgtgcaagaaaagggatggcgagtatgcaaataggggttcagaattttttttttctatgactgggaattgagcccaggactttacacatggcaaacaactgctttatactcagctatgctcccagcttatggaactagtgctcactgtaacagtgtgtccccgtgaccttgacaactgaaaaacacttctctaagcacacattgtgggttgtctgtgaccatggttttccagcaccccattcaacctctatgacttcacatactcacagctacagtcagaactttgctcatttatcctgcctgctgctagggggagcttgcagtcagtctatggaaccccccctccagctcctccagacctcccctgtctgtgcttcacacctacccagtaccagggtgacaatgacactacaagtggtactaagggaggctaggagagaagagataagctgcctcccaccattaagaacttctgttagagccccgcctctcctttccactaaggtaggaccccagattcagagactggggaggatgctgggctctgccctaacatgccaaattcaaaaatctcaccgtcttaactataccgtaggctaatgtggtgctgctcattccagtgctttctaagtgagtcagtaccatgttctgccttggggtacaataggctacttctttaaccaccatgctttgacagtcagtatagtgaggacgcctatagagactgaggtcaggcaaatgtctgtctctgtgttcatcgatgtgttccatgtgtctccttaaactgttagcagtttttccacgaaatccccttcccccaacccggtgggaataacctatttcaatgtgattttgaaaaggcagttctgtttttggaaggaagtgtgagttcgtatagtttccttgagtttcacaagaaagattcactttccccaaatacatttattttattgacagcaatgttggtttccaacatagggccttttctgttgccaggaaatcagaagacagccagtctggtgtgtaacagttctctctggcaggtcatcaggatctgttacaaaatgaaaacccttcagctccccctctgtgctgtgactcttgagtgtgtctgcgtcttctcagaattttgcaatcattctcctggtagggctgagatgtccccacaaacccggttgaggatgacagagtcctggggaccacccagccaatggctgtaaccttaatgaagagtgaccaactggagccaggtctatgggtaccctgagaatagctcctggtgcaggctctgcctgctgccacagactccacagttacagcgacctcccttgtccttcaagcacttggaaacaaggttgcaaagccctcatccctgataaagggccgacttactgatggttctcctcctcagctttattttatttaaggtctatccacaggtgcagagtgtgaggcaaagcagccggagattctgagagcatccctttacccagcctcacaatgcatgcatggtttcaaggcagataaggctttcagctccagtttatttatttaggagggtgtgttttgtttaggtggctggagctttggtttattgggagtatcgcatttgtggaatacagtgggggtttgtttatttggagggttacgtttgggggctgtgtggaggatgggtttgtttgtttgtttgttttttaatctgccatgtcaagctacttgctagctatgctaaaccagtgattctcagccttcctaatgctgcgaccctttaatgcagttcctcatgctgtggtgacttccaaccatacaattatcttgttgtaacttgggaattgtaatgtaaatatctgatttgcaggatagctgatatttgattcccaaaggggtcctcaggtccctcaggttgagaactgctgctctaaacattttcagacggtgcctgttgtctcagcaacttggtgtctcagggatccttttaaaacaaacagccaggtgtggtggcacatgcctttaatcccagcactcaggaagcagaagcaggcggatttctgagttccaggacagccagagctatacagagaaaccctgtctcgaaaaaccaaaaacaaacaaacaaatccagtacttagaagacagaggaagtggatccctgcaagtttgagagcagaatgatctacagagagacttctaagccacccaagatgacatacttgggactcttaagaaagagaaagatctgtaaaatgaaagagtggtgttagtgacaggcaagtggcagtgcctacaggagacaccagcgagaggtctcctgctacctgccattgatcttacctttcaggaaaggtcttcttcgtcccttaacttagctctggtttctagagacagcagccgtgggacagtctgagccctgggtttaatacttccctccattcccaaaccctccccacccttccagaagttctcatcgtctcatacgtgtgcaggcagaaaaaaacatgaaagggagccccttcttattacatgtcccaaacccaaagaggttagcttctgtcagctgagaccccactgcacactcaacggtggctggagaccttcattgttgaaacttgaagtgataaaatatcacctcggtagttgaggtaaaggacatttcacccattcttatacatgtgttaaggaacatttagcatatgcagaaaacttaacatcaatttcttaatatctagtcagaggtcagtttatgtaattctgatatttctcatctttttaaaccagaatattgtaaggaggtgggctggtaaccatgttctattaacttgaacgtagaaagtctaaaagcaagagtcctgtctccagacagaggcctgatctcctcagcctcagaggtcagcatcacgagtgtgctctcagacctcaaacctgttccagccaaaaatagaccctggccgaaagtgccagcatctgtgccactgtcccatttaacctgtgcctcagccttctttgtattctgacaagggagggatcctgtagtataaagtctccccaaggatatgccccactcacaaggtgggagctacaccaggggaaggttgtctgagcccaacttctgtaagaactgttggaagctcagtagactcccctcaaaaaagagcctcgtgtctccagtggccaatgggaacctggtcgtctaaatcttgtttaggggatgtttccagattaacagaggagaggcaggagggcattgtgcctctgctgctagggagtgatgaccaaggctgcacaggccgcttcagccccagctcagttgcaacatgagtgattttcattgtcattctttccagaaaagaacgagcaacaaagtttctattagtgagtatgtagtgtaaaggggagcaagttgctttgctctgtagaaacagtggcaacacgcccctcctcttgagggttcatcccagtgagatgtagtaacacaagtaaatggaactctgtcatcatctaagtatgcacacccgccctgcctcacaccagtgagatctgtgaatgagggattgtgaggaggagccccagtgactgtagtgagttcggcctgggggatgcttccaataccattgccgcagcattgacttcactctcagtgaagaccatggtgcccaccacctgttggccttcatccacttcccacgaggggctttgcatttgtgtgagctcagtgtgtgcttatttttcaggtaatagtggtagtgaaacaagaatttaacatagtttctaccaataaactataatcagtttatctctgttaaataccaggagtgctgtgtggtttgactactgccatctaggcatgtggtgtttgtttctgaaacggggttttgcctttgtatctctcaagtgccatgtgccactgtgcccagcaacatgggcatcttgtgtcttgttgcatttctttccttggtggtgnnnnnnnnnnnnnnnnnnnnnnnngaggaggaggaggaggaggaggaggaggaggagaaacttggagacaggctcctgctatggcaacttccaggatcccagctgctttctctttgtgcacaaactttagatgatggtatcatgcatacatctgtaccacctgcaaagattcggtatccagaattattagaatttatcctaaaaaaaaaaaaatcaaaagggacccaggcatggtgctgcccgcctttagtcccagcaccggggaggcagggttaggggaatctgagttcagagccagcctggtcagtacattcaagaacagccagggctgttacacagagaagtcttgtttttaaaaaccaagcggagagtggagcacactggtaacgtgacttctttatgccttatttttattttattcagctaaaatgaagcaataaagctaacagaccattggagacgctgagccgtctcctcatggttgttactctcttctcctagatgtgacatttgctgcgtcaccttccgcacacatcgaggactgctgcgccacaatgcacttgtccacaagcagcttcccagagatgccatgggaagaccttttatccagaacaacccttcgattcctgctggcttccatgatttagggtttactgacttctcctgtaggaagtttcctcgaatctctcaggtatggtgctagacctagtcagccaggatgggagttggggtgttgtttttgtataataccatttcactaaaattcagcctggctcttgggtttcttgggctaaggagttgatggtcttttattttagttgagttttcatgtgaatctacctcatcaggaccttttgcccatacttcacgctttgagattgaaagttgagtacttactactcctgtcactactaccctgttataatatttagtacatagatcacaactaggtatttgtagcagtttctgttaaaatggtttggatttttttcaaatccaagtgtgtgtgtgtggggggggggggggatggatgattgtgaaggccagaaaagggcattggatccctagagctgaagttgtaaagtggttgtggtcagatataggtgctggaaaccacacttaggctctcctaactactgacctgtgtctgcagctccttggacctttacgaatttgaacaactaatgcactgattagttccctgcctatgcaaaaactaccagaactactttttagtattctcaggtgtaaatttgagataggaagtatccacatataagttcttgacataaataagtctcaagtgcagtggacttgatacatctgtacatgcacagctgtcccaggagattgatccctcctcccccagtcatggaagcagccattttgtgaagaaggcatcctagtttgtcctcttagcttgtttggtactgcttgagctggcaatcctcctgcctcagtctgctgggtgctggcttgtgctgtgtcccccagtgtcagcactcccccatttccaaaggcttacttcaaattccatcatgatgttatttcactctgcttgtgtctatcctagagggtgtccttgagcaaacaagcaggtttctttcaggtgtgcccaacctttgacactgctagctactgagctcacccttgtgaactgtgcagttgagtgacaggagaaaagtatctcttcatagtttaagccactttacagtttggtgttggagtacatccatggctgtccttagcctgctgtaggccagggccgccctccctcgcttttcccgaattcagtctcagatctgcactccgaaaagttgactctgtgttaatggaagcggctgctgctaacagcaggcacctctcacatctccttcacggtcgtgtttcaatcctcacctttcttcccttgcttttgcttgtgggtcccacttaggcctggtgtgagacaaacctacggcggtgcatcagcgagcagcaccggtttgtgtgtgacacctgcgacaaggcgttccccatgctgtcgtcactcatcctgcacaggcagagccacatccctgccgatcagggacgggagaagctccagaccaagaccctggctgccgagtccttggaacagaaggccttcctggccttgctgggcctgcagcacaccaaagacgtcaagcctgccccggcggaggagctcctgccggacgacaaccaagcaatacagctccagacacttaagtaccagctacctcaggagcctggctgccccaccgtgctgagtgtgtctcctcttgacgctgcttctttaggtggctctctgacagtcctcccagctaccaaggagaatatgaagcatctgtccctgcagcccttccagaagggcttcatcatccagccagacagtagcattgtggttaagcctatttcaggagagtcggccattgagctggcagatatccaacagattctaaagatggcagcttccgctcctccgcagatcagtcttccgccactttccaaggcccctgccaccccgctgcaggcgattttcaagcacatgcctcctttgaagccaaagcccttggtcacaccccggacagtggtagccgcctccacgcccccacctctcatcaacgcccagcaggcatctcccggttgtatcagccccagccttcctccacagtccctgaagttcctcaaggggtcggtggaggcagtgtccaatgttcatctgcttcagtccaagtctgggatccagccaagcaccaccacacagctcttcctgcagcaagctggagtggagttgccgggccagcccgagatgaagacacagctggaacaagagagtatcattgaggccctgctgcccctcaacatggaggcgaagatcaagcaggagataacagaaggtgacctcaaggccatcatgacaggccccagtggcaagaagacccccgccatgcgcaaggtgctctacccctgccgcttttgcaaccaggtgtttgctttctctggagtcctgcgagcccacgttcgctcccacctgggcatctcaccctaccaatgcaacatctgtgactatattgctgcagacaaagccgccctgatccgtcacatccgcacacacagcggggaacggccttacatctgcaagatctgccactacccattcacggtcaaagccaactgtgagcggcacctgcgcaagaagcacctcaaggccaccaggaaggacattgagaagaacatagagtacgtgagcagccccaccgcagagctggtggacgccttctgcgccccagagaccgtgtgcagactgtgcggggaggatctgaagcactaccgagctctacgcatccacatgcgcacacactgcagccggggcctgggcggctgccacaaaggccggaaacccttcgagtgcaaggaatgcaacgctcccttcgtggccaagcgcaactgcatccatcacatcctcaagcagcacctgcacgtgcccgagaaggacatcgagagctacgtgcttgccaccaacagtggcctcggccccgcggacacgcccacggatgccgcttccagaggagaagagggcagctgtgtcactttcgcggagtgcaagcccctcgccactttcctggagccccaaaatggctttcttcactcgagccccacccagcccctgccttcccacatctctgtcaagctggagccagccagcagctttgccatggacttcaacgaaccccttgacttttcgcagaaaggcctggcactggtccaagtgaagcaggaaaatgtttcctccttgctgacgtcttcctcctcctctgccctctatgactgctccatggagcccattgacctgtccatccccaagagcgtcaagaaaggagacaaggacacagttgttcccagtgacgccaagaaaccggaaccggaagctgggcaagccgagccgctctcaccccgcccaccaccctgccctaccttgtcagtgactgtggagcccaaggggagcctggaaacccccacaggcacggtggtggccgtcaccacagctgccaagctagagccccacactcagcccctccagggctccgtgcagctggctgtccccatctactcccccgcgctcgtcagcaatactcccctcttgggcaattctgctgccctcttgaacaacccagccttgcttcggcccttacggccaaagccccccctcctcttgccaaagccctcgatgacagaggagctgccgccactggcctccatcgcccagatcatttcttccgtgtcctcggcccctactctgctgaaaacgaaggtagctgaccctggaccatcgatcaccagcagtaacactgtggccacagacagcccaggaagctccatccccaaagctgccgccacccccactgacaccacaagctctaaagaatccagtgagccaccccctgcagccagcagccctgaggaagccttgcctactgaacaagggccggctgccacttcctcgtcgaggaagaggggcaggaaaaggggactgagaaaccggcccctccccaacagcagtgctgtggacctggactccagtggggagtttgctagcatcgagaagatgctggccaccacagataccaacaagttcagtccctttctgcagactgcagaggatgacactcaggaagaggtggctggagcccctgccgaccagcatgggcccgctgatgaggagcaaggtagccccgcagaagacaggctgctgagagcaaagcggaactcctatgccaactgcctgcaaaagatcaactgtccccactgtccccgggtcttcccttgggccagctccctgcagcggcacatgcttacacacactggtaagaaggccctcacggctcaccaggcggtgagtcttgaaaggaaagagtaatgggtagggataggagtaggcctaaagtttggggcctttgtctcatgctccattctttgtctcagaagtcacaggctgttactttccatataatctgtgcctgtggtctgagccaccaaggcttatctgtaaataaatgtatcagacacagtgacagtggtcataggctccttcacttccctccccataacctttgcctgacaagttccaagagtttctaagtatggaggccattccggagaagtgggactttgcattaaggtaacagtgatgtaatgagcttggtgctttgacatgataatcttcagtgccgtcttttttttttttttttgaacattctatggagttctttagctaccacacatgtaatacagaaaagtgggattggatattttttccccttcactgaggtagctccagcgtcccttacttattttgactttttttcctatttggaatacttagatgattgatagtagtaatttttctaaagttctatttatcctaaaattgtcaactgttgaggaaaacattctgcgtatcatttgaatgttttaattaacaaagctagattaccaaaacaacatcccggaaatagttttcagatgtcagtttctagaagttgaagtgtagaacagagacttatctattaaattactttatgcctagtgcttctaatatttcaatagccatctagaaaggtataattataattttctgaatagtatcacaggatttgtatcatcgatcgattgggcgattgttgtacattcagtgaagtccttacccttttggagtttacagtttaaaatatggatcactggcaagatttgacttttcagaccaacaagtattttgtagtatttgggacagacggaaacattacttattgatcagaatgatgctcaaattttactgcagatctttttgcagtagatcttgctagaaacactccaggaaggaatgctgtgatttccacccacccacccccgcccactgaagatttgtgtagataggccatctctcagcaaactgacaggcttcctgggagccaaagtgtccatttcttttccatttgtgatggcatctgcagataccagagacgtgtcccctctttccctggggtttgatcactgttggtgtaggagcatctgaacctgttcggtccccagggcccacagagtagaaaaaagagccaactcctacaagttgttctcttgcttctacacgcaagccatggcacaagtgtgcttacgtgtgcacgcacacacaaacagagagagagagagagagagagagagagagagagagagagagagagagagcgcagccaacagcattgagcaaaacccaatttcaactgtagttaagcaaactgcctccatcatgagagagggtctctttccatcctctcagctactttgttgaattatcccagcatctgtacttggtctcaacccatttctccattctacccactccctaccacggaacaaagaggtcagctgctgaatgtccaactaggggtccacctgctggctgccagcacaaacatggctttagctctttaccctgcttagttaggttccaagaatgtactctgaggaggaagctgtcatctttcatgtcctcttgggcagtttctacacactcgatttcctccctcctccagctctccaacctgtggctcactgcgctccctctggacatgttgtacctcgtgagacaacaatgcactgtctctgccagttcccctcacagcatctcggcctgtgtctttaggccacaggaggacaaagtgccagcaaacacaaccagtccctttcagcagtatctgtcctcaccttttcctccttccctttgctctggttccttgttcacagtgctgggtcaggatggtgcaatctctgagaacccctccagctgtggcatctgggatcccctagctccctctcattctcatgggtgcttggagctcctttgccagctcctgggctcttccatctcaccttctgccccactgctaatgggtaacaagcactgacgtttaaatttgggagatgtcctcacagtatagaaagcaacttgagctacttgtacctagctgccttttactaaggtttaatccatgtttttgtatgtgggtttgtgtctgcacatacgtgtgcaggtaactgcccaggctagaagaaagagttggatcccctggagccaaggttacaggtgcttgtgagctaccagatgtaggtgctgagaaccaaagggtcttcaagagcagcactttctttaccactgagccatctctccagcccaagtactttattaagtggtagctttgactgcaaaagaagaaaagtaccaagaaaccctgggccccgagggtaaagtatgtgggaagtccaaagatgcttagctcctacagtcttgtcagcacaaaaactccatgtgtgtcccaggctagttctaaccttgattctcttcagagaacatttgcagctcgtccatttaggacttgacaaacaaggtcccgttgtcctcagcaaactcttgttccttctgcctggctttgttcccagtgcccttcagataatgcctctcttccttttctgactgctctgcatgaatgaatttggatgactggtggctttaatgttcacattggggtgggagacatacaggccccggatacaaaagtatggtcacagctgctcttacacacacatatacactcgcgcacgcgcgcacacacacagtctaccagattggtaaagtgcactagtgactttcagacatacactaaacaggctcaccatttttacatccctgcaaggcaaaaagcatattactattttaaaagtaattttctgctttgtataagctttaaatgattgtgttacttgtcagtttgaggtccttcagtggcactaatgtgactgttcatggaatacagcaaaagcatgtgaaaattaaaaagtaaattatttcataccaaaaaaaaaaaaaccaaccctaccattttcttaaaatctggaatcccagcctagtggagtcgggaagatggctggattaaatacagagttcagttgcccgcatccatgtgtaagttgtacatcttacaaatgcttgtaactccatctcgaagagattccacaccctctcttgcctcccacacatggtgtacatgtattcatgcacacagaggcaccaataaaaaataattaattaaaggaatcccagtatagtagcctttggcccttaagtcttttttttttaaccccttttggtgctggtacttgaaccagtgcttcagcattctccatagctccctgccagctccttgtttctccgttctcttcctccctatctgaccagacctgaagaagctgccatctttcttttagacaaaggaaatttaagatattctgttgttattaatgaaaagcaaaagagccacttgaaaaatacatggggaaatgttttatacccggtcacttcaagatttaaaaaaaaatgagggtgttggggctggagagattgctcagaggttaagagcactgactgctcttccagaggccctgagttcaattcccagcaaccacattacaggtggctcacaaccatctgtaatggggatctgatgccctcttctggtgtgtctgaaataaataaataaatcttaaaaaaaaataattgagggtgttttcagtgcttcaagcatttggtaggtcctctactagtgtgcaagggtccttgtctatacacatagtgggatttttatgaggcctttccaaggtctctaagtatgcttggattgatgcaaatattcctgtctgtttggtcaccccatccttatacatctcttgtatgcctttctactccattgctcattgctggggttggggtcgttggttggtttcatgggtggtggttgttgctgctgctgcttttttccagtgctgtagtttgttgtgggtggctctgggctgcttgctttcctggaagaggctgtctggaatgagtaatgagtcacacacacaagtggattcctgtgaaccaatcgcctaatgaataaaggagccaatcactaggcgagtagacagggcttccaggttggagagaggagagcaagcagcacagagccattcacaacatttccccctttctgttctaataaaaaaacaaaacctttctcacagtatagagtacaacaagattagacctaacacccagtccatcatctatcctaaattaaaaggctggagagatggctcagcagttaagagcactgactgcacttccagaggtcctgagttcaattcccagcaactacatggtggctcacaaccatctgtaatgggatctgatgccttcttctggtggtctgaagacagcgacagtatactcatataaataaaaaaaataataaatctgaatgataagtcttttttttttttaaatcattctatacctgactcatgtcctggctttagactgtaagccatctgaaaaccatcctctcaaagtaaatagcctgggttggctatgaatctgcaacaccatcagagacccaagaatgactgatattaactgaaagtatataggaagcctaacaccgtttccaaaacttagccaatttatagagaccgctgatcacttggacaatcccttacttcaaaacattgaagcattggtcttcagccttctggccaggatcatctaacaaaccttagaaaaacaggatattaaggactagcctattctgtctctgcacaaccaagccgtcctaaacctgtaattgtgtcctttctctggacagtgtatgtagatgaaatgagaattcttgcctagtgtctatcttgccacaactggagcaactcatagatgctccagtttcttctttgaatccaagacagggaaagctagcagactagtctcaataacacgtgaataaataacattaaatgtcacattctgtggattgctgacgtttttgaaaaccagctatgtatgtaaagtaatctggactgtcttcccttaactactatttctaattaaaatctttgaaaacactctaacagtaaactcagagccatgactttgctatttggcccttaactcacaggcgtaatcatctcagatcagtttataataacagttatagaagatgattaaacaggcaatgattatcactgcgctttctattctagagtcagtgattgatattctatcctggttcaaattaaaacaatccaaaacaaatgaagtaatctaaaaaacttatacttaggccttttctctggtgccaagagaatataaaacccaatatttccatggagtccatgttagacagaatatgagtattctataaccatcaatagaggaggtttgtaccaatgaaaaccttgatgttgcatcaaaataaattctgtatcaaaataagttatgacttcaacttagtaacaattaaaatgatttctaccaaatgagattatgcctatacaatcaattctagctatttcctccctgttccaattatgaccatttctaaattccctagaaagacaacctataataaccacttccagccccaaagcccaggaactggggcgatgactctttgtaacttattcaggctgaatatgggcattgagatattttgaatcggtgcgggtggggagataggggagttgttggcctttaaaaggccacaccaaagattgatttagtctctgatgcctgtgtcctggctgtatctggttgaaagtccaagacatcaggagttcaagcaggtcagttcagcatgtctgacgaagaaactcaccaaggctgtatattctgtaatgtataaatgtcaaagcaaaatgttagtatcatcaagataacatttttgttcaattctctgaaatctagttcttcaggggggggggggtctccctctgtcaagtctgatccatataactctggatcttaatcaccttttccaaaaccacaaagacaaaacctttttcccaaatcagccaaatttgagacgtaaccaaaaaaacctttattttgcctttctcccagaggaataaccacaaaactcaacatcacacccattttgaaaattaaaacaatataaaacaaatgaaataagctaagacactgtatgtgcctatactaggcctttcctatcttttcaagcaggaaaagatactcaagatttctgtggagcccacgttagcagaatatgagctttctgtggctggttaagcagtctataccatctttccgtttggctcagagccacagacatattttattaatacccgtataatggctggctgaactctctacctggagccacagaaatagataattaatacttgttcaaggcaggcaatgattatcactgtgatctctactctggagtcagtgactaatattccctatcctagttcaaattaaaacaatccaaaacaactgaagtaaactaaaatactgtttgtgcttattcttaagactttcctatgttaccaagaggatacaaaacccaaccaatattcccctggagcccatgttagacagaatatgagtatcctgtaagacaagtaaagcaatcttataccatcttatggttcagctctctgcctagagcagccatctcattataccatctatctgttcggctctttgcctggagccacagacatttattaatacctgttcactgccatttctacttgatgtcactgactaattttccctatactcctatggttgagaaccataggcaaaattccccatgtgattcagacaaatatctgtatataaatctatactaaaagcaagtaatcccaatttaataaattcataattcaatcaatctctgctccaagaaataggcaactttcattctacagctctcactcagagcagcctgcattccccacagcagcaggcctcctagcccgccagcagttttctttgtttcaattcctgtgcttgagtccaagctacttgtttcagcactaccgaagttactcactgaaaaaaagaaaagaaataaaataaaactcttaactctcaggctaataatcttaattttctagtggattcttgcccaccatgttcttcaccacctgtaaatctcaaagaagacaaaattttagtattgccaagatataccaattttctgtttggccctctgtctagagcagccatcttgttataccatctatctgttcggctctcttcctggagccacagacacttactttattaatacctgttcactgccctctctacttgaagtcagtgaataattttcactatcctagttcagaaccgcaggcaagattccccacgtgatttggacaaaatctgatataaatctatcctaaaagcaaataatcccaattttaaagaacagtagtttcaagctcagagcctcatcagagatgagctgtgtctttgagctgtacacatccctggcccatctgcaccgtcagacaactccggaggcttgggagtgtcatcttaaaggatgtgtgctctcaggagggaattaatgatttcctttgatcgattattcctgataacggtgagggttgcatcgtcatagccactctgggccttccatcccatggaaaacaagaaacccttctttctggcttatcttagcagcaaggcccaggagcctgtgcagggtcctgcacactgcactagttcaagctttgtctgtctcttaagcattaatctaaaaggatggtccctggtttgtgtttcctgggagctgtgccacgtgactcttcatgttagttattgagtacctgcaggttcaaggttccaagatagcagcactgggcagcaacttgaaggtgcttttagtccccaatagagtcaggaactgggacctggattctggcaactggggcaggagtgcgggggcagagggcaaaccagtgacactgaacagtccaacatctcctacagctcaggatgctgccctttccccttcctgtcttcctggtcccttctgtctctccttccccttttttcttcttctctttccctcctttctcttttcccttctttcttctttacctctgtcctttcccgtcctcctctcctactttctcgtatatgctctctccctgagtctttgccctttcccctccaccgttaatccacacaaacccaggactagccacaggggagcttccaatgcattttgaaacacaatgtttacaatgcaaataaatgaaggatataagcaggccaaagcagaaacctcccctgggacagaaagagggcttctcctgccaacgcatcatcaccgtgtttgtagtgctggcctagggtttgggctggccttgctcgtgcctctgtggagcagagtacatagcctgatgcacacttgcctgtgttggtcactcccttagcccatacaaaggaagaatgaaaacctgggaaccatgaatcttgttgcttgccacactagagggaggctcactctgacttctcaatatgggccttgaaggttgcctcccattgggagnnnnnnnnnnnnnnnnnnnnccccgccctcccccctcccccctacacacacgcccaggtccatctcctcaccctctcagttctacctgccaggctatccagtagtgctttttctctggttcatttaggtattgcttgctgtgccttagaaatgttgtggtgttaacagtttttattgtcttgcttcaaacacatgtatcttggtttcattgttaacttatttttagtctcttgatgacaactccttccattacatgaaggctaagggaaaatgattattttagtcattgtctctcagtttctgtttctttttgttaagtatgtttctcttattttcttaaaaggaaagggtggagggttgaacaaatgccagcaatcccagaagagtaaatcaaaagcaacttttctttttcattgcagtagaaagccagataaatgcgtatttttttttcctgcttcaggtcagaaacccttcccttgtcaaaaatgcgatgccttcttttctaccaaatctaactgtgagcggcaccagttgcgcaaacacggagttaccacctgctccctgagaagaaacgggcttattcccccaaaagagagtgatgttggatcccatgatagcacaggtagaaactctaggtgatggagaaccagagagaggagggtgctccccagaactcggttaaggctgtgtaagctggggcggagcactgagcagctacagctcagggggcctagcccctgccgagactgtgtgagctggggaaacagtgtcagtgccccaggggactttgcagctgccagggggggatccagcaccttccttcctaaaattgccattgctctgatcctggaagataggatgagccggatattgtgcgctttcggctcctgacttaaacccctgaaggaaacacgaagctctgaagtctgggggacccagatcctgcagctttcgtgagcagcccttgcccagtggactcagtactgcaagaactgtggccctccaagcttttagttgggaggcgggttgaggcggggcaaggcggggcttttcttctcaataactcctccctgtataaatctgtccttgtttgagacagcactgtgcatgtccttcttaatcacaactctgcttgacctgtccgggtattatgctcctgtgctgatgtgtgcctcctccctcggcccttacagagtaattaacgctgctccgttccttttctgcccgctgcccccatcaccttctgtatttactcaagtcctctatttaatacacttccatggtctaactgctagagtttgctagccctaccaaaacacaccgtacaaaaaagtaagctgcctcaggccacttggtagcagtagcagggagggcattgcacacacaggcttcaggctccgtgggtgttgaaagttagcgtttgcccatttctgggatccaagccagcctctaatgtgttcatctagggttgcagttgtctctcgtgacttctcaaactttggtgggatggagtgctgtgtagtttggagagtggcaccctgaacctaggagtcagtgtggatagagtgacagtcattgattccaacccctgacccccttgtcctgacctcagtgttgacacatcacagtggactggctatctgggagagctgaccccagtgggtaagacacctttacccttcccaccacactgcttattcagaccagtgagagcaatggaatgccttgggcttgctgggtccttctgcccaggttagaccctcttgttcgggcaagaatgccacagctggtttgctaaccacactgcacccccaacccccaacttctatttccacacaattccctaggatctgggagtgaggacaggtagcctgcaatggttgagtccctgtgagctaagcctgatccgcttcccaagcggctggaagcccaaggcactgcagcagctgtctttgccacagaccatcctgataatgtttaaccatcattgccacagtacccattagactggaacattttcttacagcctgctttacagaaaggtcctgtgattctccccaaaccagttcaaaagggaaggcagctgacaggggggggggtgctttggggtgggaacccatgtcctcagaagagtctcaggcactgtaccctgctcatccaggaggctgttcacaggaactctgctgacgccagagctcggtcagaatttatggtttgagcttagctttggcacaagtgttagcctgtgggcgtatttattttttaagtttacaattacaggttttctttttccaaggccctgccccagaagttatatagattttcttaaaggcacaaagcctcttagaaaagaactatcaaagagagaagtgtttggtttaattgtagatacagcccatggtgagagagagagaggacaggctgaggtgggagaaaaaaaaaaacagaacaggagacctaggaattgagggaggggtttgagaaatttacaacccaaggcagtgcgatactggctgggggtagaggaacaggttttttttggtttggtttggttttctggttttagcctaggactgtggttaaactcaggatgaccttgaacttgtgaacctcctgctcatagctctggagtgctcacaggagaatgtcaccccaactccaagtccatcagcttggggtgacgagcactctaccaactgaactatcttctccatcccaaacagactttgttttaaagagacgggaaatgaccagaagtactgaagctttagaggttcagtttatatgcaaagattgaattccttttaaatccctaaacatgttttataatgtcagtgtcacttttccaaccacatgaggtcttccatgaaaatgtaccccagatttcctcctgtacccgatgctaaaaatactaaggcggggacagttttcccttctagggttgtattaaatattcagttttacactgagacgctttcctctgcgtggcagatgtggcctactctactcttgaatgttcttggttcttattcaggggatgcgtggaggagccattccattggtaggcacctggaccagaccttttacaatataaacatgaattttttttatgtattttatatgtgtgagtgctctgtctgcatgtacacctacctgcatgacagaagagagcatcaaataccattacagatgattgtgagccattgtgtggttgctgagaattgaactctgaccaggcagccagtgatcttaaactacatttcatttgtaggaaggaagcgatccttaactgtggagatgaccaacaaaatatgtggggttttttgaggacaagccataataggacctgcccattcaagttgactagtcactctcttgtatgagaggaggttaagtctattgttcccaagaatcataaaccaggtcacaggctatcctgctaaaacactcccccctagtggaagtctggagtgcaaccaagctacctttgttctttgtacacagaaagaccttatccacccaccctcagaatggaattgtgaatgggacagttcagactgggggcatgcacttggctttggtttcagaattcatttttattttcataagtctatcattttaaatacattctctccagttcaaacagcctatgtgctgggttagtccagggctgaaatggaagaaacacaaatttgagagactagtctaggatgcatagcaagctccattttcaaaagcagaagatgtttttgctgagaacccaataataggaacagccagggtaaaaagtaggaaaaaagtagaattaaccacaaagtaaccttatttttaaactggacttggcttattctgaaaaatacttgccacacaaacttgaggacctgagttcaatccctaacctaacaaccgttaaaaacagaaaggaaggaaggaaggaaggaagacagacagacagacatgtgttagctcacgccgaaaatcccaccactgtgggaacaagatgaaagaggactgaagcttgctggccatccattctgtccaatcagcaagtttcaggttagttgagagactctgtctcaataaataagtaaataaataaataaatagaaagtaattgaggaagacccaaggtagatagtgacctctgatttccaaacacacgtgcacacaagacacatccatgcacacacagaattgctcacaaagtaagcaatctgagcatcctgtgtgtcagttgtagtctaaagtaaatcgaaatccatcccatagacactcactgtgattccagaaaaagagcagagatgttttcctctgagcataaacgggtgatgtgggtgggaatgtccccacttgattgcagggatgccctaagcaggtgtgaggtataagtgtcacgtctgaggcggctccttttccccatctgagacctgccttgatggcacatgacagagtgagcacgtgacactaaggaggaatgacaggcatgtgagtggccttctggcttattctaccacagcccggaaaagtctcagattagctgcatgcatttcagctgcctcgggcagtggtgagagatgtggcgctcctagggcacacctgtgcttgccttgaagcggtgactcttctctgtggagctcagaggaagcactgagcacccttagaaaaccggacattaagtcctcagccagcttccatttcattgttaaaatcattaagtctttgttcaaccctgttaaagaaagggtaatgttcctggtactgtttgtggggtttttcccatgtgggcttgttctccttccttccttccttccttccttccttccttgcttcttccctccctccctccctccctcccttccttccttcctcatagcctgggctagccttgaacttactgtggagcccagcctggcttcaaactcctacctactttagtttctgaaggtctgagatcgcaggtgtgcaccaatatgcctggccttggtgtcatcgatgttggccatggttccctctttttaaggtcactgaaagctggtggacttcccatgtctgtttcgctatggggggtggggggggtgtagacaagtgagatcaagaaatcactgtcctcaaaagatcactcaccctatagatcccagtccccatgctcacccacagcccctcagagccgctcaccatccctccccacgtgcccctggccaggtttgtgttcaaggtcctccccatgtgttgcctacaggtgcaggagcatgtttggtttctggcctctacctggagatgtgcctgtggaccattcacacagaatctgcatgtgggctcattttctgtgaaactctttgaggaccacatttggaagatggggggggggtgttcttgtgtatgttgcatgtttgtaaaaagctctttgcactggaaagataacccttacaacttggcttcctcaacctccctagtgctgcgagtctctggaatgcacgccctctctgtctgcactgcctgagtcactcacaccttcctgggggtgggggcagctgagtgtacgtgggcgtgatggtggaagtcaggagttctgaggcacgagagcccatctgccttccttgggagtgtgaaggctggtttggcctttataactccagattcaaaaactcctcattaggtttagtatccaggattcaagggtgggtctggccaagttccattagagcccttgagaagggcttgcctagtgtcacctcgtctgaacctctctcctgtctgcttgcttacacagacagccagtcagacacagacacgttgaccaccccaggtgaggtgctggatctcacagcacaggctaaagagcagccgccagcagagggagccagtgagatcagtccggcttcacaggaccttgctatcaaagaggccaaagcagcagcagctccctctgaggaggaggaagaaaaggagacagaggagaacccagagccagaggaagagtgtcgtgtggaagagagcactggggctgcagatgcccccgaggaagacacagccagcaaccagagcctggatcttgacttcgccaccaagctgatggacttcaagctggcagagagtgaggcaggctctgtggacagccaaggcccagcccagcaggagccaaagcatgcctgcgatacctgtggaaagaacttcaagttcctgggcaccctgagtcgccacaagaaggcacacagctgccaggagccgaaggaggaggaagcagcggcaccttcgctggagaatgagggcgttggcagagcggttgaggggccctcgccttcccctgagcctgaagagaaaccagccgaatccctagcaatcgatccaacaccaggaaccagggaggcctcagtggcgaaacagaatgaagaaacagagggtcccactgatggggaaggtacggctgagaagaggggtgacggtgacaaaagaccaaagacagactcccccaaaagcatggccagtaaggcagacaagaggaagaaggtttgcagtgtatgcaacaagcggttctggtccctgcaggacctcacccggcacatgaggtcacacacaggtatgagagaccagagccagcctgccagaagaggtggcctgcagtggccattgggagtctccctggaagtcaggtccaggggccactgagagaactggctaggttgcagggttatcctctgacctgggaaggctgggggtcctaaggaggtgtctccatggccttggaatgccacaagccttctacagggcagtggtccctctgcagtagtactttggaaagcatttttcttcagccactcagccccagttttgtcctctatagatagggaaggtggccgccctgtgcacaggtttctaagaacaggaagaataggcggatgtccatctggtgtaagactcagccagatcctgagaaagacagggatatgccagggaaggcaggtactggcctacacatatagggaaggccccaaagggtctgttattttagtggggggcaggggtgggggacctgggtagaaccatgaagccaaaaggcagagacacccttcctcggccatccctccaaagagagcacctccaccccctgaccacatctcaccgtcatggcctcccgtgcacagtggccgtgccacagccactgaggtgtagcgtgctggcacttgttctggccagagacattgtcagctgttgagagacttggtccgtaagctgtcgggaacatccaaatgcatcctcctcatgccttgctttaggtggctgtccatggccttgcagagcccaggggaatcatttctcctaaggacgctttgcttctgggcttctcttacgatcagtttgtagaaaagctaggctgagaggtacaggaagaagaatgtgacacccccaccccccccagccttgccagtttggacaaataagagagtcctgtccctgtgtatttagttctggatgctgcattcatatagagtgtgggaggtgggaaccagtggcctttgtgttaatggacgtctccctttcattctttcattgttcaggagaaaggccatacaagtgtcagacctgtgagcgaaccttcaccttaaagcacagcctggttcgacaccagaggatccaccagaaagccaggcacagcaagcaccacgggaaagacagcgacaaggatgagcgggctgaggaggacagtgaggacgagtccacccacagtgctaccaaccctgcctctgagaatgaggccgagtcagctcccagcaccagcaaccacgtagctgtcaccaggagccggaaagagagcttgtccacttctgggaaggaatgtagcccagaggagagagccgcagctgagcaggcagctgagcccagtgcccccaaagagcaggcgtctccaggtgaaacagacccccagagcccggcagccatcgtgcaagacttgctggagctgtgcggcaagaggcctgccccaatcctggcggccaccgacggggcctcacagctcctgggcatggagtgacagcccgccctgtctccatcagctcagagacaaagctagcggagcatcccaaatgtagattttacaaggttttctcagcttccttcagttgtctggagagagaggaaaaagagggcaagagagagacaagcaagcctgtggccaaccagctcgtgccatagccttacccagtacacatgcacccggccccagtacagccggcttcagtgccttaactacttatgggtcctcccatgtcgttgtgggtgtcccccttccaaaaaaaaaagacattttaacaaaacaaatattttaatgaatttttcggaggaccttttcatttaagcattaacattaccttttgtatttgtgtgtttgagcttgtttttgtgagtctgtgatagtactgtttttgttctgtgagctggaagcagaaaaccttccccttggatcctgtagccaataactggaagaaaatgatgtgaatttcatgtacatgacccgagggaagagggtgtgaggctaatttctaagctagacctgtattctctggttcacgtcggggaggagccgcggcctggcctctgtcattagtagatgtggttgacgcagggttcctgtgtggtgtgagccaaagccaggaaagagtctagcttcaacctcgcgagtgtttccaccctctccgtgttagaaatggctagtgttcccattcttaatttacagagaaaagtggcctccccagcaccctagcctacagaggacacggctggaggtcatatagccactttcccttcttcccattcggtatatgttattaatattattattattatttttatttttacttcttcagttcgctgggctctgcattcagcagaaacaaatgggcaatatttgtcctgggtgacctgtactgctccctggtccccccttattgtgtgcctgaagcttctggtggcacgccagtgatggctcttctactgtactcagacaaacctttcttccatgactgtagaatccagcaggggccaggagtggtcctccaagcgtggccaaggagtggctcagaggggagagcaaggatgcacaagtggtggggagcaggcatccgagacaccaggccatacctggggcacctcagagtcagtttgcaaggcaccccagtcttcctgctaagctgggtcagcgccttcccccagccgtgctactaccgtcatttgggaagcattgagatactactgccagtgatgaactgaagtgcatgcgcaaggtctagatgcgagagttgtcttcacctttctgcagtgtggggttgctgcttggagagaggagtgcttttaaatccctaactggcccaagcccctggtgcacagagacagggttcctttagttcctgggtgttctgtacaaacagtagacctcgctcatcagcaaaaagaaactcttcctactgtagctgagctcggttcagcaccctgtcctttagccgagacccgaggatgcctgagccacactgctactagagccctgtttgtcccttgccttcagggcctcaagatttccccaagagaggccctccactgcttcaccccctcccttatcctgtggctctatatgctcctccgcaaagatgtgcaacccgaggcgtgcgtacccctttgtccaccagtatctagtggctaaaatccaaccaccctgacttcaatggaagatagatattctagagataatgaaaagtgatatatgtatgaaaaaaacattgaggtatatatgatttttaattgtattagggatgtgtggacccatttaaagttgagattttatttactgtagagagagaaaaatcagaaccattgatcccatgatcttctaagtcaaacccagctcctacatcccttaggtgtttttattattattattattattattattattacaattgttattgttttcattgttattatttggggtttcttgtgttttggttttctttgcaactctccacactaaactcatgatactgtggggagaggccatgactgaaccctacgctgcggtaagatgtagcaggggttgctcccagcagcggccgccgccagggctgcaactggcaataatcactattgatttaaagctttatttagtctcatctgttccttcatagttaataaggtcttgccacattttattagtgagattgagagatgaattatttgtctgttgtcctccccgccttccctcccccaatattaaactgtgaagtttgtgattttgtttaaacgctgggtgaatcatagtgttagtttgcatgtccagctaatttgtttctatacattttgtttgattctctttctcctcagggcttttacaaatatatatatattatatatgtatatatatatggatcttctgaaaaaaattgaggtgcaaattttctcttttttgttgttttttgttttctctttaatggacacaatgctgatattcaatcactacataaaatatctggctgtgaaacaaaccagagaggccccacggggcgttatccaagcagctctgcagaagctccgtgaatcggataccgatttcagacagatcatcctgcgttcgtctctttcctctcttctctttcttcaagaaaaaaaagttgatcctaatgatttcagcccatgcattaaacagaaaacaataataactgtagaattcatatttttctaaagggaacttaaaaactgctgctacatgtatgtacaaaactggtctctgctacatgaacagaatcacaggtttggttttggtacttttgtttctctttgtactcagttgtgtagaacttccaaattcagagtgaaaagaaagctgttctgcatcaaaccatctaagcaataaatgttatatttaaaaaacggcacacgaccaacctgtgagttcctccaagcccatctccaagcctgcagtccactcaaggcaggtcttaggatcaagggctgacccgaaatcagtaacggccttagaatcctgggcacccaggcagcatctttgaaagacagttggggttggagatgtggcccagtcagcaaagtgcctgtcccaacagcatgaggacccgagttcgggttctgagaacccacgctgattgtgcagcagcatgggtgactggggatagggggcctgggggggacagggactgggaggagggggcggcaggcaaaggcaagcagacccctggaactcctggacggctagtccagccagattgtttatcacaggttcactgagagttcaagaaataagacaggaggctggcattgttggctcagtgggtaaaggcacttacatcaaacctgagggcccgagcaatccttaggactgacttaggaggtagaaagagaaaggactctcagacaaaagaacaagtgggaggcaagcacttgcatacataagacgaatgattttttttttaaaaatcagaaaaactttgataaataataaaaaagccaattggctgcagttagatgttcagtcttgggagtgtggacaggggacataagaagctgtggtgaatttcatgaggctagagggacagactgaaggggcagcagcacagacagtcgcttttgtctcttatttagctgcagcttaactggtaatgctggtcctgtgcactagtgactccaaaggagaatgctgggcctgccttccccggggaaggtggaacagatttagttggcctggtggagagcagtgggtttcaacctgggggggtcacaggaccctttcgagccatctgtcattgtgaggagccttgtacccttctcgctggggagtagccctcagaaggtgaccacagaagaaactcgtgggaagttaattatggcaatgctacaaagtcattggccagcctattttcagtgccaggtcacagcatggcaagaggtagggggtccctaagactccttaggctcctctcttggcccccacaactggcttggatgaagtatcagtgaggatcttagaatgtcccacagagctagacagacggctcagtggttaagattctggtgatggccacaaccaagtgactcataagcacggcccccagcctttccagctcggtggaagggagctgtcgatcactgagtgacgtttaaagcacctgtaagcatgactccttgtctggatgaccttggactacagctggcattgtagtttgctttctattgctgggacaaacaccatgagcaaaagcaacctgcgggagcaaagggtttacttcatcttagctcttagtcacggcccatcactgaggaaagtcagggcaggaagtgtaagccataaaggaatgctctttgctggcttgctccccatggcttgctcatcctgctttcttatgtacccaggaccaactgcccagggatggcaccacccacaatggcctggactatctcacatcaatcaataataaagaaaatgttcaggggttggtaagatggctcagtgcgtaagagcactgactgctcttccaaaggtccagagttcaaatcccagcaaccacatggtggctcacaaccacccaaaatgagatctgacaccctcttctggtgtgtctgaagacagctacagtgtacgtatttatagtaataaatatttggccatgcggtggtggcgcacgcctttaatcccagcacttgagaggcagaggcaggcagatttctgagttcgaggccagcctggtctacagagtgtgttccaggacagccagagctacacagagaaaccctgtctcaaaaaacaaaaacaaaacaaaaaaatatttgggctagagcaagcagggactgagcgagcagagctgacaggagtgagcggggttgactggaatgagtggggttgactggagtgagcagaggtcctaaattcaattcccaacaaccacatgaaggttcacaaccatctgtacagctacagtgtactcacatacataaaataaataaatcttaccaaaaaaaaaaaagaaagaaagaaagaaaaaagaaaatgttctaacacgccaggcctagtccacacaaagacctatctcaaaaccaggaaggaaggaaggaaggaaggaaggannnnnnnnnnnnnnnnnnnnnnnnnnnnnnnnnnnnnnnnnnnnnnnnnnnnnnnnnnnnnnnnnnnnnnnnnnnnnnnnnnnnnnnnnnnnnnnnnnnnnnnnnnnnnnnnnnnnnnnnnnnnnnntccttccccagggatccacacttaaagtcacagcaggcactgaccagggcagtaagagatctgcatagaagaaacctgatatctttgcaatattttagttctaacagggaaactgataagaaaagaagtagatgaggaagatacagaagatgtgaggtgggggtgaggggaagaagaagccaggatgggacagggatggtcagccctgaggaagtcacccttgcaaatgcctgggggtggggacagatggcccagaggaaggaccttgagccacaagccagccctgcaggaagctggggagacagctggaatgaacacaatgtagactttatagtagactggagtaggtgggtgggattctggtttcaggttgaccccggggtgacaaagatggccactgggaaactaccaagaggtcacattatgtataccaggctggcctcaaactcagagatctgcctgtctactcctcctgagtgctgggattaaagaagtgtgagccctacctggggcttgagtagtttaagagaagccccaggattgggtgataagccagatgcagtgtgagagtgtagagcagccaaggacagacataatgatctgctagacacatatgaccacccaaagatcctaccttccccttgatggcagttgcccaggacatggatgtctgcacgaaaggagccagttgtgagcaccaagcccagtatagtaatcatctgtgctgatgagccacacttggccctcagcaattctgaagtacagacttgttaatccaatgaccatgatagctcatgcctttaatcccagcactctagaggcaggtggaactgtgtgttcaagaccagcctggtctgaagagcaatcctatcttgggggagcggggggggggggggaattgttaatcccaaatttaaagataaaaacctgacttgaaggaagaactgtgattaatcaatggtaggcccatgcccaaccttgacttggttgctttcaaggctggtgcttgttagtgagcttcctgaggctaacagcttataaggagggnnnnnnnnnnnnnnnnnnnnnnnnnnnnnnnnnnnnnnnnnnnnnnnnnnnnnnnnnnnnnnnnnnnnnnnnnnnnnnnnnnnnnnnnnnnnnnnnnnnnnnnnnnnnnnnnnnnnnntaactcacagcaggaactgaggtagaaatcatggagaaataccactgacttgctccagacttatgttcaactacccttcttatatagcacaggactacctggcttggggtaatactgactgcagcagactgagtcctcccacattaaccaacaatcaagaaaacaccccgtacccgcaggccaatctgatggaaacaagtcctcaactgaggatccctctctttaaacatgtaaagttggcacctgaggttagccatcacagccttgtgtgcctttggacctgtggtaaggccaagcatcgtggcagaggcttctaaaggctcctcctactcactgctagctgcgaggaagcaaggaaagagctgggaagatgtttggctttcccagtctccctttagcgtatacccacaaagacctaacaggtcccaccctttagagatcccacttcctccggaacatactgtaggctcacaaccaagctttcgaagcacgagcctacgagagatatttacccaaagcacagcaagcaatgcccttaacccacaaggtggccatcattagcttctctatgttctgagaacttggacccaatctgaactgtcctgaagcgcccatcagttgcatttcctgtcctttctggaatcagctttaagggacaatcacctcttgccactaatcaagatatagaggcagtgctcaatgatagaacagttacccagcattccccaaataggtgtaaaataatgagttttgtgcatgataaaaatgtatcaaatacattcttccaaccttaaattcctctcctccatgccaagagggtttctctgggtagttctggctgttctggtcttgaactcagagatctgcctgcttctgtctcccaagtgctgggattaaaggcatgcaccaccactgcccagccaaccttgctatttttaagggtacaactcaatggcatcaaatctaccacactgttgtgcacccagcaaagccctattaacactacctccctgtttccctccctttcagagcctcctcccctctgcatcctgtttctatgaagatgactccttgggtaactcacacaagtgaaacagcacggtttaaagacaacatttaccgagagcttgctttgtgggaggtcaggcgagggacctgcctctcgaaatttgtgtccggacagcagggtgtggattaaacattgctgtgtacagggacacaaagcctcaggtcttcctggtgaagacacagccttctgcctgcccctgctggttgaggtggtgtggggggttgatattcatggccaacttggcctggccggatgtagagtcacctaggagacaaagcttggggtatgtctgtgagagaggttctagatcccattgagtgagatgaaccaccccctaactgtggacagcatcgttccatgggctgggtccctgtcccaataaaagagaaaagatcatctctctttgcctcctgactgtggctgcagtgtgacctgctcactgcctcaagcttctgccatgacttctccatctaccatgatggactgtcccttaaggtgtgaacccaaataaacccacccttaacttcttactgtcagtgcaacgagaaaggtgaccaatacaaatgggtggagaaacagcaaacagctggatctatagggacaaacatgtaggtcccagctcggcctcggatgagtggctttgtgccttgggctcttcttcctaagaaggcaagagtagtatctgcctcctgggatcgtcctgtggattataagtgtgtgtgtgtgtgtgtttatatatatagagagagggagaatatccacagctcttgttgacattgctgtggtaaccctgaagggagtgggcaggacttccaggctgtacattcactccacagatattggaggagagcaggaggaggaccttacaggagacgcctgccctgccttccaactcaaggctcctctacctttctcggagatctgcgatcctggcaccttctagttcaaagctccaacatgcccaaaactcttctctggacttgatgcttatcacataatctcactctggaagttgggagagagatacggtcttaccctcatccacaccaccagtcctgcatcagagcctcatccatgggagagctgccctgtgtagatcaacacccaggacaaagccttgtcctggctgattccccagggtgtgactgaggactgatagtggccatattccttatgagctggttagaatgagaaagtcaggcttgcccagatgtgctgattcaatagccctatcttaacaaaaccccgggggattcataagtatattaaaattagtgaggctcaggcctagagcctcaagtttggttcagatatgaatccagcagccagctgaatagagctcttaatagactccatctgtgttagctagtttcccattactgtaacaaaatacccagttttataaagttataagttataagactttataaccaacttacaaagacgaaaggggctggagagacggctcagcagttgggagcagctgttgtgcttgcaatggatcaggttccattcccagcacccgcatggtggctcacaaccatctgtaactctagttccaggggatctgacgccctcttctaaactccgtgggcaccaggcatgcacgtgttgtacagacatacatgcagacaaaaactctgacaaacaaaataaagtaaatacatctaaaacaaggcaaaaatctttaggaagggggagggggagggggagaggagggaaggtagacagagggggactagctaggaatgatatagtaggcctgtaatcccagtgtctgggaggctgaggtgggaaggtctcaaattcaaggccagcctgggcttactgcatagcaagaagctctctcaagctgggcgtggtggcacaagcctttaatcctagcactcgggcggcagaagcaggcagatctctgagttcgaggccagcctggtctacagcgtgagttccaggacagccagggctacacagagaaaccctgtctcaaaaaacaaacaaacaaacaaacaaaataagaagctctctcaacaaaaacaagtggcgtttgcttccgtttatagcttcggaggcttccagccacggtcagtagtctcactgccaactgtaaccgtggaagctgcttatctcacagcaaccaggaagcaacgagatagaaggcagaaccagcctccctagggcctcttgaagggcacagtccaacaatctcacttcctcctactggccctgccccttaaaaataaatccctctatcttccagtagcataatgtgcaaggaactgagtctttacctcagaagctgtggggaggaactccagagccagatgatgtcagcctttggggtggaggagtataaaatcgggagggacaaagactcaagagtgacgctctgagctgcactcgtgcctcagttgctggcagacctagtaggcaatagcttcatcgtgcttgttccaggcttgcattcgttacttgtctgtggctctgataaaacaccatgaccaaggtaaactcgtgggtgaaaaagaaaagttgatttgggctaacgattccagaaggatgcggagttcatcgtggcagaaaggtggaagcactcagcaggcttagcagctgagagctcgcatcctgaaccacaagcttgaagcagagaagcctgcccccaatgacatacttcctccagcgaagtcctacctcctaaacctccccaaactgccaagtgttcaaatgccagcgcctatgggggacattctctgtccatccgctctagggttcctgacgtttgccacgcccagcggctgcctgcccgctcccaaggaggcgggggagggaggggtgagcagggagaaccgctgggtttattttaaacctataattgaaggttgctcgttaacaacaacaaaccagtgctctccaagccaaagctgccaaagtcagtgtcctaaataaggaacacagcagtcgcttctttcaggggaaggaagctggagccaaatagggaagtgacctgcctggctttgactgtgggctgtcctgagtcctgcctgcctctcacaggaattgacaacatggtgagggctggaccccaggctctcagatgagtggggtggggaatgtatagctgctcattagccccgccttcccacaaagacaccacacaactctctcacataaatggtagtcctactatgcatgaaaaagttaggggcgtcagggaaatgggaagggggataaaacaagcaatgaaaactgaatgcagccccggatattgcttccgtggctctaattgtactactggctaggcagagagaggtagcagctctctgtgagttcaggaccagcctggtctacgtagagaattccagaacagttagtgctgtatatagagaccctgtctcaaaaaaaagcaaaaccaaacaaagaaagaagcagcgaaacccaaaggcagttatcttactttccatccagtttgctcaccctgcagagtgcaagtcttaggttgccagtccagtgagctgaggaggaataaaaccctttcctgtcagagcaggggtggaggaaagtgacaggatctgccttgtgagggtgaaactgcctatcgcacacacagcccagcacgtgcacggggtcaggtgtctatgactggaggatgtgtgcccaccaaaaggacagtgactgcataaaacgaggacacatggctccggtcaactctggaggcagatgtggtgtggtgtgccctcctaccccaggtggctggtgaggcccccattctcctgatgcatcacaagtgccatacgacagatgtttttttttaaagctctgcagtgatggctcacacctgctatgtcaagatggaacatcagaagtgtgtctttggagctggtgagatggctcagtggttaagagcactgactgctcttccgaaggtcatgagttcaaatcccagcaaccacagggtggctcacaaccatccataatgagaaacacatttaaaagaccaatgggcccaagggagcaggggtgggggtgggggcagagaatgtttaaaaaaagaaagaaagaaagaaagaaagaaagaaatgtgtctctgccttccacaccctcatccagacattgtaagacaagtccctcggttgcttgttggaaatcccatttcagacctgctgatccaggatttcaggcagccaggttaaacattccaggttctggagcttgggaaagtctaccagccacaattccagaagctggacactgtccaggattttgccctctctccgcagacatctctctgtatcactgggaagatgatcaaggcttctctacaaaatgctatcatagagacagacaggaatgattggttaagaacactagctgctctttcagaagaccagggttcaattcccagcatccacatggtacctcaacaaccaaatgtaagtctagtccaaggggggggggtgtcagagaacctcatctagcatccttatctgacctccaaaggcaccaagcatgcattgacgcacagatacacatgcagggaaatactcatatgctaacagtagttttctgtgaggagcgggtgtggcagcagtgcaagaaggcaccagggactgcagctaagtcttatgacttgcacctgacttcctcatacacctgaaaataagccacgaccatcgtgagagctgcacaggtgcaccatgatgctggttaaacaagtccatatttggtggagacgagcccctgccgccctgattggctgaagctgcgtgcctggtgaggtgacatggcctgccgtgagtggatgagggctgagagtatataagagtgagaggcccgggttaaagagagagataaagttgagagagataaagttgaagcgagagagatgaagacggaagtttgcttaataaactgctgttagaaggactggtggttgtgtcgttcttgctggtcgagaataggtgcgacagttttcattattatctaaacagtatcatgtttgcatggaccttgagcacctcttcccataatttctatgttttcatttatttaatgtgtgtgcacacagaggtcagaggacaacctgtgggagtcaatttcatcaagttgaaatctcagtaggaggcccctctacctgctcggaatacaaagtagcagctgctgtgggaatggttgtttagttacattgtttaaggactaatgacagggaaatcatccactatatcttcacacaatttttttttcaatttttttttctgagacagggtttctctgtatagccctggctgtcctggaactcactctgtagaccaggctggcctcaaactcagaaatccgcctgcctctgcctcctgagtgctgggattaaaggtgtgtgccatcactgcccggctttaatacatgtttttccatccactgctgcttatatctgcagatgtggac

SEQ ID NO: 388 - DNA, 7996 bp, Mus musculus
ctcgttcagccgcggctgctgcggcagctctgtaacacgtccccaggagactcgcaggagcaacacgtgatgtgtctacttatcagggtgagagggggagagcgagtctccgagtgtgcggaaggctcagacctgtcttccatcaacaccatgatgtcagcagtaatgagcgtagcgagtgtcacagagaatggtgggagcccccagggcatcaagtcccccatgaaacctccaggaccaaatcggattggcagaaggaaccaggaaacgaaagaggagaagtcttcctacaactgtcccctatgtgaaaagatttgcaccacccagcaccagctgaccatgcacatccgtcagcacaacacagacacgggaggagctgaccacgcatgcagtatctgtgggaagtcgctgagctcggccagctccctggatcgtcacatgctggtgcactctggcgagaggccttacaagtgtacagtgtgtggccagtctttcaccaccaatgggaacatgcacagacatatgaagattcatgagaaggataccaacagtactacagctgcagcccctccatcccctctgaagcgcaggcggttgtcctccaaaaggaagctgagtcacgatgccgagtcagaagacccaggaccagctaaaaagatggtagaagacgggcagtcaggcgatttggacaagatgagcgatgaaatctttcactgcccagtgtgtttcaaggagtttgtttgcaagtatgaactggagacccacatggagacccactcagataacccactaagatgtgacatttgctgcgtcaccttccgcacacatcgaggactgctgcgccacaatgcacttgtccacaagcagcttcccagagatgccatgggaagaccttttatccagaacaacccttcgattcctgctggcttccatgatttagggtttactgacttctcctgtaggaagtttcctcgaatctctcaggcctggtgtgagacaaacctacggcggtgcatcagcgagcagcaccggtttgtgtgtgacacctgcgacaaggcgttccccatgctgtcgtcactcatcctgcacaggcagagccacatccctgccgatcagggacgggagaagctccagaccaagaccctggctgccgagtccttggaacagaaggccttcctggccttgctgggcctgcagcacaccaaagacgtcaagcctgccccggcggaggagctcctgccggacgacaaccaagcaatacagctccagacacttaagtaccagctacctcaggagcctggctgccccaccgtgctgagtgtgtctcctcttgacgctgcttctttaggtggctctctgacagtcctcccagctaccaaggagaatatgaagcatctgtccctgcagcccttccagaagggcttcatcatccagccagacagtagcattgtggttaagcctatttcaggagagtcggccattgagctggcagatatccaacagattctaaagatggcagcttccgctcctccgcagatcagtcttccgccactttccaaggcccctgccaccccgctgcaggcgattttcaagcacatgcctcctttgaagccaaagcccttggtcacaccccggacagtggtagccgcctccacgcccccacctctcatcaacgcccagcaggcatctcccggttgtatcagccccagccttcctccacagtccctgaagttcctcaaggggtcggtggaggcagtgtccaatgttcatctgcttcagtccaagtctgggatccagccaagcaccaccacacagctcttcctgcagcaagctggagtggagttgccgggccagcccgagatgaagacacagctggaacaagagagtatcattgaggccctgctgcccctcaacatggaggcgaagatcaagcaggagataacagaaggtgacctcaaggccatcatgacaggccccagtggcaagaagacccccgccatgcgcaaggtgctctacccctgccgcttttgcaaccaggtgtttgctttctctggagtcctgcgagcccacgttcgctcccacctgggcatctcaccctaccaatgcaacatctgtgactatattgctgcagacaaagccgccctgatccgtcacatccgcacacacagcggggaacggccttacatctgcaagatctgccactacccattcacggtcaaagccaactgtgagcggcacctgcgcaagaagcacctcaaggccaccaggaaggacattgagaagaacatagagtacgtgagcagccccaccgcagagctggtggacgccttctgcgccccagagaccgtgtgcagactgtgcggggaggatctgaagcactaccgagctctacgcatccacatgcgcacacactgcagccggggcctgggcggctgccacaaaggccggaaacccttcgagtgcaaggaatgcaacgctcccttcgtggccaagcgcaactgcatccatcacatcctcaagcagcacctgcacgtgcccgagaaggacatcgagagctacgtgcttgccaccaacagtggcctcggccccgcggacacgcccacggatgccgcttccagaggagaagagggcagctgtgtcactttcgcggagtgcaagcccctcgccactttcctggagccccaaaatggctttcttcactcgagccccacccagcccctgccttcccacatctctgtcaagctggagccagccagcagctttgccatggacttcaacgaaccccttgacttttcgcagaaaggcctggcactggtccaagtgaagcaggaaaatgtttcctccttgctgacgtcttcctcctcctctgccctctatgactgctccatggagcccattgacctgtccatccccaagagcgtcaagaaaggagacaaggacacagttgttcccagtgacgccaagaaaccggaaccggaagctgggcaagccgagccgctctcaccccgcccaccaccctgccctaccttgtcagtgactgtggagcccaaggggagcctggaaacccccacaggcacggtggtggccgtcaccacagctgccaagctagagccccacactcagcccctccagggctccgtgcagctggctgtccccatctactcccccgcgctcgtcagcaatactcccctcttgggcaattctgctgccctcttgaacaacccagccttgcttcggcccttacggccaaagccccccctcctcttgccaaagccctcgatgacagaggagctgccgccactggcctccatcgcccagatcatttcttccgtgtcctcggcccctactctgctgaaaacgaaggtagctgaccctggaccatcgatcaccagcagtaacactgtggccacagacagcccaggaagctccatccccaaagctgccgccacccccactgacaccacaagctctaaagaatccagtgagccaccccctgcagccagcagccctgaggaagccttgcctactgaacaagggccggctgccacttcctcgtcgaggaagaggggcaggaaaaggggactgagaaaccggcccctccccaacagcagtgctgtggacctggactccagtggggagtttgctagcatcgagaagatgctggccaccacagataccaacaagttcagtccctttctgcagactgcagaggatgacactcaggaagaggtggctggagcccctgccgaccagcatgggcccgctgatgaggagcaaggtagccccgcagaagacaggctgctgagagcaaagcggaactcctatgccaactgcctgcaaaagatcaactgtccccactgtccccgggtcttcccttgggccagctccctgcagcggcacatgcttacacacactggtaagaaggccctcacggctcaccaggcggaccttgctatcaaagaggccaaagcagcagcagctccctctgaggaggaggaagaaaaggagacagaggagaacccagagccagaggaagagtgtcgtgtggaagagagcactggggctgcagatgcccccgaggaagacacagccagcaaccagagcctggatcttgacttcgccaccaagctgatggacttcaagctggcagagagtgaggcaggctctgtggacagccaaggcccagcccagcaggagccaaagcatgcctgcgatacctgtggaaagaacttcaagttcctgggcaccctgagtcgccacaagaaggcacacagctgccaggagccgaaggaggaggaagcagcggcaccttcgctggagaatgagggcgttggcagagcggttgaggggccctcgccttcccctgagcctgaagagaaaccagccgaatccctagcaatcgatccaacaccaggaaccagggaggcctcagtggcgaaacagaatgaagaaacagagggtcccactgatggggaaggtacggctgagaagaggggtgacggtgacaaaagaccaaagacagactcccccaaaagcatggccagtaaggcagacaagaggaagaaggtttgcagtgtatgcaacaagcggttctggtccctgcaggacctcacccggcacatgaggtcacacacaggagaaaggccatacaagtgtcagacctgtgagcgaaccttcaccttaaagcacagcctggttcgacaccagaggatccaccagaaagccaggcacagcaagcaccacgggaaagacagcgacaaggatgagcgggctgaggaggacagtgaggacgagtccacccacagtgctaccaaccctgcctctgagaatgaggccgagtcagctcccagcaccagcaaccacgtagctgtcaccaggagccggaaagagagcttgtccacttctgggaaggaatgtagcccagaggagagagccgcagctgagcaggcagctgagcccagtgcccccaaagagcaggcgtctccaggtgaaacagacccccagagcccggcagccatcgtgcaagacttgctggagctgtgcggcaagaggcctgccccaatcctggcggccaccgacggggcctcacagctcctgggcatggagtgacagcccgccctgtctccatcagctcagagacaaagctagcggagcatcccaaatgtagattttacaaggttttctcagcttccttcagttgtctggagagagaggaaaaagagggcaagagagagacaagcaagcctgtggccaaccagctcgtgccatagccttacccagtacacatgcacccggccccagtacagccggcttcagtgccttaactacttatgggtcctcccatgtcgttgtgggtgtcccccttccaaaaaaaaaagacattttaacaaaacaaatattttaatgaatttttcggaggaccttttcatttaagcattaacattaccttttgtatttgtgtgtttgagcttgtttttgtgagtctgtgatagtactgtttttgttctgtgagctggaagcagaaaaccttccccttggatcctgtagccaataactggaagaaaatgatgtgaatttcatgtacatgacccgagggaagagggtgtgaggctaatttctaagctagacctgtattctctggttcacgtcggggaggagccgcggcctggcctctgtcattagtagatgtggttgacgcagggttcctgtgtggtgtgagccaaagccaggaaagagtctagcttcaacctcgcgagtgtttccaccctctccgtgttagaaatggctagtgttcccattcttaatttacagagaaaagtggcctccccagcaccctagcctacagaggacacggctggaggtcatatagccactttcccttcttcccattcggtatatgttattaatattattattattatttttatttttacttcttcagttcgctgggctctgcattcagcagaaacaaatgggcaatatttgtcctgggtgacctgtactgctccctggtccccccttattgtgtgcctgaagcttctggtggcacgccagtgatggctcttctactgtactcagacaaacctttcttccatgactgtagaatccagcaggggccaggagtggtcctccaagcgtggccaaggagtggctcagaggggagagcaaggatgcacaagtggtggggagcaggcatccgagacaccaggccatacctggggcacctcagagtcagtttgcaaggcaccccagtcttcctgctaagctgggtcagcgccttcccccagccgtgctactaccgtcatttgggaagcattgagatactactgccagtgatgaactgaagtgcatgcgcaaggtctagatgcgagagttgtcttcacctttctgcagtgtggggttgctgcttggagagaggagtgcttttaaatccctaactggcccaagcccctggtgcacagagacagggttcctttagttcctgggtgttctgtacaaacagtagacctcgctcatcagcaaaaagaaactcttcctactgtagctgagctcggttcagcaccctgtcctttagccgagacccgaggatgcctgagccacactgctactagagccctgtttgtcccttgccttcagggcctcaagatttccccaagagaggccctccactgcttcaccccctcccttatcctgtggctctatatgctcctccgcaaagatgtgcaacccgaggcgtgcgtacccctttgtccaccagtatctagtggctaaaatccaaccaccctgacttcaatggaagatagatattctagagataatgaaaagtgatatatgtatgaaaaaaacattgaggtatatatgatttttaattgtattagggatgtgtggacccatttaaagttgagattttatttactgtagagagagaaaaatcagaaccattgatcccatgatcttctaagtcaaacccagctcctacatcccttaggtgtttttattattattattattattattattattacaattgttattgttttcattgttattatttggggtttcttgtgttttggttttctttgcaactctccacactaaactcatgatactgtggggagaggccatgactgaaccctacgctgcggtaagatgtagcaggggttgctcccagcagcggccgccgccagggctgcaactggcaataatcactattgatttaaagctttatttagtctcatctgttccttcatagttaataaggtcttgccacattttattagtgagattgagagatgaattatttgtctgttgtcctccccgccttccctcccccaatattaaactgtgaagtttgtgattttgtttaaacgctgggtgaatcatagtgttagtttgcatgtccagctaatttgtttctatacattttgtttgattctctttctcctcagggcttttacaaatatatatatattatatatgtatatatatatggatcttctgaaaaaaattgaggtgcaaattttctcttttttgttgttttttgttttctctttaatggacacaatgctgatattcaatcactacataaaatatctggctgtgaaacaaaccagagaggccccacggggcgttatccaagcagctctgcagaagctccgtgaatcggataccgatttcagacagatcatcctgcgttcgtctctttcctctcttctctttcttcaagaaaaaaaagttgatcctaatgatttcagcccatgcattaaacagaaaacaataataactgtagaattcatatttttctaaagggaacttaaaaactgctgctacatgtatgtacaaaactggtctctgctacatgaacagaatcacaggtttggttttggtacttttgtttctctttgtactcagttgtgtagaacttccaaattcagagtgaaaagaaagctgttctgcatcaaaccatctaagcaataaatgttatatttaaaaaacg

SEQ ID NO: 389 - protein, 1690 aa, Mus musculus
LVQPRLLRQLCNTSPGDSQEQHVMCLLIRVRGGERVSECAEGSDLSSINTMMSAVMSVASVTENGGSPQGIKSPMKPPGPNRIGRRNQETKEEKSSYNCPLCEKICTTQHQLTMHIRQHNTDTGGADHACSICGKSLSSASSLDRHMLVHSGERPYKCTVCGQSFTTNGNMHRHMKIHEKDTNSTTAAAPPSPLKRRRLSSKRKLSHDAESEDPGPAKKMVEDGQSGDLDKMSDEIFHCPVCFKEFVCKYELETHMHSDNPLRCDICCVTFRTGLLRHNALVHKQLPRDAMGRPFIQNNPSIPAGFHDLGFTDFSCRKFPRISQAWCETNLRRCISEQHRFVCDTCDKAFPMLSSLILHRQSHIPADQGREKLQTKTLAAESLEQKAFLALLGLQHTKDVKPAPAEELLPDDNQAIQLQTLKYQLPQEPGCPTVLSVSPLDAASLGGSLTVLPATKENMKHLSLQPFQKGFIIQPDSSIVVKPISGESAIELADIQQILKMAASAPPQISLPPLSKAPATPLQAIFKHMPPLKPKPLVTPRTVVAASTPPPLINAQQDGCISPSLPPQSLKFLKGSVEAVSNVHLLQSKSGIQPSTTTQLFLQQAGVELPGQPEMKTQLEQESIIEALLPLNMEAKIKQEITEGDLKAIMTGPSGKKTPAMRKVLYPCRFCNQVFAFSGVLRAHVRSHLGISPYQCNICDYIAADKAALIRHIRTHSGERPYICKICHYPFTVKANCERHLRKKHLKATRKDIEKNIEYVSSPTAELVDAFCAPETVCRLCGEDLKHYRALRIHMRTHCSRGLGGCHKGRKPFECKECNAPFVAKRNCIHHILKQHLHVPEKDIESYVLATNSGLGPADTPTDAASRGEEGSCVTFAECKPLATFLEPQNGFLHSSPTQPLPSHVKLEPASSFAMDFNEPLDFSQKGLALVQVKQENVSSLLTSSSSSALYDCSMEPIDLSIPKSVKKGDKDTVVPSDAKKPEPEAGQAEPLSPRPPPCPTLSVTVEPKGSLETPTGTVVAVTTAAKLEPHTQPLQGSVQLAVPIYSPALVSNTPLLGNSAALLNNPALLRPLRPKPPLLLPKPSMTEELPPLASIAQIISSVSSAPTLLKTKVADPGPSITSSNTVATDSPGSSIPKAAATPTDTTSSKESSEPPPAASSPEEALPTEQGPAATSSSRKRGRKRGLRNRPLPNSSAVDLDSSGEFASIEKMLATTDTNKFSPFLQTAEDDTQEEVAGAPADQHGPADEEQGSPAEDRLLRAKRNSYANCLQKINCPHCPRVFPWASSLQRHMLTHTGKKALTAHQADLAIKEAKAAAAPSEEEEEKETEENPEPEEECRVEESTGAADAPEEDTNQSLDLDFATKLMDFKLAESEAGSVDSQGPAQQEPKHACDTCGKNFKFLGTLSRHKKAHSCQEPKEEEAAAPSLENEGVGRAVEGPSPSPEPEEKPAESLAIDPTPGTREASVAKQNEETEGPTDGEGTAEKRGDGDKRPKTDSPKSMASKADKRKKVCSVCNKRFWSLQDLTRHMRSHTGERPYKCQTCERTFTLKHSLVRHQRIHQKARHSKHHGKDSDKDERAEEDSEDESTHSATNPASENEAESAPSTSNHVAVTRSRKESLSTSGKECSPEERAAAEQAAEPSAPKEQDGETDPQSPAAIVQDLLELCGKRPAPILAATDGASQLLGME

SEQ ID NO: 390 - DNA, 90120 bp, Homo sapiens
  misc_feature (1)...(90120): n = A,T,C or G
ggccagagcatggagactcttgaatggcaggttaaagagcctgaccattagtctttttttttttttttggagataaagtctggccctgttgaccaggcttgagtacagtgacgtcatgctagctcagtgcagcttcgcactcctgggctcatgcaatcctcctgcctcagcctcccaagtagctgggactgcaggagggtgctaccatacctgcctaatatttaaatttcttatagagatgtggtctcacttcgttgcccaggctggtctcaaactcctggtcttaagtgatcttcccacttggcctcccaaagtggtgggattagaggcatgagccactgtgcctggcttgctgtagtcttgagaggatgagagtataggagtgttctggagctcagaagatacccaaagaggaggccgacatatatatcttgggtcccaagtttgctgccccccttcacctctgcacttttgtcttgaatgtggcctgtaccaagggatgcatccccccaccccggcttcttttttttctgtatcagagatgggttttgctgtgttgcccaggctggtcttgaactcctaacctcaagtgatcctcctgcctctccgtcccaaagtggtgggattataggcatgagccaccatgcccagctctccccaatctcttaggagtcccttctcacccaggaagagaagatcagagttggacgaagcagctcacggtgccccatggtgtaggggcctgctctaaggctcctgtcttaccaaagcctgtgccagccacgggttgccggtgtgggggggtgggggtgactttcttgggttgccgccctatccaaggcatagcctggaccctaagccaagaaacacatcaacttcctggaactcaaagccgtcatcacagctgtctcagccctcagagcacatgtgaggtggttagaagagatagttttgccccgagctttgcaggcagaacaggcatggccctcgtggaacatttagcctggtttgattctgtccccagcctagccaagactcagcccatccttcaagagatgcctttgctgtttgtcaagctccctcctggctcagaccattttagtgtctgatctcttaactaaaacttgtagcctgtcgtgggttggcctgaactggtcaactaggctcttacatagtatggatcagccatcccaagtatttgagggtgttgtggagactctgcactgtgcccatcctggtcaagtgttgtaaaacccactgttctgtcgtctgtgggaacatttttttcagggcctctaccatcatcctaggcatctaaacttattccacatttcctgggggccttaggacagagtttagatttcacttcaagaaccctcaggaggctggggcggtttggatcaccttaggtcaggagttcgagaccaccctggcaaacatggcgaaaccccgtctctactaaaaatacagaaactagccaggcgtggtggtgcacggctgaggtaggagaatcacttgaacccaggaggcggagattgcagtgagccaagatcgcgtcactgcactccagcctgggcgacagaatgagactctgtctcaaaaacatgaagaaaaaaaaaaaaaagaactctcaggtttttgcctataatcccagcactttgggaggctgaggcgggtggatcacttgaggccaggagttcaagacccacctgggcaacatggcaaaaccctaaaaacccaattttagtctcaactaaaaatgcaaaaattaaagttagccgggtgtggtggcacacacgcctgtaatcccagctacccgggaggcttgaggcacaagaatcgcctgaaccagggaggcagaggttacaggctttcagccttggcgacagaaaaaaaaaaagggaaagaaagaaaaaaaaggaaagaaaccctcgggtttttcagaagctgggatgcagcccttatctttcatctcttcattgctgtctccttagacctggagacctgccccttaatcttctgtttctggctttacatagcattgtcccgtatctcccccggggcttgggggctggcctttccctcctcccacagagggacttccgccctctcttagtcctcctgcctccgttgactttgcgtaaatcttgtgggagtgcaaatccagaaattcagcagcctccaccaacaaccagacccaggctttctgtcacacttcacctacaggagtcatctttagggtgctactagtctttcctttttttttttttttttctgaagcattgttgatggaggtaaggggtgtcttagagtttcttctaataactcttttgtacttttccgctcttcaagctctgtgactccctcaggcctaatagaacccaaaacaaacagcctcgtgaactctggctttatattgcaagacattctcaatattcaaatcatttacacccaagggcaagaggatggaagtttcaaggtcaagtctctcagcctagccctctttctctaaaaccatcctctccttgctgtcctgtgtgcttccaggacgctacccggtggacctttttttaaggtgtctttttaaaatgaagggaaataaaataaaatgaaatgaaggggaggcagcagatctaaattttaatggaagtcttagctacatgctagaaaatcttaattctagacacttgtttagactctgaagtgtgtttatttattgtatttatttatttttttgagacagactctctgtcgtccaggctggagtgcagaggcacaatctcagctcactgcaacctccgccttccgggttcaagtgattctcctgcctcagtctcccaggtagctgggattacaggtgtgcaccatgatgttcagctaatttttgtatttttagtagagatggggttttgccatgttggccaggctggtcacaaactcctgacctcaggtgatccacctgcctcagtgtccctaagtgctgggattatagatgtgagccaccgcgcctggcctatttatttatttatttattttaatttttgttatatctttttattttgaagtgtgtttttattaattatgagtaaaactatggttcatgctatttatttggagatcttggcagtttctagaaaaaaaccaaagggctattcctcttcaggctttgttcctaatgaaatttgttattaattaaaatatgaaaaaagaataactgcttttttttaagcaatatttaatttcaccttagatgggtgaagatagtctgaaaggatgtttgtgcatttctgaaaactccacgggtatttttcataaaatgggcttgattcatagtttacaagagggcaggtcatgtgtcacgcaaaacagggattcttaccctgctgtccctgggtgggtttctagggtccctgaccctcctggtactgaatgaaaatgttgagtatagagtatgtgcattgtttcagtggggtgggatggggggggtataatgtccagtttgagggtctctgcattcccttctgtggcacagggtccgtccctgtgggttagtcctgaggttcatggtgacagctgtgtggcatggatgggcagcttgtctgtagatgctccagaaggggaataaaagtgagaaaatatgccaagcagttgtttctcgcccggtgttgtccgtgtggggtttattttacctctgagttttctcccagttttgtgctcttcacgttagctgagggaggctgtgttgagagccagggaatgtggccacatgctgtagctctgggagatgctgcattccagttttctcccagcacagggctttgaagcccttgacaccccagagcagacttgctcaaacttttgaagggcatgtgtaatttgagatgttttctgcatcttccctacagaaaggaaaaggtctgcatttggtcctatttgacgtgtgttaccaacactttctcctcacacctgcgagaggatgtaatcatctctcctctactttaaggcactgtttagttgtatatttcttattatttattttttgagacaaggtctggctctgttacccaggctggagtgcagtggtgcaatctcagcttactgaaacctctgcctcctgggcttaagccatcctcccacctcagctccagagtagctgggactacaggcgcatgccaccacacccagctgatttttgtgttttttatagagacagggtttcaccatgttgtccaggctggtctcgaactcctgagctaaacgatctgctcagtcttggcctcccaaagtgcggggattacaggcatgagccactgctagttgtatatttcttaatttcttcaactgtcttatttttccccctctgtttctgatagcactaattgctgccttgcttttctcttgttaaactggcagtctgtaggtgtctgctgtgaacatgccattaggatgcacgaagctcccccccggagccagtggtccgagccattctcacatggtgctgcccttgacgttattggaatgtgcctgggggataggggtgttcctgtctgttcaaggcacactcagttccaagctcttacttggatgttaatgggacaactctggatggaatcagcctggctcctggcagcttgcttgtaattgcaggcaagggatgggaaatgttttctagtcctaattggtgactcccggtgatgttgagcagaggaccatttctggtcttaatcctcttttaacatcaccttttcttatttttgtaggttgctccgactgtgtgttccaggagtggtggctctgaggtgtgaccctgcccacgtttgggcccagccaggttcagccccccaataaggagggcagcttgataacacaaagaaaacaggttagtgaaacagttttcactcgcagtgagtcacaataatgttgaacgtcgagtcttcccatgccctcctctcctaccctcccctacctcccgtttaattgtcatgccatttccaggtcctcctgaggctttgttgcaaaatcgtgttgaaattgtaactaggccagacatggtggctcacacctataattccagcactttaggaggctgaggcggacagatcacttgaggccaggcattcaagaccagcctggccaacatggtgaaaccctatctctactaaaaataaaaaaaaattagccaggcgtggtggtgcgtgcctgtaatcccagctactcaggaggctgaggcacgagaatcgcttgaacctgggaggcagaggttgcagtgagctgagatagtgccactgcactacagtgtgggcaatagagtgagactgtctcacaaaaaaaaaaaaaaaaaaaaaaaaggaggaaagaaattgtaactataacttgttagttcttgatctgatgggcctgaaatgtgggatgagaaagggtgccaagggttcgtctcaggaagcaacactttggacatctctctctttttttttttcccttttctctccctccctcccctccaaatccagaccatgtgtgttaaaaactggaacaccaggttcatctgcttggtaatgttgatcatatctatgacttgggaacttcatctggtttcccagtgctgattccagttggaagagattatattagaatatgaccagtgatatttatttttaagagacagggtctcactctgtcgcccaggctggaatgcaatggtgtgatcatagctcactgcagctttgaactcctgggctcctgtgatcctcccactcagcctcccaagtatctgggactacagacacatgctaccatacctggcttcttttttcttttcttttctttttctgtctttcttgtctttcttgatggagtcttgctctgtcacccaggctggagtgtaatggggctatctcagctcactgcaacctctgcctcctgggttcaagcgattctcctatttcagcctcctgagtagctgggattacaggcatgtgccaccacgcccagctaatttttgtagttttaggggagacggggttttgccatgttagccaggctggtctcaaactcctgaccttaggtgatctgcctaccctggcctcccaaagtgctgggattacaggtgtaagccactgtgcccggccccggctgatttttattttgtataggtggggtcttgctgtgtttcctaggcttgtctcaaattcctggcctcaagccatcctcccacctcaggcttccaaagtgctgggattacaggtgtgagccaccacacctggccttattttataataataacatatattattactaatattggagtgatgtcagggagaagaaatgttgcagaagaaagaatgaaaagtctaggattgtaaatatccagaaagaaaaaaatgctttgtgaatagaccataaaaatgttagtaatggtcttttattccccgagattgagtatcagagggtttaggttggttagtttgggctgttgttccaaaattgtccaggatgtggttatagggtagataggaccaactaatactggccagcttgctctggttcgatgatcttgtagaagagcccgcatgttatggtgggttttttctaacgtagaacaatgagctccattgtgccttgcaccagcttcttccccttcttccctgctctgtggtcctgaaggaagaactcaaatagaagacataagaacaaactgaagtacaatcttgtcacagcccaaggggctggttgttggttccttctggaacagattctcagggatgaggccagtgactcttttctttttttcaaacagtgtagctatgagtttcattttattaattacgctttcagattagagatgagtctctatttttttttaattgttatttacttaaaataggaaaaggaagtaaatgtaagtgatcttggtgtcatcagtgggtagtgtcacactttatactttatccccaaggaagaaacatgtttagcaaatatcttcctgtccagacaaaatggcaaacaacaaggcttttctccttttcaagtgggataagcttttgcaattttcagcccttacattggttaactatactgactgttgctaggctttctgtgtttaagacacttaggtagtttgcaagaatgtatctttgataacatgactgaaaagaatttttactggcaatttggctctgtttagtgaatatatttttttcactttgcttattatttccctcctctccacttccttcccttattcaatgatagaattagaattttttttataacttaaaattttacatttagtcttaaaggtgtttaacctgttcccagacttgagcaaactctaactctaccacatttttctttcctttttctacacacatacacacacattttgttgtttgtttgtttttgcttttaaaatttgagatggggtcttgctgttttgcctaggttggacttgaactcctgggctcaagcaatcctaccgcctcggcctctgaagtagctgggagtagccctcttttctaaatgtagtaataggacaaaagcaagatcatcttcaaaactcatagtataaattggtggaaagtttgtaacaattacaggaaagagagatttctagtcagttatgttgtaattctctgtacattaaaattgtgagggagatatacgtatttaaaagaaggaggtgagttcagtattgaaggtatccatttatgaatcaagtatgtaattatgtgattgattacaaaaattctagggactgatgactctctttttagtagtccattaagaaaaaattgtgtgtacacactcatgtatgcactttgtgtctacatgttttttccctatagagaaatcacccaaaataaaccttcaaagacagttaaaaacagaaagtttgaaacacagttttttttttttcttttaattttaaaaaatcttttgtagagatagggtcttgctgtgttgcctaggctggtctcgaactcctgggttcgagttgaccctcccaccttggcctcccaaagtgctgacattaaggttgtgagcaactgtgcccggtgtgaagcacaattcttcataaatttaaagggtctgctagcatggggaaatgtcatggaaagatgaaagtatagatgtttttttggggggtgggggctgtagctttcttctctttatggagaaagatgtggacaaagaggctggatccatagtctcaaattgtatgtttctgcggttagtccttttacctaccagttggaaaaccatttgattcacatcttcaaaatgtctattgacaaggaaggtacattttatctctttacaagacaagtgctttccctaagattcccttttgcccttttggtaagaatttaggctggtactgcaggtttgtagctgctctgggtggtaccatttctcatatgctaggtcatatcccctaaagttggaggaggaagccatgagaaatcatattcttccttgtgttgttcctacacgttctctttacagctgagatgatgagcttgatcttcagctgctgttgtggactcgtagaatttattagcacacattgtgggataataggatcttaatatccaattaccttatggtagggcttcagctgtagaatatcctcctagttaaaatgagggaagcagtagacttcatacctactgactggacctgtagccataatagtctagttgcaaggaacgcacatggcctgaaaaagtaaattgtgacatggccatgggccatagttttccctttggtcattcttttcatgtcgccaggtttcttttaggtctgtcctgagagtgtctaaactcagcctttagtgaatgcctgaactgttttgtctttggtcacttttagataaaggcgtgagacgggtcaagtggagcctgagcatccttgcaagggactgaggcacagtgtgaaagagaatttgatgcatgggtataaatatgagctttagaaagtaaaattttactgcagagtccttttggctgttgggagtgtgcgtaacaggcagtactgtaggggttaagataaggttgagaaacagctgtagaatgtggttttggaagaaagaaaggcagacattgcctctcatttgtgctccttgcattgttgtgaatatagtggtctaagattatagccaataaatgatttcagttttttcttcactaagtgaaaagatgttcactttgggcctttgcttcccttccagtgtcaacgagtactaccaagagaagaagacaagaggtcaacacagactcattttctactccgtgtgaatgatagctacagcaggggaaagtttcatagtctatcagtgggtcagaaaatggaggtaatcagcagtgtggcgggagggttcttctttccctcctagggtacgttacctgctttatacatattttttaagaaacaggctttgatatgtcaatttgaaatttgtttgtaactctgatagcgttggcttcttaaatctcttataaaattcaggctccccatcagaatcactgtattgcagcagtggagttaaatgaaacctgatgtttctcatcactagttttaggtctggaacatttgtgtagtagtgaataagcctaggttcttaggagggtgctgcagggcggcagctttctgggctttgtcattgttggcttggcctttcccactctgcctaacccagattaggaaaggtagagaaacctgcctctcatgagtttgagtcctgttggtagtgcacactcagaaaggaggcaaggttacttcgtccttggtatgccaagacttggtttaaatgaaagcttccatcactctgggcgtgaatgtggcctttaactggagaaagacagcgttggatgtttttgacctgaattacaattagagtagccatggccagcgccccctggcaatgacagaagcctaaacttccccatgatcacatcagcaatttccaattttcagttttatagcagaggcttcttagaagcttaaacccctgtcccaatgacgtcaagttcgcccgctggcttggaaggttcagacctatcttccatcaacaccatgatgtcggcggtcatgagtgtagggaaggtcacagagaatggcgggagcccccaggggatcaagtccccctcgaagcctccaggaccaaatcggattggcagaaggaaccaggtaagtgttcacacctagtggtgacctctggtgggttcaatccatgagaacattgggagatgtttccgagtttcctatgataaaaccttggaagaattgggaataaaacggacatacccagaggccttgatcatttttcaagggcaaaatttttatggcttatgttagtttcctttcatggagaaggttttctttgctgtggtgtcgatgttggtggaagtgcccttatttttggccccaccattggattttaactcaagctttcttcacttgatggccatggcagggaacatcactgatttctgtgatgtggtttgtttcctcattcacacagctggctatttttaagtatcttcagattaggtagcaaataagtattgcctgtgctagggctgccgttcagctttctatccttgaaaaagcacagaatttggcttcagataattccagttaagatgctgtttagtcatcttggattttcattgggcatcagatcagaacagggtaaagtaaataggtggaattgagaagggttaatgctgttacaaaagttgatgtcttctctgttgggaaataaatgaatcttcaatgtaagatgggacatttccttgaaaagttgttgctgtcttggcaacatactgttgaacagaaagaaggaaggtggtggaaggaggcagagagtgaatacttctcatttcaactctggatccatgtaatacgagttgacttcctcgtgtttaaagtttggtttaactaatttaatgagactatactaaatccttggagagaaggtggtcttgcatttgtccaggaaccagcaatggatgagaaagcaaacctgctgggcttttgtaaactaattttctttttttataaataatcctactgtggctgtccttatacagaattctctgagtattaatatgatggttttctataaattcttagaagtagagccttaattaaggctttcgatacaacttgccctacaagaaaagttgtaccagccccaaaccctgccagcagtatgggggaggatgcatttctccacaccttgctgaaggatggggacttggcagagttcagtgatgttttagggttggaacattgattcctttctctctctcttttttcccttttctccttgtgcctctcttcctgtgggtgcctgagaaaatactcagcctgtatgactgtggcctgagtcgagaaggagtgctagctctgagaagaaaaggtttatttccactctcatgtgactatccatctatccatctctccatccatcagcccattggacaatatgtacccagttcctatatccagctagctactgtaccaggtgccaggcatttcgggaagaataagacagacaaggttgtcgtcctcatccttctgctctaccaggaacaagtgaagtgataggaagagcttttcctcaaatagctctgagttgtcccaagtccagcctccagatcagagaccgtggttagggccctggaggatgcccacagcacctcccatgtttgcatgctaactggaggctgcctcttcaggtgtgaggaggcaactgtgcaggtggggcagggctgcctttcatccccctcctttcttctccagggatctggtatgctgagtttgcttttgaaatggaggtcctggccagaggtagcctggtaaatacagttcttaatctaaaaaaacaaaactcagtggggagagagtatggggaagaaggaagcattctccttacctgtggactagacagggagtgctgagagacggagcctggggaaagtcccattggtgtgagcttagagttccaggagagattagccacagccggatgctgacaagggtgccagattgtttcattatggaatggttagttatcacattagctgctaattttatctttcagctcaggaggtgtgctccttccaccagcatggctgcaataactggattcagaattctccattagggtgctgggcgtggtggcatgtctctaatccctgctacttgggaggcagaggtgggaggattgcttgagcccaggggttcaaggccagcccgggcaatattatgagacctccatgtcctataaaaaacaaaaacagaattctccaggagggcctctcttccagtatcacagtgctgtcttttctagtaggttcattttattattattattttttttattattattatgttttaaaatagagacagggtctctatttctcaaccagagcatggttgattcctagtttcataaactatacagctaatgtgtgtaaactgtcttaattgctgtgatatctggctttttttttttttaattataaaaaaaactttttgcagagacgaggtttcactatgttgcccaggctggtctcaaactcctgggctcaagccatcctcccacctcagcctcccaaagtgctgggattacaggtatgagccaccatgcttgacatggttcattttaaaagattacatctgggtctgtagacctcctcccatataacttggattttgtggacctgtatgatggcctgcagcacagcactgccagcctcagagaaggctggggtgtcagttcatgagtcaccccagagtcaacacaagtcagccccaccagccgcacagtgtgcctgctgtctattgcaaggtgaatgcaagatgattttttaaacaaatttgtctccctgtggctggtcacttggaggcctttttttttttttaaaacatgtatttacatcctattgatgtatcaccatcctgttggtaactttaaaaattttgtgtatgtaaaattgcctatctactaatttgacaacaataccccggaggtggaactcatccccaacttttggcctggctgtgagacatccctccttgttatgtcttactttgttgctgttgcttttgtttctccccacacccgtgcccccatgggggtccttggccagctctactccgactgcagttgtagaactgggcagagaaggtatgacaccccctcccccattatacctcagaaagaactagaagtatgataaatgagtacgactgggaatttgttttttccactatctctaggatgttcatgttttgtagaatccatatccttaattctttttgtgtgaaaatgtagagcatacctagttctcagacccaattccatagattagaaaaaagttttggccgggcacggtggctgatgcctgtaatcccagcacttcgggaagctgaggcgggtggatcacctgaggtcgggagtttaagaccagcctggccaacatggcaaaaccccgtctctactaaaaatacaaaaattagccaggtgtggtggcgcacacctgtagtcccacctacttgggaggttgaggcaggagaatcacttgaacccgggaggcggaggttgcagtgagccaagatcgtgccactgtactccagcctgggcaacagagtgagactccatttaaaaaaaaaaagaaaaagttcctattgctcagaatgagacttgtttgtctttgaagaggagtgagagggaaggtggctgtgagctagacatcatcatgccttcattccacccgtctggtttatggcgccatttgcttttatagtcttcagggtgacttttattttcatcatctcccataagcaaccacaagagtgtttcctttccgtgccttggggttaatccttttggtcagactttatatagagcatagtggcttagggcatgggctgtggagcagctggcctgggttttaatgctgtgcctaccacttaatagttctctgacttggggcaggttacttgcctctgtgtaccccagtttccgcatccagaaaatgggatccataataatgcttgtctattagtggttgtgaaaaaaccctgatggttctgtatagagtttagcacatggtaagtgtgcagtaattggtgttatttgcaaggagcagaaactcattcaaatgaatgcaagtaaaaagaggtctattgaaagatgcccgaggataggaaatgacccagagcctagacagagcatccagccctagggacggtgccctccatcccgttgggttaacactgacatcttccacactgctttctcctggcttgggcttgccgaggtgcaagcctccttgggttcagccctacctctccatgaactttcaattcaagtgctcataatcacccaacttagtaacttagccatcctcaaacctgggcacatatcaccatcatctggggagcttgtgagacaaacagatttctggggttctactcccccaaccccagtcccccagtgactccgatgtggcacgtccagaatctggttaaatgcatagaaaccaaccccccaggtgattctgctgatcttcagaaatctctgagcatcccaactccaaattactgggagaggtatccaagcctaggtccagttagttttgggtattgagacaggaacccgtggtcttagggactgtgggggtgaggagtcaatgatgcacacagcctagaactctgcatgaattatttggaaagaggatctgtagcatagggttagtgaacgacattggctttttctgaaaaagacaaaacatactgcttgacctgtgcattctgagggaacataaaaggagccccctcaccaagtagtgagctggttcttttgtcaccttctgtggaagtcttcagtttgggttggcattcctatcaaagttgtcgtgataaggacagcaattttctcagtgtgatgtttttgttgagtatttatgagcagtgttaagcagatgctagcagtgggcaggggcatgcccactgggtgcacagctaggcactgagggcttccctctttgtagggtgggctcttctgatgagaaccttgttatctctcaggtgttcttggagaccctgaaacctgttgcaaaatagcccaggctggacttggggagaaatgtattcctttctagctcttccgtgagtcaatgcttaatttttcaccatcacagattattaagtggtgtctgtgtaattagaatgctagtattgattgagtactgactatgatcccagcactgttctagtgcttggcatgtggtaatttaacctgcatcacagcatggtatggtaggtggtactgtttttcccatctttcaaatgaggaaactgaggcagacagggccgtgacttgcacaagcttatacctgggcaggttctggagcccatgctctcagctacatagacacaagtgcttattacacttattacagaaagaaaaggcacttgttgactgtgagttgaaatttatcttcccttttaatctttctttttaggaaacgaaagaggagaagtcttcctataactgccccctgtgtgagaagatttgcactacccagcaccagctgaccatgcacattcgccaggtagattcccactgttcttttattttattttattttattttattttattttattttattttattttagtcaagtgcagtaatgagaagagggggaagagtagaacaaggagttaaacactcactgtgagcaatcagttgagataactcagtaccttcggaccagcctatttttgatctaaattattcttccttaagcacagggcagggtaattggattttaatggatgagctgtagctgtgcctaatttaaatttagttttttaaataattttgggaggtggttatgaaatgacttttgtatatgcatattcctgtgacaaagtcttaggtcaacacagaattcctttttggctgggtgcagtggctcatgcctgtaaccacaacactttgggaggccaagataggcggatcacttgagatcaggatttggagaccagcctggccaacatggtccagaccagcctggccaacccatctctaccaaaaatgcaaaaattagccaggcatggtggcatgcacctgtaatcccagttacttgggaggctgagacaggagaatcacttgaacccgggagcagaggttgcagtgacccaagattgcgccactgcactgcagcctgggtgacagaccgggactctgtctcaaaataaataaatctcaaaataaataaannnnnnnnnnnnnnnnnnnnaatcgctcccccccacacgtgtgtgtgtgtgtgtgtgtgtgtgtgcgcgcgcgcacgtgtgtgacggagtctcgttctgtcgcccaggctggagtacagtggtgcgatctcagctcactgcaacctctgcctcctgagttcacgtgattctcctgccttagcttcccaagtagctgggattacaggcgcccgccaccacgcccagccaatttttttatatttttagtagagacggggtttcagcacgtttatattagtataaacgtacataacacagaaggaaatctactcagcttggggtctttttttgcttttctcctttattatgagatttacccttcttctcctgctgtggccaattcatgacaaaatattgatgagtgtagaacagtgaaggattgatgacctagtaaaatcatgacatagtactgaattaacatcaagttactaaagtaactcgggtttgaatagaaatgttcctttttaccgtctttcagaggccaaaactctaccctgtgcaggtttcagttctctttctctgacggcaggcctgagtcatcaaatctgaagaagggacgttgactcctttaatggaaggacatatttccttcactgttgagtgtccttcggcttgtaggagttaatatatgtggtcactgaatctgtatgtggttcaaagcaagacctgggaaggctctacttctttctgagcctttcagtagaagtagttttcaaaacaatgtgggaatggaggaatatcatacaaaatatttatttgcctgttttcctgatacattttaccccttcagaaagatatttaaaatgaaagagaaacacatagccaagaaagttgattggtttttttaataaagctctggatctgcatttcctaagagctgagcttctgatgcactttcttaagtgaccgctgtgaccattgctttctgcagcacaacacagacactggaggagccgaccactcatgcagcatctgcggaaagtcactgagctcggccagctccctcgatcgccacatgctggtgcactctggcgagaggccttacaagtgcactgtgtgtggccagtcatttaccaccaatgggaacatgcacaggtgggtgagggcgccctttgcttggggggttggctggtacttggaggttggcaggcaggacagtggcctctgagccttcagaagacttgcctaaaggtacagagagttctggagctctgtccattgtatggaaaaaccagagatgcacactatctctggggtattagaggtgaagtgccttggcaaggtctgtggcccttcagagttcctcaggatgaaacacagagtcatttcccctctgccaattggagttggttgtttgtttgggtgctagaagtgggcagattatcacatgtaagagaggaactctccatgagtagcatccacgtaaccctgccatttaaaaaatatttgcatatgcctaccagattcctgacagaccttttcattgcaaataaaaacaaaaagtctgggaccttttaataaatagttaagtggactggtcctggagcttcaggataagataggataaaattaagaaaaagaaaatctgataaacatcaggacattaattcctgagagagaaagatgctcactcaagtgggagacagtagagtggtagacatattaaaattgtttggggtgaacctatggaaaatagagtttataggctgatcatacatgttttgaggggtttacttttccatattcctgtccagtccttattctgctttcttttaaaaaagttgagtcacatttgttacatgtttatttcaaaagaaaactttatataactactataaaattgatatgctagttatatttggttatataaacactaaaatgagttggaccagtttattacacgtacacatgggacatactgatacagcggttaagtttcttgatttgggaactaggcacctgaattcaagtctcaactgctacttgtaaattttctatcctcaagcaagttacttaacctctttgtactccagtttctcatctttaaaatgagattttttttgttttattattttctttcatgctattttgaccccccaaaacgagatttttaatcgtacctacatcactggataaggctgaggattcggtgctaattagtttagcacacagttcctggcacaaactaagcactcagtgtttattattatttgcgtttctaagtaatgctgcagtaatttaaagccagtgtatatctcagtctaaactcttagaagtgaggtatagtatgacttcatgaaaagtgaatattttaagaatttacaaagtgttttgctttttattttctcataaatttcagtcctgatgggttattctctttgcccctcatctcttcctgggactgtttttgggtacaaaggaattgaatagtgttactattttacaatacaatattttgcattttagctttttatttttttaccaccatgttggcctgttggtatcctttatttttgccttctgtttaggtctgctcgttctacaccccacacccccaaaaagtcctttgtcctttacatatttgcccttctcagaatctggtcctagaggtattgcctgttcccctcttgggggttccatcactttttcctgctgagcctctgctcagtggaactccccatgggccagctccaagttggcaggggcaagtgggcacattggtaaagaggcccctcctagtggcgttttggccctaaccactgaccactgtgatcctccatgagacatctcttgatggtaggcccaatcactcctgattcagacattttctattttgagacatgattgaaataaacacagctataaaaggcgtagttattgtcttctacaataacctgtgtggcagtgtgtttttacaaataatcattgctgaaactgtggtgctctgggtgtcatatctgtattacgtgaacacatgtctgtattcacttttcattttttttttttacatcttacggtataattcatacatcatacattataccgtgtaaagtgtgcacttcagtgggcttcaggttcttttttattgttaaataatagttcattgtagaaatatgatacattttacttatcccttgatcagctgatggacatgtgggttgtttcaactttttggttattacgaacaaagctgctgttgacattgttgtacgacattttgtgtgggcctgtgtttttatttttcttggtagacacttaggaatggaattgctgggtcatatggtaaatccatgtttaagtcgaggaattgccaaactgttgttaaaactttcaatttgggggtattgccatcataacaatactaactcgatctatgaacatgggatgttttcccatttgttaagtcgtcctgaatttctttcaacgtctcatagttttcagagtacaagttttatatcggttaaatttatttctaagtattttattatttttggcactattataagtagagttttctaatttaatttttcagttgttcatggctagttaaaatttatatattgattttgttccctccaaccttacctcatttattcattctagtagttacttagtggattccttatcctatatcatgtctgttattcattttctcgcctacttgccctggctagaacctgcaaaacaatgtcaaatagaagtgaagagaatgaacattctttttttgtttgtgatcttaaggagaaggcattcagtctttccccattaaatatgatgttagttgtgggttttttaaataaatgttccttaccagtttgagaaagtttctttcttttcctagttttttgagtgtttttattatgaaaaggtattggattttgtcagatgatttttttttttttttttttttttttttgcatctatggttgggttgtttttgtcctttattcttttgttgttgttgttgttcgtttgttttttttgagatagagtctcattctttcacccaggtcagagtgcagtggcgtgatctcggctcacggcaacctgcgcctcccggtttcaagtgattctcctgcctcagcctcccaggtagctgggactacaggcgtgcaccaccactcctggctaatttttgtattgttagtagagatggggttttgctatgttggccaggctggtcttgaactgccgacctcaagtaatccttctgcctcagcctcccaaagtgctgggattacaggtgagagccaccgcgcctcaccccagattttgtttcttcttgagtcagtttcaacaatttgtgtctttctaggaattttggatatttcatcaagtgatataattggttggcatacaataactcataatatccttttgtaatcctttttattctgtagttagtaataatttcctttctttcactcctaactataataatttgaatcttcttttcttcccttagtcaatctagctaaacatttgtaaattttattgatcttttcaaataaccaacttttggtttcattgatttccctctattctgttctctgtttcattaaattactgttctaaacattattattatccgttttctgctttctttaggtttagtttgacctttttccggtgttatagcaaagtataaggctggattattgacttgagaactttttaaatacaggcttttatagctatccattttcgtataagcattgctttagttgtttcccataagtttttgtatgttgtgttttctttttcattcatctcagcatattttctaatttcccttgtgagttcttctttgacccattggttatttagaaatgtggtcttcagttttcacaaatttgtgacttctcaaatttcttattaatttctagtttcattccattatggtcggggaaattcattctattaatttgttactgatttctagtttcgttccattatagttggagaacatactttgcatgatttcaaactttgtgaatgtactgagacttgttttatcacctaacatatggtttatcctggagagtgttccatctgtttgagaagaatgtgtattctgctgttgttgggtggagtgttctgtagatttgctgttgggtctagtaggtttatagcattgttcaagtcttccatttccttattgatctccatttatttttatgtactctgccttgtaaggattgtataattattatcccattttgcaaatgaggaaaggactaaagtaatagacagtgctaagatttgaataaaggatatctggcttcagaggccatgcttttaactaccacagattgagtaccccatatccaaaatgcttgggaccagaagtgtttgggattttgatttgttgtttttttgttttgttttgtttttttggaatatttgcacatacataatgaggtatcttgaggatgggacacagatgcaggtctacacacaaaatttatatatgtttcatatacaccttatacacatagcctgaacataattgtatgcaatatttttgataactttgtgcatgaaacaaaattttgactgggacccatcacatgaagtaaggtgtggaattttcacttgtggcatcatgtcagcactcaaaaagttttgaatattgaaacatttcagatttcagattttctgattgggacgcacagactgtatgtgagaaataattgatgtagcttttgtgtcactttgcatattagaaaaaaagcactctttcactcttttcctcattctcaacacaattctgtgctgttatagaacgttattttcaatgttaaactatttctgtcatcccagtagcatattctatgtatagtgagcatgggatagttttgggggcagccattttgactgaattttattactctgtgttgtttgggtttacttggatagtcttagaaattattttgaattttttatagcatagcccttggtactattctaagatacatttctcatttatggtcattgtattttggagttgtttataaatatttttttaaaagcaggcattggccgggtacagtggatcacacctgtaatctcagcactttgggaggttgaggcaggcccatcacttgaggccaggagtttgagaccagcctggccaacataacaatatcatgtctctactaaaaatacaaaaaattagccgggtgtggtgatgtgtgcctgtagtcccagctcctcaggaggctgaggcacaagaatcgcttgaacccaggaggtggaagttgcagtgagccgagatcttgccactgcactccagcgtggggaacagaagaaaagcaggccttggtgctacttgtttgtgctaattgttggttttctggtactgattttccttattttgaggcaccttgaatcagaggagaggactaaattggggctaagttctaatcttagttctgcagaactttgtggaaatctcttaaatttttgacactttaacagaatggcttagtattacctcatattgaacttgggctcagatttaataatgtttgtaaaagggttctgaaggtttacagtgtactatggacatgccctaggtagagggagtttctgagtctgtattgttagagctgaaaccaccgtaatgacaatctaaggaagtgttccactactagctgtgtgatcccagacaagttacctgacacctctgtgtcctaattacttcatctgtaaaaggtagtattatccgtacctaccgcatgggaatgttgtgatgatcagtaaatactacatgcaaagcacttggggtagtgcttgttaaatggtacatatcagtaatggttactactcttttattgttgtatgtgccagagagggaaaatatattgagtaaacattcatataatgccagaaaataaattgagtaaattgagagtgatttcttttaagtgtgcttgttttactttttgctacacttaatctgtaatttaagtaataatatatttgaaatactagggattatcatactacatttattatgtctttgcagaaagttgcaaataatgagttaaaagaacatttgggttttggtaaatcacataaaagtcattaccatttcatttgttagcgaaactgtacttttgaaaaaaattataaaaatgtgagaacacttacaaaaatgtgccagagagaatggagttagatttatttgccccggtggatctgttccagaatctgagactctagtagtgagctgtgatctctcccaagcacatacctgtgggcctgtgttacgttaatcaggggccagaactgccctgggatgtgtgtgcaggaattaaaaagagtaatgcaacccaggtcctgagaagtatgaaaggaaatcagtcgatctgtgagagtttagtgcttaagatcaaagttctttttcttgtttcccttccgctaccactgcttcccaaggtctgttggcacctgctgggattgggtagtgcacaggaattccctcatggggtctccagagccgatgctaagctgagggatcagagaacctctgcctcagcttcccaggacacccacacccaggtgcctccgttccatcttgtttgtaacccgtttgaggccctccctcaactgtgccagtttcatctgacatggccctgtgctctgatttttgactcttcccctgaggggcacagattgggtgggccctctgctgcggcatgattctctgtagcgtggatttctggagtttcatttctctgaaggcttgattccacaaggctggtctgtgctctgctcctcaacagcacagttgacaactacacagcttacccttccccctcctcctgctcaccccctgctctgaaggctgtccacacgcacacgtgggatgcacacctccgtgtgtgtgcacactcttccagatgagcccagccctccggtgttgcctgcttgaggcagatctgggctccaccccaaagttcgttgttttttggttttttttttcgttttttttttttgtttttttttttttttgctgaaacactcggcctcacaacacagactctgaggactacatcctttcaagtttcaagttactcttagctgatattgaggtgcctttatagagcaactcactctatttcctttggcctgtggtcattttatgagtatttgttagttatctgtatttgtaatgctactcagtctttttgtagagtttcctttatcttagttttataagaggacactcagaattgttatattggtcaaataaagtaaacttcacagaatgaaggtagcatattaaattatgtgtagtcattgacagttgctttgtagcactgataaagcctataacttactatacttttttctagtaaataaatttacttgatcttttaaaagtaattatattttggcaagtagggagatgagagtgatgctaattccaacttattttgagaaaggttaggataaagacctttttaatttattacttatattattttaatttattttgagaaaggttagggtaaagacctttttaatttattactatatctggtacagctttgtgagctgccacttgcctgtatgcagattctcatgtgtttgaggtttgaaaatcctttgtcccaagcctttctaaccacagctcagttgctgagcagaagagtaggttaccatcaagtacaaaacatgtagcacggaaacatcactgtggatccagcttttaacttcccagaactctttatcagttgctcccacgttgaaaatttggattgagtggtgctcgtcttccaaaacaaacttgggaaactgagccagagcacgcctctgggagagctcaatgtaggaaaaagggcattgagctttgcagtttgcaaagcttgttccaggaagtgctgagctgcaaagctgtgaagaaatgatacttgaaacagaggatagaaatgtgcctcatttggaataaagcctgtctctaaaactggtattttccttttaaaattgccttgggaaaataggaaattaattttcactttgctccttattttacagactgtagacttttaattctaaagagttgtggagcatgtcttacatttaagggcatgcttaagaccctggcaggggcaagctttcatgactaacttcactgattctttgaagagtagggatgtgttctgatttcagctgtcattagaatggtgaagatgggccagtactttgggaggccaaggtgagtggatcacttgaggacaggagtttgagaacagcctggccaacatggcaaaaccccatctctactaaaaaaacaaaaattagccagattacccataatcccagctactcaggaagttgagttcacttgaactcatgaggcggaggctgcagtgagctgagatcacgccgctgcactccagcctgggcaacaaagcaagactttgcctcaaaaagaagggtgaagatgaagaagggaaatccttggaacatcatctagttgtttcgttgcaggcttttttcctgcagccataggcacgattttttctgttgccaagtatgggagacataggccctgaggatgcccctggacatcaggataggcttcaggaagaggcttatatgttcctattatgcttgaagaaaatattagctgcgcagaaatgtgacctgctccatgacaaatgagaccacgaaggctctgaatttagcatgctactctaagatgcttaggctaagccagcccttggcgcacaactgcagttgggtatctggaacaggtggccagtattaaatgagacaaggagcagaggtagcacagtgtctctgaaagcaggggacagtcacttctttaccctcagttccccgcaagaggaagggtcctgtgaacttccatcatggtcgtatcaagtttctgaggacaccctgtatgtagctcgttctggcgcttgctgcttctgaagggtggaggtgaccactcaaaggttcagtcagtcccatcttaaaattaatgtcataatcaccaggtccctgtccctcttgacatattcttctgcaggaaggaaagtatcaggacagttcacatgggaataaattatatatttatttgtaggataaaaatctgtgggtcaccctgccccggactgtgtgaatgttttgtttcccttgaaatacttctatggaaaagaaaatcttaaaagcatttcagttgtctacatccaagggggaaggacaaatcaaaagcaaatgtccttcagggatgctcagagatcttaacacatttaactccacttagaaggacataaatgttctgtgcaaagactgttgaggggttcgtgtaaatgtgattttaatgggatatacgtagtcagcatagttgtatgaactgtatatatctccttatatatgttgggcgtttagtgaatatttggtactgtagtttcattatgataatacttgggtatcaaagcagttttcagcatatgttagtactctgaacactaaaatagacatacttctggtataatttagaaagcttttctttaagaagggctgaaacttctcttttcaaccagattaaaaaaaaatatgtaagtgtaatatcccattccatgatcattccacttaatatgcttttcactcttgagagtgcaccttggtaagaggcccataatcttccctccagagtggagattttccactagataagacatggagaaaaagagcggatatttacaaatctgtttattgcagcagaatgtctgggctaccagttccccccagtagcattattaagctttcaccacataagcttattgattgattaaacaaatttagcctttctttacatctcgttggctggatttgaaacctgggtgcttttgtttttacttcagtagtggtttaaagaagggcgacattttctttggtgcttctgagtcctctgatagctccgcctaacttttctggccagggctgataaaggatactccctggaatggtcaagagcctcaatttcttcatctttagtgggggtaacgtttactcacaaaatccgttagaaggattaaatgctgtaacatatactcaagcctctggctcacgttaggtgctcaacaaattgtagttcaaggccttcctttctcctctcccttaagatatttaacccagcagttccttatacatactagttcagcagatggatttactaaagtgagaaaatagactcccagcttcttaacaattggggcaacgtagactgcattctaagaacccaagaacctggtaacagtgctgtgtatcatgtgctgaatttccatggccaagttgtgcaaatccttattatttgaacacttgcctttttttcttcttttttgattgcttgttctatgatgtttacatatatatgtgtgtgtgcttgggttttgtgtgtgtgtgtgatttttttgttttgttttgttttgttttgagacggggtctcactctgtctcccagggtggagtgcagtggtgccatcatagctcactgcaacctcaacctcccaggctcaagcgatcctcccaccttaccctcccgagtagctgggactacaggcacactccaccatgcctggcctatttttatactttcttagtgtggatttgcattaatactattagatgagattctgtggttctttccagaatttttactttgcattttagaaatctgtgaataatcgaaagctgccactatcctctgagaaaaagggtaggcaagtgtgatctgtcactgaattttattcttcaaattagataaaaagtgtaagaaaattatcaaagctaaaagttggccaattttaattgacagtctcttgtgtagcctgttttttatttgctagacttgaccttcctcaaaacatttttcccttttactttgtgtttttttcttttctaataccctttaacaatcagcacagcttattttatatatatgtgtgtgtgtatatatgtatgtatgtgtgtgtatatatatatatgtatgtgtgtatatgtgtgtgtgtgtgtgtgtgtgtgtgtgtgtgtgtatttttttttttttttcttttttgagatgaggtttcactcttgtcgcccaggctggagcgcaatggcacaatctctgcctcctgggttcaagcaattctcctgcttcagcctcccgagtagctgggataacaggcatgcgccaccatacccagctaattttgtatttttagtagagatggggtttcaccatgttggccaggcgggtctcaaactcctgacctcaggtgatccgaccacctcagcctcccaaagtgctgggattacaggcgtgagccaccatgcctggcctattttatatttttgaagaaatatttgaaaaacctcttgtggccgatgcttacttttgatttagaatttctctctgaattgaattgaccaagttcatgttcagttatgccaaagagcataacaatcataaaactgtccaagtggacactgtcccctcagtggacatgttaagcaacaatcaagcctttttcgtcctatcactggttctcaaatttatgatctggttcataattagttttttatcatttggccaactggatgctaatatttataacttaagttttcttctgttttagcagagttgttgtcagtttgtgttttggaaaggaaatgcaaaataaattttatctttaatgcaagcagtacagtatttttgacatatcttgttgaggtatttcagcagctcagtcttaccgggtaaaactggtggatggcagcagaatctggaacatcgtgcttgcccacacttgaacagcaggcagtggtgagagtgagaaattaggttagggaaggttagggatgggcttgctgggggtaggatgactagcagagagctggcctctgctccggaatgcaacatgcccaggtgtcctctcccaccatgcccctcgtctgatgcactgagaactttgaacaggtcctgagtgtgtgtccggtttagtttcataactcgaaagtagcaaagtcaagagggagcctgacttccagcattagatcacaaaatgaaacctgcagggagctggcagcatttccaccgtagcacttcacagggctttataccttacatttttccgcctttgtttaaatatccaacctgtccgacctgttcgggctgaacaagctggtgctagcaaacaccgaagcgtgcccactcactgtcaacctttttctgatgtgttaaggaaggtgattagtggcaacattgtcccccccccccaacccccatcccaccctccccactgaaacatgaacaggaagcactgaagtcttagcctgtgtattcatgacacggatcctcatctcacctttggcatgtctgtgtgcctgtgggccatcctcagcttctcttggggctctgggatgcttagtggaaaggttgttggccttcagtggagacagattttgtatttccttaaaccggagattcagttgcataatgggttcattggtcctgtggtgtcagcacttaattcttccttttcatgcttatataacccagcttgctcaagaggactgctgttccaagtttatgggtgggaaaactgaggtctgccatgctgcaggttcttctggggccctcctctccagtttctgttggtagatggtgtactgttcctccctcgacatctctggagaacagaggccatgtgtgcaccatgtccatccgttttagataaaagtggctatagacggccttggtcatacagaagggctctgtcgcctggttggtcttgggaggtgacatttctctttggattcatttatattcattctctctccaatcttggttcccctttccttgccagcagtttctcagtggcccgtaagtaatataacacaacatccccagagtgggtggctttcctttttcactacgctgcttcttgcactcgcccacggcaccttccacttcccttgtgggcgcatggccgaccatctgggatggccccacccgtgcatttcttgttcctcttttggaactggctgaggagtagcagtgacttagcactgccctatcatgaagatagtcatctcttcctcctgcacagaaagtgagtaagtaactaggtcctgccttcttgaagacacctcaagtgatcgcctttcaagctgaagtgggaaatggcccgtgacttcagcacttccctcctcctacagagcttaggtgtggggattggggtgtatgattttagtcgttgccctgggaagctggtctctggtggccggcgatggcttccctcagaggggacagctctgggctcttgagatcactttgggaatgatgacttcagttggggcaccatcacctcagactgtaatatggggatattcagcatccctgctgggagaggccagccatgagtgtggggatttggaccccaggctgcatgtaaatgttgaggaaactgagggaggttagcctggggaagaagaagaggccatggcaacacagcagctgccctgaggtatctaaggcctgtccgtgggaaatgagagccttccactgatgtctctggactcacccaggaaggtcctagctggccgattatagctctatgttaatgagagttctctttgggtgagaggaacatcaattcatccaacttctgaggtcttttgtttgtttttaagaatgtctgactttgtatggacatattactatgtatttttgtggattttgtaaatagatatggggaccaaataacatgaaaatttattttagcaaaacacaagcaggcaagggaaaaagacaagcacaggaggatgtagggtgttactgattcaagggtagggcagttaggaatcatgtctagagtaaaagatttttaaaaggttagtgctggttcatgtggactgccaacacctctctaccccctactggatctgaaagtcaggagaggaggaaggagctgtagaagcagcagagaagggccctcagttttctaagtagacagtcattagcaagagaatgtcatccctcaacccttggcccaggagtttgaggctgcactgagctaggattgcaccactgcactctagcctgggtggtgcagcaagattctatttccaaaaagaaaagaatacatatccttcaggcattataattctagctcaatgcatcattaaggaagtatctgtaccaagaatgcagaagggtctttacccaggaccaagatagaaaaggaactgctctctccaaatactgccaaggaacctgaggtaggagagcagagatggtggtccagcctggagaaccatgaccccatgcctgggtttggagagaagctctgggctgatgagccgtggagattgagagtccaccaaagcgtttgcttataaggaacatgaaaatgaacccctggtactcctggacttcaaattaagattccttaacttctgataaaatttaactatccttatactggctcccttggaataccatgctacagtcaacagatgagagacgttctctattctggggacgtattgccctagtattgcagggaaagtgggggcttgtagaagacatccatgctgtggagcatgtggtctttatagacacctcccagaatggaggcagtaggaataaacgtcagtatcagccgcaaagcttgactttgtcatggcctctgtgggccatattgcccacatcagagactgtgggatctaactggccagtggtggtggctgcagtgtccggtgcatttcaccaggagcatcctgcgagccctgggagctgcctggctgacggcattcccacagcgagcctacagactgtgggtttacacttcatgccaggctgactttagatttttctaagggctggctttggaggtcagcacaggtgcttacgcattgtctaaccttcctccacaccctgggagagctggtgtgacctgccttccggacaagcatgactgaacccatacaacacctgaattactagaaggtgcctctgtactttacaggtggggccacaccaggaattgctcagttgccgccttgctgtcctccccccgccccctccctctctgtgtctgctctccatcccccatttgtttgcatagaacttgattggcattacaagcatcatccacagccctccacactgaactcctaggcatttgttaggaaaacatacacacatctttctagaatcatactttggccagaaatgtaggttgtgcagctgtgggggttcttaatcttattcgttccctctttgtttatcacaaagctttgttggacaaaaaaaagcgagcaccaggtacggatggggatgtctctataaccaggctgctagaccctgtttgaacctgttgcctccagcttggcaggtcctgggccgtgctgtgtgtgctttgtatacagtgtcctgtgtcctgacggagtgactttccttacggtaccattcactcagagtatcaaagaagttggctccttcattaacagtcctaggaggaaattgagactgaaaagttagcaaatactggaagtgtctagatttctcctgaggtttaaccttcacatgcaaattacatacggggagcttgaagaatgtctgagacctgctctgagggcagctatgactaagtaatctttggtttggatcacatttaaacttgttgagagtttcccaaaggattttgcccccaaaagaattttaagaatgttaaatttcccaactttttggttaagcatttatgcctggtaaactgatggagagactgctggtatattggaagatgagtctgggagatgtttaatgctggtatccaaaaaatgtcagtgtcctggtcaaatggttgaccgaacctgcaaacggtgcagagagctggagaagttcactgtgatcccatggttctcacacttaagcaggcttcagtatcacctgcagggcttgtgcaagccagactgctgggccccgacccagcgctaccagtctgcaggcctgggatgggactcgggggtttttatttgcatgaagctcccaggtggtgcccatgctgctggtcagaagcctacagagtgaacactggtgttctaggagactgacaggattgtccccattttaccagtgtggaaactgaagctgaggtagcccaagattctctggagtctccgtaattactaggtggcagaacagagatcacacgtctcaaatgtgtcactgctcagagaccacccaaaagcttcattgcatcacatggtctctgtctacaccatctttccacccagattcctgattgctgctcagagcaagccagtgcttggatagctaagagctttaccccattcccaaatctaatgacttccatgcctaaggaaggtccgcagaaagttcctgtatttggaactggaaaggagaacattcagggaggcagggagggagggtcagcttttagggattggtctgtctccctggagttattgaccagccttcagcccttgcacagggtgtactctttggtttaactctgatgttttcaatattcttacagacaacctaccctgctaaaatggaccatctcaaattttagaaagcaaatgattacacttgtgggagaaaagccatttaagttgaaaatcagcatctactcctagattcaaagtaggctccagttgtgccaaaaagtgctcagatttgggggttttttccacgtttaaaaaacatctgctatatttgtgttcgttcatcactgtaaaagcctctttgggtgttatgaataggataaaacttctcttgactccaaaagttctgataaaattccttcctaagaccacagtgcggtaggattcctactgttaaagtgtcatgcttccaaaagaaaattacagaattttatggaaaggcagaactatacttggattttatattaacctctctctacaatgagtgtaggtattgttttgaatgaacaaacatatgaattccaatacgaaaacattaacacatgtcctcagtgttcattgttggagtgttttcgattgaagtcccttcagtgtggcactgttcataatctcgtgtcatgtttgctcacaccaaattctagcaaggcaagttataagatgtcctggaacctgagcgtgtatgtcatagtaatactctgagtgaagcaaacattttctacatatacttcattccttccttccttcatttgtccattcaggaattcaacaaatatttatttgtttgttcttccatccagcaatttagcagatacttactgaccaacacctatgtgccaccagggctcgtgcagagaacaacatagaccaggttcttgctgtaatggaacttactttcaactgagggtgaggggacagtcagacgagtaaaatacatgatatcttcagctactgctgtgtgctgtggaggaaggaacactgaattgtgggtgtaagagcatctgcacaagtagggtgtggggcctcagggaaggctttgcaggtgaggcgcgtggcacgaaacctggacggcaggagccaggcttgggaaggtctggggtgcagttttccaggcaggagcagcaagcatcttgagtcccagaggcgggaactagttggatgcatttgagggacccacaggggctagtctgtctgaaagagctttgggatggaagagggcagggtgctccactattgaagtctagcagataggtggaagccagatttattttaattctaagaatgggactgtcagaggaatttaagcaggggagtggtatgattggtcctgtgttttagatgctcagtctggctgctggatagaaaatggaaaataagagagcaagaggaagagcagaggggccagcttaagatactaagaccagctggtaggaattcctgccattgctagtgtttgtgcaatgtatccattgaaacatgaatccttatatatggatctttgcacatttgttcagttattagaccttaagacagatttctaggagtagaattactgaggcaaagagcatacatatttaaaattcatatctctagtgctcagccactttgcagaaaggcagtcactcatttctactctcaccaacgatgggagagtaccagtcttctgaaccacaccaacaccgcatattgttaatgtaagactttctcaccctcgccagtctggaaggtgaaaagatgcactgctcaggtgcagaatggaggagatgtggtttgatagcagtaaatgaaggaatcgtggggattgtgattgacaacaaacttggtaggaactgagggtataaacacacccaatggaacccacccaggctccctttatgtaccttctggaggtcatagtgccagccatgtgccctgagctgtcagatcacatccagactggagtttgcatctggatccagcatttcatgaaggatacctgtacgctggagagcattccaaggttacttaggaccagtataattccacagacttgcaagcagagcttgaggggggctgttcgcttttgaaaagagaacgcattacagaaacgcagtagtcctcttacactatttgaagagctgccacgcagatgagaacatggactgatgttataacacagcatctcccttgaggacagatagacagaatttctgactcaatgtgagggagatggttttaacaattagaacagccagtgaaaatggagaagtccttgttggtggaagtgtccaagcagaactaaatggtgatgcctccagtctgctgtggagagggactttctatgcagagtagagggctgaatcccatcccagctcccttccagttcatgggctccttgtcatttattgactctcaggatgcgtggaaattagacaaattagcccttgaaatcaaccctgagagaaagacaagacccaagccttctaaggattggaatactctctttcccaccacccctaatttgttttggccacagcttgagggaaggggtcattagtgtctcatcatgatgatcctggctgcacttcctgtgagcttttgggaggaaatgaacagctccagttgccactcctgttgttggaggctagggaagcagagcaggggtcagagcagtggggagaatctctcactacatcaaatccatcgtcagacctggccggacccctccaaccctgcagttcacccgtgggctgaattgaggttgtcagtgcagcttttgctcatcaagcggctggaaggacaaagcaggaacttcccatgttgtacccggtagctggggatttcaccctgaaatggagcggtgcttgtgcttttgcacctggggctccggggctcagtgggagaactggagtgagccgctgtctgtcagactgccttggcctgctttggtcactctgccacttctaggagtgatgcagttcaagggcagccctggttttccagactaagccagaggctctgcagtccttgagcaaaactggaggtgggaatgttctatgcctgagctgtgggctcctcaccctcttcactttggtagtaactgtgccaccttgggccacagtccaccagagaggaagtgtccaggttcaggttatatccttaagattccagctggtgatccagaacagagttaactgactggcgtggtcttgggagataggttgggtttgggggaagagcatgagctcagagttggtgcacataggtcggctcaagctctgaggctatgggcaggttggcctccctgcacctcagctgccacatctgcaaaatggaaatagtgatctgtctaaggttcctactaggccctcaactaagtgttggccccagtccctcctttatgaaaacagcttctttcataaatcccaagaacaaaataattaccattttgtatttctataaatattgtgtcatatgattcaaaagatatagcttgaaatgggctcatgaactgtttacagttgtcaacctctaatttttaatattctcatatcaactgtagaaaagggcgtggattttgttaattaaaattaattttgagtaatttattgaaagggcaggtttgatgctagtttacatctcttatactttctcaactcttagatgctttctttaaaatgagcatttctaaaattggagtgtgaaaaacttgccagcctttcttttttgctcctaatgctgatattgagggatggtgtcctcaaatcataatcactttggaatagaggtgcttagaacaaagctacttgttcccattaactttcacaaggctttaggaggccaagaactaaataatggttgtctgtgattcttaattattattctatttctttcctttttttttttttttttttgagaccggttctcagtctgtctcccaggctagagtgaaatgacatggtcatagctgactgcagccatgacctcttgagagccaataccgtgccactgcactccagcctgggcgacagagcaagactccatctcaacaacaaaaaaggagagtacagctaaaaagagagcagaacttcttttcagaaggttgacaggatagctcatgaaaattttgctgtctttccctactcctgagaatttctcaagcaagataatcctatagaatagttattcataaaaagctgtggctatggtcctaaatctggcacagttcaaccacggctacgtgatgagggtgatgatgattgtcattggcaaaactaaatcatttttatgttgcaaaattaggaaattaaaactcactattcatttgtaatgtcattcgtttcctgtatatcttgggaccttgttcttagaatgtttgttttagaactcaataaagtaaggtcacttaagttgaataacccataagactctctttttggagtagacatgcacatattttatgtaatacttaactatatgggtagcctagtcctgtagatattagagttaccacatgtaactttttcattccactgtccgagttaactcttgtgatctataaatccacataatactacgaacaacagggaactgctttcaggtcttaagcactctggacatttgctctgttagcatgtctcaaatttgaccaccaaaatgcttccaaagcagaaaagagagatgtgtacaacagatagatgggcagtgggttcttggggcaaggatagcattatcacttagtttatgaactagtggaacagtttaggtatctgggaattctttattctatagaattccatgtcctaaaatggtactttttgtctgcatgagtggaacaggtcaccagatagtttgtttcatcttgttaatgtcagttaagttcatgaatgtcttccagtgaacagcaagacattaagcaacgcttttggacagcacttgtaagagctttaagagaggttcaaggagattatagagttttaaaaagatagaagtcactgtataaattatacctcatatctcttaactaaagaaaatttaagtaccagtgcctaaatataaaatattaaaaacataaatgaactgacttctttgttagatcacattgtgtgtgtgtttgttcttttcagacatatgaagatccatgagaaggaccctaacagtgccacagccacagcccctccatctcctctgaaacgtaggcgattgtcctccaagaggaaactgagtcacgatgccgagtcagagagagaagacccagcaccagctaaaaaggtcctcttggctcccagtgcagattcacctgctcaggggacttctgtcagaaataccactaatctttattttctcagtgtggagacttggcagacatacatcctaagctcttaacgtgtgttttcccatactgtttctgtaaagtgtctaagaaaagagtaccagtgtgcacttcctcttgagcccctctgctgagcccagagatgaaatgaagagcttttacaattgtttccatgctttctacctgttttttctagctaaagcgcaagcttcataagcattcgggactcttttgtcctcacttttttattaccagtgcctggcagatacccggtgctgcaaaagtacttgtcaggtgggtgggagggtgggtggatggatggatggacagatggatggatggatggatggatggatggatggatggatggatggatggatggatggtagcgttctgggagtatttgttgtgtgaatgaatgaatggtcaggtccttaataatcaggattggataatgcaacccttgccttttattattgtaaatctctgaatttagcattggcctctcttccgaagccatcccatgtgggagaccttcatgacttcacttttttccttttccctcagatggtagaagacgggcagtcaggtgacttggagaagaaagctgatgaagtctttcactgcccagtatgtttcaaggagtttgtttgcaagtatggactggagacccacatggagacccattcagataacccactaaggtaggagaaagagtgaactagaccttgttcattcctgtttctcctggcatgtgacaatgttcttaagtcccgttactccacaccgggctccagtgattgaacttgggcacaacaacattagggaggcagttaagaaagtatcggtgtggggaaaaagttggctgagagttgtcagagggtggctgtatccacagggtgttcacatggttcactgtgccttctttctctcagcaaagccccttgagtagtcaccagtgagcccctgaacactggggagtctgctatcatgggtgttcttggacaacagatagattttcttcgcaaaagatgttgcaactcaaatgactattagcaatgcatgaatatgtggcccaaacagggacagcccacgtgttggatacccctggcacagcactggtccatcataggcactccgaagtgtttgaactgagctggacctgatagcacagaaacctgagaagccattttggggtcagagaaagttctacttagtgcaggacacttggccaaaaatggaacctgatatgtttcaataaaaaagtgacaggtgattgctctgccatccagcttcaattgtaggggcttcgcagctccagtgtttctgatcctcagccttgccaggcagaaaacacgggtagtgacaggacttcccacaagaattcaggggactcatctttctttctttaccttctctgataactcatcaggcaaccgttagttctgtattcttgatgagttgatagatttggaagttattcctagagaattgccactttaaaactgttaactgccagagattttaagcattggaaagaacaaagaactacttaggaacccctgttgtcgttgagagacttgaaagtagcccatcctggaagtcacacacagctgcagggtcacgagcacacagcagggccatacacgcgtgcagctttgggttttagaagacagcttgggaatgcaggaatttgggcatctgtttgcctgaatccctgatatatggaccagatttccttcttgaagacacatgtttagctgtgacttaggaatgggaaagtctgagcaagctgaagacttatgttatagggaaaatccaaattgtacagtaacttgatgccaggtcaaatatgattatccttaatcacattagcctgacatttttccattggtgagggaaaaaggaacttacgaagaatttaaactgctgaacaattgaagtgctataaaatgtctttacggaactccccagtctcaagaaattgcctgatcattgggttgggcacagactggttgtcaggcctagaccccactcctccctctgctcatacaggacctcagccagctacatctgaacctgttttctcatccttcaaattgaaggagggcaggaccagataatccttgtgttcctaaaaccttatttttatttatttatttatttttgggtttttttgagaaaagttttgctttgtcacccaggctggagtacactggcgcaatcttggctcactgcaacctctgcctcctgggttcaagtgattctcctgcctcagcctcccgagtagctgggattacaggtgtgtaccaccacacctggctaattttttgtgtttttggtagagatggggtttcaccattttggccaggcttgtctcaaactcctgacctctggtgatctgccccatcttggcctcctaaagtgctgggattataggcatgaaccaccatgctcagccccaaagcctgcctcttaacagttgttttattctgtctaccaggaaaaggcatatggcccctccctgtgtaggccctctagttctgagagatttgggaaacttcacaggttcaggaatgttcacagcatccccaggatgtgggcttgtggtgggtggcaaatactgaaatagttctctagatcaaggacctgagtgagcagagatgacattaccagctgaacctcccaaagagaatcatgagcagaggcagaaacagcacaggggaccccagctcctgctcacgttcctacccagcagccttcagagccagtgctgcagtgaatacaggctgtctctgagcccgtctgtatacttcatctcacttcatattttattctgtgatcagataccaccttagaaactattatttacccccttctagataattctgttctgcaggaaaaataatgtggctcccacaagagatttctgagcagtccaagcctgcatagcatggtgtgtggcagcgatagaggcagatcaggtgtctccttctgaaatgctgacctgggtgagggacgaggttctcctggagcaatcctctgaacaaggacctgctccagggagaggccaggcttcctctgcacagaggttggagatgggcattgcactggacgctcgtcatttttttcatagttgggatgggtaggatttggtgggtgattaatccacagtgatggtagggctggtgctgtagacaggctgtgaagttgaaccctcagtcctgcacgtccagctagccgacctagaggattttcctcacctgtttactaataatgccctgtgtttggtgaggggttggcttaacaattttgtaacctgacagggacttggcccctctgggcaggctctcacttcgctggccccacagctgtggctgaggggtggcccgtaagaagagagttgccaggcatcctttgtgggggcacacaggccacccctgccctgtgcctctatctataattgttgctagatggggtggggctggcatctggaaaccaaaaagagttgattacagaacatggttaatgtccctttgctcctctctgctctgccgatccccataataggctgctatcataggaggcctggggcagcctgcgccagcggggcctagccaggcggtgaactgggacagtagctagtgggagagacagcttgttaacccagaactaaaatagacaccagctccatttcaaatcccagaggcagcagaaccacagtgggatgctacccgcttagactgaaggtttgtaactcaaaacagctgttgccttctcactctcctgcacttatcccccttctccactccccaccaacactggcaaggtgcccattgttccttaataaaaagtgttggaaatccaaactcatataaatctcaactccatttccctccactccactgtgtttcaaatgaatgaagtgttgtcgtagaacaaaaggaagacacaaagctgcctgtagagatgccagctcttaggatcaggtgttagcttcaccctgacatgaccaatggtcagtcatcccccttcccccagggctccccagatgagggagagaaggcagaggaggaagcggagtcaggctatggcgagctggcgtttggaatcggaggtgagggacggagtgttcaagagagcaggcggctacacagaggacatcctttgtgtgaggatgttgctgggcattgaatgtccatcagaatagaactgagcaactggccataccctgctgtgaatgaagtcagctgggagaagcatccaggtcagcccggccagcaagagaatctgggccacgcacgtccttggaattttctagtagccgttttttatttcatttcatttcattttgaggatctcgttctgtcacccaggctggtgtccagtgacatgattatgactcactgcaccttgacctcccaggcttttaagtgacccttccacctcagcctcccaagtagctggaaccacaggcatgtgccgtcacatgcagctaatttttttgtatattttgcagagacagagtctccctttgttgcccaggctggtcttgaactcctgggctcaagtgatctgcccaccttagcctcccaaagtgctgggattgtaggcgtgagccaccctgcctggccctagtagtcatgttttaaaaagtaaaaagaaagagacaaaatgaataatgcttcatcgagtataccagtatcatcaaaatataatgtcaacacataatcaatagaaaaatggtgagtgatgtggttcacattcttgcttccatgtactgactctttgaaatctggtgtgtgtgacgtgaccccagcccgtcttggctgcaccacaccagccacatttcaggtgcttaacagcccacagagaggtttcagatgagccacctacggcagggagggctgcagctttgacgcggagccatgtcttgtgtgtgaagaaggcccaagggcggcagctggatggtcaccctgttggcacagccactgctgagggtgaaactcggccaaagttattgtgtaatcttagatggccccctgatgaaaggagttcgggtaataagtaacgttaacatcatttcagttaaaatgtacccagcaaatgattgagtttgtactgtgtgccaggcacttgcccaggcttgaaggaaagagtgatgtttgagacagggtacgggctaggcacaaaacaagctggttggttataaaacaaagttcaggggtgagttcagggcccaggagggcacatttccctcagattccaggcaggcagagggatctggtggatgcaaaacttctccttgggattttacatcagaggctgtggtgcttcacttaatttcctctgggtcagggcccaaccgggtctggtacttcattgaccctggtcatctctgagttcaaggtgatgacattaaatctctgttgggaattggtacatagggagcccaagggggctctgacaggaacctcggctccatgagtagtgagggcagctgagaccacccccttcctgtatcttagtagtggggccaccaaagggaaatgccttctttttcctgcattctccactgttccaaggaatgtttatctcccttcaccacacgcctaccacctacagagaccccaagactcctcatgtacccgggattgatcccacccttgtcaaatgtcatcctaaaaacagggaaaagataaaatatttgtcagcatcttctgttgaagagtctgtgagtctgaggcttgggcaggcagaaacagattttaaacacttccgggggctatgaacagaggtccctcaaggaggggaagactgcccccacccctcacctgacaggtacagaagccttggtcaggactaccctgtcccccacccaaggcccagagcaaggagtggcccacccagcttcggtagccactacacaccctttgtgaagtccctcagactctgcccagtgcttcacgccacgctggtttggttgaacagtcagagcggggcattgggttgctgtgtgcagcctgggcgggttcctgggtcatggggagggacggctgcctggccagggccctgtcacagggccatcactgttgctcgcagcaactgggagagattagtgcagctgtcggatgtcagttctctgccccgagatgggcaggggagggtgggctgaggagagaagaatgtgtgagttggttgggactctagaggagaggttgtttgcacttactccttctggcctctggagacagaacaggaaaaatgaagcatgaaatcccttttgagaaggaatgccagtctctccattaaaacacaataatgaggaaggaattcagtatctgaaggaaatggtcaagctgagtggcagcttctcggcaggtatttcgcaggttcttctgatgagggttgcagggagcagggagtgtcagcattaggaaatgctcccagctgagccagcgtccaggcattaaggatgtgtgggtcacataaggagccagggcatctgcaaatagctgtcctctgaacgcacagcctggcagagtggaacgaagccagccggctccgtcccagcctgccgcctggcagctctgtgacctcgggcaagtgctgacttggtttccctatctggaaaatagatttgaaggctgttgtgaggatgaagggagataatccacaatcctcagagtgtaacaaatactaaatgaaatttttcttctgatactattatttagaatgtattttttatataaaattttatataaaattaaaatttttagatattttaaaccttccaacatttacagttataggtgttgtggcactctatggctatcccattccaatggaattgaaaaggagtcaacttccaggtgcgattcacttggcagagaacatgaaagcaatttgtcctttactcttataaacagctgtttttatctagttttcgcttttgtaaagattgggaaatggagtggctctttaaatttggtttgagtcttgcttcccacgtttcttaatcccactgtgtgaaaagcagatatttagaaacgtgaaggaactcgacacctttatgtaacagaacaacacatcactttccttagattgttgggggaaccctagggttctaaggaagtgagtttcctgatgtttgaaatttgccaatgcagcctttcaaaaatatgcttagcatagtttaaaaaaaagaaaattcacccttcttgctgattgtgaggaggtcagatatctgtccctcagctgtcacaatggtagacttgatggagttacatgacagagaagagagcccaaggaagcacctgagtggtttctcatctctgggccactctgttaaggcctgtttgttgactttgggattttcatcttattctggagagttaaggtcgccagatgaataaaatactactgttagtgagcactgggggagctaatcccaaaactgtttagccacaaggttaagaagttaaaaaaaaaaaagagacttttggtgtccttgttttccatttctgtaaatcacattgctgataaatttgcctttgggcatgcaccctgcccattttaggtactaggctcagttactggctacagattgcagattcccttttcagggctgatgcttttaacagtgatagttattcctgataagtaccttaactctgctgtgaggtatcaaaactgctggatctatttttggctgcctctttaccattactccctctagagaatgtccataccataacaacatatttacatatttatcacactgcatttctatcccagctcagaattgtgcaactttctttaaaaaaaaaaaaaaaaaaaaaaggatatcctgtcttcttccaaggacatttgctgtcagaagaacagatatctgtgccctgcctaaataggcagactgtgtagcacagacagccattaattcaatgctttttaaaattttagggcctcacggtggctcatgtctgtaatctcagtactttgggaggccgaagcaaggggatcgcttgaggtgaggagttggagacccgtctggccaacacggcgaaactccatctctactaaaatacaaaaaaaaaaaaaaaaaaaaaaaaaaaagcccggcacggtgtctcaggcctgtaatcccacctactggggaggctgaggcatgaaaatcgcatgaatccgggaagtaaaggttgcagtgagctgaaatcgcaccactgcactccctcctggctgaccgagtgagacgctgtttctaaaataataaaaataaaataaaattttaatttacttttgttttcttaagacttagtgaatctgagtgtgaataagaacattatttgttgtattaaagtcccttgaggattgaaaggacaaaaccccagctagcaactgagtgtattttcttgacctgttggagctggttggtcccacccctcgccctatgtacctcctgcctttggtgactcaggcacgtggtcaggcagtggctggcgggttgggtctctgtgacttcaggacagcgtggagttcaccagctcgtgtgggagtcagacttctctgaccatgttagcgctgtgccctttccagcccagcaagggtcagagccagtatgctgtgggatttggcttgtctgtttgatttttggaaaagggacagtaagggctgtgacagtgcctgtgtagtcactgacaaccacaggcacttctctaagcacatatcagagactctctgtgatcgtggttcccggcccctggtgttggcagccaccttcctgccatctgtgcctttacataccaggggccatgtagaaagagcttaccttatgacctgggagtcgtcttcctccactgggacccccagcccttctctctacttcaccctacccagtgccgccagggacattacagttgatactaagggaggaaggaagggatggaggataagtgcaggcagctgcttcacctctgctgttccagggagccccaattccacacaccccaacaccacagccccctcctaccatctaccctgagaactgctagagcccctccaccccataataggaacctccacagtggagcagccccactggaggcaggacccacagttcagcgactggcgtgtcatacagggggtggggaatggtccaatctactccagcactctaaagtttcttatcctcttacagaaacactggccaacgtgtgctagaatgcaggtgttttctgggtgaaacaggctcttgtgcactgtcttggtacagaaacacttatttctgtgagcagtgatttggagttcacatatgctaagcagctcctgtaagttgaggtcaggctgaatgtccattttggattccgtgtgtaatctaaccttaatctgtcatttggagatttttccactgatgattttttttttcttcctaaaagtaatgtagtgtgattttaaaagaaaaagaaagttttgtttttgaaagggtcagtggggttttgttaattttctttaaattctacaaagagatacacttcccccaaatacatttactttactgacagcaaagttagtttccatttggaaaagttatcctgtttccaacatcgagttatctctgttgccagaaaatcaaaaggcagccaatccgatttgtaaacctttcctctggcacattgtcaagatctcttgcaaaacgaaattgtcctacagccctcccctctcctgtggctctaagtgcagttctgccccatctaaatattaatattttgcaatcgtgctctttatgagcccctggcagagtggagatacgccacagacgggttgaggagagagtcgtggggaccacctggccagtggctgtggtcttaatggagattgacaagcccaaaggaggtttgcaaataccctgatgcctgcagccggctttgcatccagcagctccctccacagatttacagtggcctctattgtccttgaagagctgcttagaaacaaggttgcaaagctttctccttggggccttgggaaggctggatgaaccctcgcgtctccacctgatagggctgatccaagtgtttctgggtggtggttttccacactggttttatttaaggtctatcaacaggtgctgagtgtgaggcagggaggcaagtgtttttctttttttttttttgagacggagtctcgctctgtcgcccaggccggactgcggactgcagtggcgcaatctcggctcactgcaagctccgcttcccgggttcacgccattctcctgcctcagcctcccgagtagctgggactacaggcgcccgccactgcgcccggctaattttttgtatttttttttagtagagacggggtttcaccttgttagccaggatggtctcgatctcctgacctcatgatccacccgcctcggcctcccaaagtgctgggattacaggcgtgagccaccgcgcccggccgcaagtgtttttctgtgggtgtttcttccttttaaccagctgcaccacatgcttctggtttcaaagcagaaatttcttctctgccactttcatgttttatgtcttttgacttataggagtgccttagttgaaattccatgaaaagggtgtgaagtgtggatcaccttgcttagactctgttaggaggttgagtgcttgtgcaggctgggagagcatgcacttcttttcaggaggcaggtgaagggagcaggtgggatgaggcagaagactggccagaaagaacacttttctccccatgagttttgcagttagacagaagtagtaaggacgattgtgaagttcttgaaagtgagaagagagaacatgttcctttgaaattaaaactcaggttttcctgatttttcacgttagctaaaacgtgccaggaaacgggcttttcctgatttctttttttccctagtacaataacataatgactaaatttggaaaagtactttgcagttttcaaagcactttgttattcacagtaactgcagagatccccccgttttagatgagaagggaaactgaggtgtgaagaaggaaaggaacaggagagaagtgacaaagatgagtaaagtattggtaatttcttttctctgggagttctaacattctaacaggcttgtagtttaagacgtttctagatagcagattctcacacctaactcactatattttccaaacttatctaactataagaatccgctggtgtgcttgttcatatacagattcttaggcccatcttctagttattctgatttcagttggtctggggtgatctaggagtctgctttttttaacaaggtcatgtggggattcttatctcttggcatgtttgggaaattttacatagccggcagctgaagtgcacatggaaataagttgtccaaggtcacgcaatctgaactccctgatccccacctggtgtctctggtccctgagcccacatccccctaccacccactgttccacagctgccttcccagggacacagagtttgtgatcaatactgaataattctgccacgtctttattgtcatgccttcatcacctactacgtatgaaggtgtccagaaacaggagggatttaagggtgagggagagaatgaagaagacagacacaggcataagagacaaaaagaaacctcaatgttattaaaaattcaagccaggtgtaggggtgcacacctgtagccctagttactagggaggctgagacgggaggattgcttgagcccaagagttcaaggccagtctgggcaacatagcgagcctgcctcaaaaaagaaaaaaaaatcactacaaccatagaggtgcagtaaattctaaatctaattgccatattaagaggcattcattctccattcccttcataaaacctacttattaatgccagtcacactaaatattcataaccaataggctgtgcactagtacagaagtctcaaaagtggagagtagccaagcacagtggctcacacctgtaatcccaacactttgggaggccaattcaggagcattgcttgagcccaggagttcgagaccagcctaggcaacatggtgacaccatgtctctacaaaaaattttaaaaattagccaggcatagtggcacatgcctatagtcccagctatgaagggaggctgaggtgggaggatcacttgcgcccaggagttcaaggctgcaatgagctatgatcatgccactgcactgcagcctgggcgacagagcaagactctctttttaaaaaaaaaaaaaaaaaaaaaaggccgggcacgatggctcacgcctgtaatcccagcagtttgggaggccgaggcgggcagatcagctgaggtcaggagttcaaggccagcctggccaacatggagaaaccccgtctctactaaaacacaaaaattagctgggcgtggtggcgcatgcctgtaatcctagctactcaggaggctgaagcgggagaatcacttgaaccggggaagcagaggttgcggtgaaccaagattgcgccattgcactccagcctgggcaacaaaacaaaactcttgtctcaaaaaaaaaaaaaaaaaaaaaaaaaaaggtgaagagtattcaggaagatctctaggatacaaggaaaaaaatatattttttatctcacccttttaaaatgtctatttggtaatgtgcctggcacattacatatatgcaaatacatatgtacataaatacatatactacctacgtacacacatacacattctcagctaaacaacaaacacatgtggagcacatacgaaaacttttttatagaagcggtacacatttcagaaagtttgcagccacctctcagtcctacctgcctgccttttgcagttgacttgtatgctacgaaaagtctcttcccaacctgtttatgtctgtaatacttgtaataatttcttataatttaattaaattttatataagctgatggaatgttgttttaataaaagaaaagaatagtctctgtggaaacttatgttggaaaggcttagttacagtgcagattggacagaatattttttttttagttgctgtcaaatttaggctaggtaagatacctgtgcacagttgaatgccataatcgtaaaaatctaggattctgctttagtttggcttgcaaaattctggtataataaactcgatgtacccttatccagtttcagggattatcaactcacagccaattttgttttctctcttccccaacccaggtaatttcaaaacaaatcccagatatcctatgttttatttataaatattgcattatatatctttttttaaaaggaacctttttaaaaagcatagccaaaatattatcataactaaaaaattcagtcacttgtgaatatatcaaatatctctgatcagagttagattttcccaattcagacatatctcttatcctttcagtccaatatagatctttcagccaagtggtggcgaggtgatggattggcgaccatggggagggtgcaattgaacttgagcatgggggaaatgaagtgggggtgggagaaggaaggagctctatctccaggacagaggctgttgttgcctccaagggtcactgtcctctctgtgtgcacagctcagagcttgaacgtatttcagccagaaagaacctcacccagaggggctgtgtccattctgcttccccgcaggatctgtctcatggcctgtgatttagaccgctgggtactttgacatctgggcccgcagtgtgaggacttccagcccctaaaggtgttcttcattatccagatctgtcccttccctgggccttgaccacagtggtgagctcagcagaattccctcaaaaggaactctgtgttttgagtggctcatgggaacccgggtttggggttccaaaggtagctgagcagtgacaggagagtgctcaggagaggcccttcctgaacaggggagccaggggaggagcatgcacagcaggaccgggttctgctgtgcccgctacagcgcgataaggcaagcagggcggcacatactggcacttcttcctttcagtgcttcctgaaagtgagcacagctgcttcgtggctgacttcgttatctctttatttccagagaagactctcaactcaaaaaagttttcactgatgtacatgcagtgtggacgtaagcaagtggctttgcctggctaaaacagtgataaaaggagctaccttagcggtggtgagggtcagatacgcttgcacacataaatacatggaatgatgctcggtatacagcattgtccaacagaatatcctgtgatcttggaaacatactgtgtctgtgcttcccgatgcagttgagcccttaaaagaaggctgaagtgactgaggaactttaatttaaatttgaatagctacatgtggctttggtggctactacattccatgcaagtctaggggatgttgataataccataacgatggtattttgtttttatccacccatctgcacactgatgtaaaatttttaatatggttctcagtgaagacctagaagacaatactggtctgaaaagcagagacaatattataaagtggtgtttgctatgcatctgtgtggcccagaacatttaggatgtcaaagatcatctctgaaatgaagggtcagattttgaagtggactgcctctgtgggagtctttcaaggaaggggagacagccttgtgataagcatgggtgggagcaggaactcaggctgacattttgtgtgtgcttcttactggctgtggggcctgagtcacatcgcttcgtatttttgatcaccggtgttcatctggaagatgagggtcatgatacgcacctgcctgctggggttgtcatatgtgctgagctgtcagggcgcctgggctcagtccatgaggaccatggttatcattcagataatgatgatgctaataccacaacttaatgcacaatcaccatcacttctaattagattggaaaatttaataatttttatccctatcagatgccaaggatgctgattgattgccctagatactacttaaatgtatgctcttctgacttttaaacatttacaataattagaatccagtgaactcagggagagagaaacctctgacatgatcccattaatgcctgatcgaggcgagagcgagcaggtcggccatggtggcttcaggatcccagctgtcttcttgtgctcagactgtgggtgtttaggtcgtacgtacaccttgtgctgcctgcaaagatttggtatccagaagttgatagaatacaacttttttaaaaggaagaggtttttggtgctaaccatgcagcctggcttcttgacatcatatcatttttattttactcaattgaaatgaatcaacaaaaacttaagtctggaagagtggaaactctgacttaactgcttcctcatatgctctccctttctgcctcatatgttctccctttcctctcctagatgtgacatttgttgtgtcacctttcgaacacatcgaggactgctgcgtcacaacgcgcttgtccacaaacaacttcccagggatgcaatgggcagacctttcatacagaacaacccttcaattcctgctggcttccacgacttaggattcacggacttctcctgtaggaagtttcctcgcatttctcaggtattctgatcagcccatggaagcaaccagcaactgccttccatggtccacacagttagaccatgggaacttcctctcctcagggtttctttccttaaaatgtcggttgggctttgtctttttttgtaacaccttttttcttaaaattattgttggccctttcggtctcccttgggttgttgggttgagaaggctgcataggcttgtttggggttgaatatcctatgaactgtgcatcagtctagctcttctgtgccttttgtccgttcttgggtctttgaggtttaagttgtcagttgtagaccaggccccagtggctcacacctgtaacgccagcactttgtgaggccaaggcaggaagatcatttgaggtcaggaggttgagacctgcctggacagcacagcaagactttatctctacaaaaaatttaaaaattagccaggcgtggtggtgtgcacctagtagtcccagctacttgggaggctgaggtgggaggatcacttgagcccaggaggttgaggctgcattgagccatgatcgtgccactgcactccagcgtgggtggcagagagagattgcctcaaaaataaaataaaattttagggccgggcgtggtggctcatgcctctaatcccagaactttgggaggccaaggcagtcggatcatgaggtcaggagttcaagaccagcctgaccaacatggtgaaaccctgtctacactaaaaatacaaaaattagccaggcgtggtagcatgcacctgtaatcccagctactcgggaggctgaggcagaagaatcgcttgaacccgggaggctgaggttgcagtgagtcgagatcgcgccactgcactccagcctgggcaacagagcgagactccgtctaagaaaaaaaaaattttttttttaaataaaataaaagtggtgaattgtaaaacaccccagtcctatgataatcggaattcgtgggattttaaaaaaaaatctttctttactatctgcattgcagctaaatattccagcgttgtggtttctattaaaaacaatttgggtcattattgacctgaataagaaaagagccatatatattcactgctaataaagcacctgctaaaactactttgaaactggctgggcacaatggctcatacctgtaactccagcactttgggaggccaaggcaagtggaacacttgaggccaggagttcaagaccagcctggccaacacagtgaaaccccgtctctactaaaagtataaaaaattagctgggcatagtggcacatgcctataatcccagctgctggggaggctgaggcatgacaatctcttgaacccgggaggtggaggtcgcagtgaacccagatcatgcctgggtgacagagcgagactcagtctcaaaaataaataaataaaactaaaactgccttgaaattatttttttccccattttaaaaagttgagatagaaggtatcaacagtgttgttgttcaagtgtacaaggtacaaactcaatggattgttccatatacacacacccatgtgtgtgcaccccccaggagacattcctcatagaccctcctaggcagcatcccccttccacaatcatagaggggtagggtagctgattctccaacatctctggacctcagttttgcaaggcacccacttttacaaagagaattaattctacccttgtggtattgttacttaactatacttcagaatctctagtgagataccctgtgggttgatatcagttatcacgcaaacatgattcttaagatgctttgtggatttccttattcagtccagtgtgttagcaagcaggagaaggtcaacttttttttttttttttttttttttttaaggcagagtcttgttctgttgcccaggctaaagtgcagtgtggcataatcatgtgtcacttcagactcaacctccttaagctcaggtgcttttcctgccttagcctcccaatagctaggacacaggcatgtaccaccacatctggctaattttcttatttttttttatagagacaaggtcttgctatgttgcccaggctagtcacaaactcctggcctcaagtgatcctcccgcctcagtctctggagtagctgggactagaggcatgagccaacacacctggctaatttttttttattttttgtagagatacgggatcttgctatattgcccaggctgggaactctttatgttatggggaaaggctgtgtactgggataaatgtacaacaaatactttgtgcatctccgtttagtgattattttttcaatcttcacatgtgttcccttgcttttaccggtgggttctatataggcctggtgcgaaacaaacctgcggaggtgcatcagcgagcaacaccgttttgtctgcgacacctgtgacaaggcgttccccatgctctgctcactggctctgcacaagcagacccatgtggcggcagaccagggtcaagaaaagccgcaggccacgcccctgcctggtgacgccctggaccagaagggcttcctggccttgcttggcctgcagcacaccaaagacgtcaggcctgcccccgccgaggagcccctgccggatgacaaccaggcaattcagctccagacactcaagtgtcagctacctcaggaccccggctgcaccaacctgctgagcctgtcacctttcgaagctgcttccctaggcggttctctcacagttctccccgcgaccaaggacagcataaagcacctgtccctgcagcccttccagaagggcttcatcatccagcctgacagcagcattgtggtcaagcccatctctggcgagtcggccatcgagctggcagacatccagcaaattctgaagatggcagcctcggctccccctcagatcagtcttccgcccttctccaaggcccctgccgccccactgcaggcgatcttcaagcacatgccccctctgaagccaaagcccctggtcacaccacggacggtggtggccacctccacgcccccgcctctcatcaacgcccagcaggcttccccgggctgtatcagccccagcctgccgccaccgcccctgaagctcctcaaaggctcagtggaggcggcctccaacgcccacctgctgcagtccaagtccgggacccagccccacgcggccacgcggctctccctgcagcagccgcgggcggagctgccgggccagcctgagatgaagacgcagctggagcaggacagcatcatcgaggccctgctgccgctgagcatggaggccaagatcaagcaggagatcacagagggggaactcaaggccttcatgacagcgcccggcggcaagaagacgcccgccatgcgcaaggtgctctacccctgccgcttctgcaaccaggtgtttgccttctcgggggtcttgcgtgcccacgtgcgctcccacctgggcatctcgccataccagtgcaacatctgcgactacatcgccgccgacaaggccgcgctcatccgccacctgcgcacgcacagtggggagcggccctacatttgcaagatctgccactaccccttcactgtcaaagccaactgcgagcggcacctgcgcaagaagcacctcaaggccacccgcaaggatatcgagaagaacatcgagtatgtgagtagcagcgcggccgagctggtggacgccttctgcgccccggacaccgtgtgccggctgtgcggcgaggacctcaagcactatcgtgccctgcgcatccacatgcgcacgcactgcggccgcggcctgggcgggggccacaagggccgcaagcccttcgagtgcaaggagtgcagcgccgcgttcgcggccaagcgcaactgcatccaccacatcctcaagcagcacctgcacgtgcccgagcaggacatcgagagctacgtgctggccgccgacggcctgggccccgcagaggcgccggccgctgaggcgtcggggcgcggggaggacagtggctgcgctgcccttggtgactgcaagcccctcactgccttcctggaaccccagaacggctttcttcacaggggccccacccagcctccacctccccatgtctcgatcaagttggagcccgccagtagctttgcggtggacttcaatgagcccctggacttctcgcagaagggcctggccctggtccaagtgaagcaggaaaacatctcctttctgagcccttcttccctggtcccctatgactgctccatggagcccatcgacctgtccatccccaagaacttcaggaaaggggacaaggatttggccactcccagcgaagccaagaagcctgaggaggaggcggggagcagcgagcagccctctccctgcccagcacccggcccttctcttcctgtaactttggggcccagcggaatcctggaaagccccatggcccctgctccggcggccaccccggaacccccagcacagcccctgcagggccctgttcagctggcggtcccaatctactcctcagccctggtcagcagccctccactcgtgggcagctcagccctcctgagtggcacagccttgctgcgtccactgcggcccaagcccccgctgcttttgccaaagccccccgtgacagaagagctgcccccgctggcctccattgcccagatcatctcatctgtatcctcggcccccaccctgctgaaaaccaaggtggcggacccagggcccgcaagcactggcagtaacaccacggcttcagacagcttaggaggttctgtccccaaagccgccaccaccgccacccccgctgccaccaccagcccaaaagagtctagtgagcctcccgctccagccagcagcccagaggctgcctctcccaccgagcagggcccagcgggcacgtcgaagaagaggggccggaaaagggggatgaggagccgaccccgcgccaacagcggcggggtggacctggactccagcggggagtttgccagcatcgagaagatgctggccaccacagacaccaacaagttcagtccgtttctgcagacagcggaggacaacactcaggatgaggtggccggagcccctgccgaccaccatgggcccagtgatgaagagcagggcagtcccccagaagacaagctgctgagggccaagcggaactcgtacaccaactgcctgcagaagatcacctgtccccactgtccccgggttttcccttgggccagctccctacagaggcacatgctcacacacactggtaagagggccaccgggctcccaggcagtgagtcctacttcctggtagggggagccacgagtgggggtcaaaagcgagacccatctcccacagttccagttattcctagcttggcttcttccccggtctccgaagccccgagcttgtctggtggtgctgtatttcctatgtgctctcagtacccacatggcctttgtgcaggggccgagccctccaagggcagcattctactaagtgttcatccggggcgttttgaggtgaaagtggtcacaggccctcagatcactcatggcgtcgcctcatcccttccggaggtggtagccagattatctgctgggttaaacagggaggcggctccacagacgtgagactttgtattaaggtattggggcataatgagctcggtgctttgacattccattccagtgtcctcaatgcagctttttaaattttgacaattttgtgaagtttttttggatgccatgtcttcttaaagagaaatatgacaaattgtgaggttggctgttttctttcagttcactaaggcagtcacatcttcccctgttgattgtgaaaatcagcaatgagtggtggtagaatgttttaaaatttctgtttatactacaattgtaagcctttctgagaaacttctctcagaagggcctggcgctggtccaggtgaagcaggaaaacaactccttcctgagcccttcttccttagccccctacgactgctccatggagcccatcaacctgtccatccccaagaactcacacccaagtgtgaaaaaattctaagtaacaaacttaaattgtcaaagtgataccccaaaagtatcttccttttttctttttcttttttttttttttttttaaataaaagagtctcactatattgctctcaaacttctgggctcaagcagttttcttgcctcttcctcccaaagtgctgggatcacaggcatgagcccccacacctggccccaaaagtatttttctttttttgagacggagtctcgctctgttacccaggctggagtggagtagtatgatctcagctcactgcaacctctgcctccctggttcaagcaattctccctgcctcagcctcccaagtagctgagattacaggcatgcgccaccatgcccagctaatttttgtatttttagtagagatggggtttcaccatgttggccagactggtctcaaactcctgacctcaggtgatctgcccaccttggcctctcaaagtgctgggattacaggcgtgagtcactgcacctggcctgcccaaaaatatttttcaaatgttagtttctagaagctgatttttaaagagaagtttagaataggaatatactttaaataattttgttatcaggtgcttctagtatataaatggccatacaactctcatctgaattataattttctaaattttctcagtgaacagtctcagtattcagtgatttgtgttattgaactaagcgcaaattagtgagatcctatctttttggagtttacaaccaaaatattaataaatagatagggcctaaaaccaaatggtactggattggtgaataaaatacagaacaccagttaaacttgaatttcagatagacaacaaataatttttagtataagtatttttatgtagttcttgggatttactaaaaaattatttgtttatccaaaattcaaatttagctctgggcatcctgggttttttttgtgggtttttctttttgcgctaaatatggtaacccaaggtagtcaggaggtttatgacaggatgttgagggtgggttgtgggaattggtgtgagctgtgctctgtgtccaggtggaaatgcattcacaaagctttggagaagctcgtggaaggatgtttctcctagatgaggtggaacagcaggagggaggtcatggagccaccgctggatacctgaacagtgtgcagaatggagcctggggagggagaggaatctgggagccagaggggagttgtggctgggagcgataggactctcagtggctgcactggtcaccagagcttgccacacagacacggcatttccttctgctgtggtgggtccttgaatccagggattgaggagtagcaagtcaggagtgcctatccagggaggactcaaggagaaccaggatttctagatttgtaaagtatgtactgccctttcataccactgtctccctgttaaaatagtttaagcctgacaagtaaagcaaccattctaatgatgacagcagttcagggaagaaaatgcatcttcaagagaaggtgccccttatagcaatgtcttttgctacccttttttgggtgccacctgtttatcgcctactgagagtttatggagaagtgagtctttctgttaccacttttcagaaagcagatggtctggatctgatgattggcttggctcgcccccttcctcggtgctcccacctccccctgctgtcacccaacctccccatcttcctcttctagtattttcttttttaagagttgtgcccatgtctttgcaggtgcctgatatgtgttcccatttgtgaatccagtcatgattgcctggcttttgaatgccaaaatgtcagtgttggtttaaaatttagtagcatctgaaactgagcaagaaagcaggaggtttgtttaagttaggatggggtagatataaatataaacattctgcctcttgtcccttaaaagttattgataaccttgatagatgtgtctgctttggcgcagtccctgtatcctaccataatatgttcttggtagagctagtcttcatgacaatcctgtgagggtgatgtcatccatgtgttgccacaaggaaattgaggtttacttttaaggagctaagtaacttgcctacagccatatggggaataagagatggagctactgttccaagccagggtccggttctgtgcaactgcccactggtcagggtgtgtgtgcccagtgtgtcctctgtgtgaaggcagaaggcgggcagagtgcaccttccatgtctccctgtgttcccacatgtccacattgcagaaggtttggaagtagtttgagataaggggggacaccactgtggatcagaatgttattagctaatttcagacttaatgactacagaatcgtgttagccacatgcatagacactgtatgaaggttggtgcccattgagctccattaatttcctttgctgggcttcactctcagcttccagggatgttcagcatcaccactgctaaatcatgttatatggagcacttggctacatccagtgtcgtgttagagcattttccattcacggagcattagagctggaaggagcctgggaagtcacctgatggcccctcagcccacagacctgatctttctcctggtaggcagctctgctgtcactcagaaccacatggatccttggctccctaggcttctgtgaggcgctgtctccaaaactttgaaaaaagtcttgagtgtacacatgttaaacattgactctgcagccaccctgcaaacaaaggtgttattcggagaagatgttctgtggggtatttttgttttttctagttttttgcttttgtacagacaaggtctcaccatgttacccaggctgttctcgaactcctcagctttgcaaagtattgggattttaggcgtgagccacggtgcctggccgttttgtgtttttgagtacagtgttaaaatctagctgagttccagccagaagcattgagcagcatctggttttggactgcatttaaacaaactgtctacaccttgaatgctggcctcctcctaccccctcagcagattactgtactgtctctactttgtctcaaaacacgtgttctccagtcctcccagtcctcaaaggggcagcaagaagcagatccggtgttcagtgtccaacgaggggtatacctgctggctgctggcaaggagcatgtggcctcagccttttcttgctcccggctcaggttccaggaactgtgtttgatgaggaagctggcagggctgtcatttttcataccccctggcacagtctccacacacacctgcctttcctccttccttccactcctctccagctctctcccagaccatactttcctgctgatgaggacagttcctggttccttacctttctctacctaaacgcgccactccataggagacaagagtgcactgttcctgcctttacccctcgggagcatctcgtgtgtttttaggccacaggtggaggagagggtgccaggaaacacagccagtctgttctagcctctgtcctcattttcttcccccttccctttgctccagttccttgtcccacagtgatgggcttgggactatggggtgtccattccgggcttccctggcttgcttactttctcatgggtgctttgagcgccttttttgagccggctcaggctttccccccacaccctttcctccctgctcctatctggcagtgagggtcagagcttcggtcagtgagtcatccaaacctgggtgtggaaagcacctgggacaccacttgtatttggctccttttagctttcttaaaagacagctttggccgtttgtacccagtcctgtgtacacttctgccaaatacagagagaaaataccaaaagaaagaaacctgcctgcaggggtggaggagcaatggagagaaggctgggctgctcaggctgtcatcttgttacaaaaagaaaagcaactgcaaggttttctatgctagttagaccccacctttctaaccctgattgtctttgaaaaatgaacagaaatgttttcagttctgtttttttttttttttatcttggaggccaaggccccaatctcctcatcaaactattctcactgttcactcttctcttgccccaatgtccttcttcgtttcttgactgttctgggagagtaaacactggctaattttttttgtttgtttttggaggtttttttttttttttttttttttttttgagacaagctctcaccctgtcacccaagctagagtgcctgtgtgcaccctggctagagtacagtggcatgatcacagctcactgcagccttgaactcctggctgagttcaagtgatcctcctgcctcagcttcccaagtagctgggactacaagtgcacatcaccatgcctggctaatttttttattttttgagacaaattcttgctctgtagctcaggctggagtgcagtggcgtgatcttggctcaccacaacctctgcctcccgggttcaagcgattctcctgcctcagcctccagagtagctgggattacaggcgcgcgccactgcacccaactaattttttgtatttttagtagagacagggtttcaccacattggccaggctggtcttgaactcccgatctcaggtaatccaccagcctcgacctcccaaagtgctaggattacaggtgtgagcctccgtgccggccttttttttttattattatttgttatagagacaaggtctcactgtgttgcccaagttggtcttaaactcctgggctcaagcgatccacctccgttggcctcccaaagtgctgggattataggcatgagccactctgcccagctggctgatggtttaagcgctcgcgttggggcttgcagaatgctgtaggtcctgagtgcgcaggtaactcactgtggttacaggtgcttttacaaatccccttctaaagcagttattcgtggcagctaccaaataaatagaatcatttgctactttctatatagatggctggccaacaagtgtttttgaaacctgcgttattataaaatactaaacgggcccgttttcctgcatccctgcaatccagagagcccaccactatgtaaaaatgtcagacttacgcagtgaaatgtgagcttctaatgactcacgtgagttgttatgtcactttgggagcctttgtagtttgatgcaatactttcacatcatggattgttttctgaatttagcattaatagggaccttctcatggggacgtcagcctggcagtcctaaccaactgtaaaggtgacgcacttaccagtgtgaaaattacagagtaaaccatgtgacaggggggagcgagaagccgattgttttctttgaaatcaagaatcctatcatagtagcttcttacttgttttcctcttggcccagttcttttctcaatctggccagactcagagaagcagcagtgttaccttttgacaataaaatgttaaaagtactttatttttacttgaaattattaaatactgtgttcaattttaaatgaaaaacaataagtaatttttttcattttattttatttttgagacagagtctgtctgtcgcccaggctagagtgcagtggcacaatctctgctcactgccacctccgcctcccaggctcaagcaatcctcccacctcagcctccccagtagctgggattaaggtgtgcaccaccatgcctagctaatttttgtatttttagtagagatggggtttcaccgtattggccaggctggtcttgaactcctggcctcaagtgatctgctcaccttggcctcccacagtgttgggattacaggcgtgagccaccgcacatgaccacaagaagtaatttggaagacgcaccatgaacactgacatactgtacaactagtcacactttttttttttaatgtggatgttttaaaaataaattttgcagaaaacacctgcagaatgatatgaggagaccctgaaaacagtcagtggggttctccacttttgttcaggttgccttgtggagctactcagaagcacacaggccggatttctgggtgtctgattctgccctttccgggtttctaattctgttgtctttgattgttgcatctttattcttaaaagcgcctgaggagatttgtaagcatcatcttaaagggtcttttagctcaggagggaatcaatgtcccctgtctctgattattactcctgatgtgaaattgtggccatgctgtcatgggggcggtgccaggtccacaccttcaggctctgtatgaatggcgccccctggagtcgtgtgacacagccagtgccggttaaggctagtccctccttcccctgggaaaacacgtggcccctctggctggtccccaggtgccaggcccttgctgtgcattcacaggggagtgcgtggccttgggcacctgcactagttcaggcttctatcgacattaatctaacgccagaggcccctgtgatctgtgtttccagggagctgtgtttaattgtggcaatcctagggttatgagacaaaagtactgggccccagctctgaagtcatgttggttaacacacaaaaccttttaccctgtaacattagcaactgggaccttggactccagcaacttgggggaaagggaggaattcagtgatacacaagtgatgcaccaccaacttccgcctcctgaaggcccctgatcccctccctcctcctctcttttcctctccacctcctttttcccttgtgctttctttctccctcacatgcatccgcacaaacccaggacaagttgtagaggagcttctattgcattttgaaacatgatgtttacagcacaaaaggaatccaagtaaaaggagagggtaggcagaccaaagcaggaggggactgtgcctctctcagtggctcacccatctgtgcgtttgggatgggtctaggggcgaggcagggctgccaaaatgtcctcttcacatgcacatctgttgagtggagcacatgatcaaatgcagacatagttacgtattggtcactcatttgcaaccaagcttggagcagggggaacaaagaacctttaatgagaagatctcctgactgttgccacctaggaccacagtgaacttgaacagaggtcactgcaggatgtctcggcaagtcagacaggagttgtcctgggaagtcagaactcactgctcccgttcccctgtgggagggacacagccaccaaggccaggaagggggactggccaccctggctgggggctgtccctgacttcttctcttcatgggcccccaaagatacccaggggttccccattggatttcctagtgtccatattacggtgtccttgccacactagaactcgttagagggcgtctttctctttgtgatagaatataggtgttttcttgctgtgctctaaaatctcttcattcgcttttttttgttgtcgttaatattttaattgtaataccgttgttttactttaaatgtatatttttcagtttcatttattttagtattttgaggacaaaaattcatattccattcaacttaggaaaagggagaatgatcattttagtcattgatggtttttttttttctaatgtgttttgttaattttcttgaagggatggaggaggggggaacaactgccaatgatcccaggagaataaacaaaagcgacttttctatttcattgcagtagaaagccagataaatatatattttttttcctgcttcaggtcagaaacccttcccttgtcaaaaatgcgatgccttcttttctaccaaatctaactgtgaacgccaccagttgcgcaaacacggagttaccacctgttccctgagaagaaacgggcttatcccccagtcaaaagagagtgatgttggatcccatgatagcacaggtagtgccgccaggtgaacaagaacccaggaagagggagagagaggagttcggttaagaattgtagcaaactccagtccgagctgtggaggggctgcttgttcacttctctgtaggattcagagcccacagcctgttaatagaaaggcaggccctgctgatgattgggagggagtataactcctgggtcagatcgcctagacagacagcagaaaacagtgacagtgcccctcggtgactctcggggctgctagggaagatctgtcaccctcttggcagaagaggcctttgttcccgatgttgggaggtgggatgtatgggaaggcttacaactttagccctgggtatgaactcatctaaaggggatgtgaaacctaaaggtttggggagccttagccgctgcagcctcctcgggagcaggcctgggctccctgggatatcagggtattgtaggaacgaggggtgcggtgttcttcttttcaataactctcttcccggtgtaagactgtccttgtttgaaaaagcactgtgcatgtcctttctttaatcacatctctgcttgacctgaatccgggtattattctcctgtgctgatgtgtgcttcctccctccagcacccacagagcaattaacggctgcccgatacgtcttgtgccaccttgtttcccttatagtttctgaatttactcatgtcctctatcagtacactccatccgctcggactgctggggttctccatcctcacccccaagagcaaacaaaacgaaagccagcctgctgcaggccacttagatatcccgccagttggcactgattagtaacagggacagcatcatggtgctgggtccagttttgcaagtcttgaaaacctgacactatcttgtggctgcgaagagatccccccagctgtgtttttttagggttgtatttgcgtcctgtggcttctattcctcagactagggtggagatggggtgccctgtagttacgaggcacccctgcctcaggagtcagtgtggaagagggttgggcattaatcttagccccttgtccttaccttggttacaggggtacagggtgtatctgaagtggagaggccaccctttgcccatctctacgcctcccactgagccctagtgaaaccaactgtgagtgctcttgactgcccaaccgccagtctagatcagatcctctgagggtatgaaagggtaagctggtttgttcactgcttccccagcttccacttccacataactcaccagtatctttgagtgaagaaagatgtgggtgcccacggaatcttagcctaacttggacccctgtgagccaaagatgacctggagttcagcccactggaagcgcacaccagtgctggcaggcacgcgtttgctgcagaccatcctgttaatgtttaaccatcagccgccacattacctgttagtctggaacattttctttcatcctggtttagaaagctgccctgtgatcttcccatagtggttccacagtagcgaaagcagccggtaactgagggagctgagggggagcccttgggtttccatgtttacaaataagtcttagtaactccgtgctggatgtgcattttgcattcagcttctttatcataagggaggaacaaagactggggctcctgctgacatctgcagacacaaagctgagtcggaatttgtggtcttagcttcggttcagcaccaagtgtatttataagtttgcagtcataggttttgttgtccaaatcccaacaaagccctttcccacctccaccccaccccggaagttatatagggttccttgaagggacaaagcctctagaaaaagaaaagtcactgaaagttgtaatgtgaaaccagcaaagagaaaatacatgtttggtttagttgtggtcacagtccatggtgagaaaagggactgagatttaagtgggagggaaaagtttagggaggcagagtttagtgatttcaaggaggattttaaaatgcagatgagcatgatggacatggggtgaagccttcattctgggttccccccccccagtgaagtttaaaaagtgaggctttgaaggaagaccacttaaaaaaaagggggggggggggaaggaaatgaccaaggaggtccttgaggggttttctaggcttgtatgcctaggtggcattttcttaaaattcctacacatgttttataatgtaggtctgacatttttcagtctcataaagtcccccaaaagaatgctaaaaatgccacagtgggggcagttctcccttaaaggtccattttgaatattcaaatttcaactgaaattcttcattcactgtcctggacagagaggcagcctggccccctctgcccttgagggatatgcccttggtccttcctccgatgatgccccgtctttgtgtttgtaggcacctacatagggctgtttttaattcgtataaacatgaaagtgtttaagctctcccttaatggtggccgcctttaccagcccagaagtcccacatgtcagcatggactacacctcaggaaaccctctccatcctcagatgctttgggtggagtgcagacacagcagcttcccctgcaaaggcacccctgccaggtcagataattacttaggttggtagtctgtcacagtggttgaggctcatttaatttttaggaagcaatagatctttaattgttgagctgactagggctgtctccacagtcctgtaggaggagctgcgggtttattatctaccaggattccttctgcttcctctaacagttttcttagttgttgaacaacacaaaccgagggactgatggggagagggaagaactgcatatttttaaggtagcattgcttataaaaagtcatcagctcagctacctgcatttgggagtctgggtgttgagggcggggatttatacagcacctggccttataagttgagtattcatgataggtgaagaggtgaagttttttgttcatgagaatcactaatgaaaatcagttgtttagaatgtgaagggcacagcctacactgctaaaacactccccctagtgggagtttggtagaatacaaccaagccccctgtgtccaaagagggagttggcctttcattgtactccgggtgatctctctccattatccgcgcaaaggaagggcccgagagcaggaacaatttgatcttatatttctttgggttttgtttcaaaatttattttactttctttaaagctctatcatgttaaatatgttctgtgcagttaaaataatgcatgttctttgctgaaaaaaaaaaaatagaagtgtagtctaggatatactggggacaaaggggaagtaaccagagattaaaccttcttttaaaaattaccagtcgggcgtggtggcgcatgcctgtaatcctagcccttttagaggccgaggaaggtggatcacctgaggtcaggagttctgagaccagcctggccaacatggtgaaaccctgtctccactaaaaatacaaaaattagctgggcatggtggctcacacctgtaatcccagctacttgggaggctgagacaggagaatcgcctgaacccaggaggcagaggttacggtgagctgagactgcaccactgcactccagcccgggtgacagagcaagactccatctcaaaaaaaaaaaaaaaaattacttacaaaggccagccacagttgcttatgcctataacctcagcactttgggaggccaaggcaggaggaccccttgagcccaggagttcgagaccagcctgggcaacatagggagaccctgactctagggagggaaattacccacaaagccagcaaacaaattgagcgttctgtatttttattgtagagtttataccaatatccattctatagatgctctctgttgaaatgattcaagaaaaacgaacatctagtttttccttggaatgtggcccagacattggtgtgcatatcccaggactcatattctttaagcttttggataattttgcaaaatcatttcttctttaaaatgttatattcacaccataatatttctttctgaaacctcttgagatacccaaacagtggctgccaaaaagtgcagtcagtgtaaaactaatgaaatgaaatgatgtaagtagccgcgttatgcagatggctgtgggtaaagcctaaagccccaagcaggtgtgaacagtaggtactgtctcctcagacctcaggacggggcagaaccagctccttaccccagccctcctgaccgccttgatggcaaatcatcaagcatgtgacattgaggaggtgtgatggatgcaggttgacattgtagttacacctgatcacgtcaagtgagaatccaggttaggtgcgtgaatctgctggctcaaggactgcaatcacatctggcctattgagggaggggcatctcgtacttgtgccataaaacaatgactttcatccacccaattatcagaggaacttgaatccctgcagtaataaatcagacagtggccgggcacggtggctcacgcctgtaatcccagcactttgggaggctgaggtgggtagatcgcctgaggtcaggagttcgagaccagcctggcgaacatgatgaaaccccatctctactaaaaatacaaaaatcagctgggcgtggtggtgggcgcctgtaatcccagctcttgggaggctgaggcaggagaattgcttgaacccgggaggtggaggttgcagtgagtggagatcacaccattgcactccagcctgggcgacaaggcgaaactccgtcttgaaaaaataataaaaactaaatcagacataggatctgcagctaaataataggtcccaccagcttccaatgtactgtcgtaatgcataattttaagaagttattaagtcttctttcaaccttagtaaagagaaggccttttgacactgtttgatgtgaatattgcagccgtgccatcccttaaaaggactgttgaaaactgataggctttccacatacagttttactgggtggaatggacagataggaacaaatcaagaggcaggaagtcagggtaggtgagatgcctggaacccagaaccccttgtcttcacaggcacccacagcccttcacagtccgctcccctcactgtgtgctgttgccaagcctggcatcaagggtgcccttcctttgaaagattccaccacccctgggaggctgacagctaggaagcctacaagcttgcctgcgcccccttgggtctctgcagcctccacctggagatgagcgtcaggcaagagtgtgcataccatacacacacaacgcaggcttggggtcgtttcctgtgaaactcatcaagaccatgctttggaggattaggggtaggggtggtcctgtgtatgttgcatgtttgtatgatctctttgcactggaaaaataacttataactcaagcttcctcaacttccctagcgctgcgagtctctggaatgcacccctctcctatctcgcagcccctgtctgccctgcctgagtcactcacaccttcctgggggcgggggcagtggaagccaggggttcaggggcacagccagccctgggaacacacctgaggtgatgtggaggctgcttttgcctttcttcacgtccccagggtcatcttggtcctcctgggggatgtaacaggtggtgaggatttgggccgaaagaagtcctcactggtttggggttcaggctgctggcgtgggtctagcccattcccggcgacatccctggcatgggcgtacctggtggtgcccctctgagccctccccgctgtgcttgccccacagacagtcagtcggatgcggagactgcagccgccgcgggcgaagtgctagacctcacctcacgggacagagagcagccgtcggagggcgccactgagctccgccaggtcgcaggggatgcgcctgtggagcaggccacggcggaaacggcctcgccggtgcaccgggaagagcacgggcgtggggagagccatgagccggaggaggagcatggcactgaggagagcactggggacgccgacggcgcggaagaggacgcgtcgagcaaccagagcctggacctggacttcgccaccaagctcatggacttcaagctggcggagggcgacggcgaggcaggcgccgggggcgcggcctcgcaggagcagaagctcgcctgcgacacctgtgggaagagcttcaagttcctgggcaccctgagccgccaccggaaggcgcacggccgccaggagcccaaggacgagaagggagatggcgccagcactgcagaggaggggccccagcccgcccctgaacaggaggagaagccccccgagaccccggcagaggtggtggagtcggccccgggtgccggggaggccccggcggaaaagctcgcggaggagacggagggcccctccgacggggagagcgcggccgagaaaaggtcctcagagaagagcgacgatgacaagaaaccaaagacagactcccccaaaagcgtggccagcaaggcagacaagaggaagaaggtctgcagcgtgtgcaacaagcggttctggtcgctgcaggacctgacccggcacatgcgctcccacacaggtaaccagggcaggccaggtccccggcccaacaagaggaggcgagccgggcacctctcctaggagctcccctgaagcggcgctggaggccaccgagagaacgtttgcttacgttgccggtgtgccctttaagcccgtgaactaggagttttaaggagttgtactctcagcccttgaagacggtgcaggcctcctgcagccaggcaggagagggtccttggccgttgtgtttttgagaacgctgtgatccgcctttagctctgctgcctccgcctccccatctgtagagtgggggtaacagctgccctgtttcatagaggtatctaggagagggtgcttgtgctgggcatttgggccacttagtcctgtctagtcctgtggcctggacgacaggcactgccccaggccgctgtggggcaggcaccctgggtgatccattagggtcaggagggccttttcctttcttagccgtgcagttcggctgagatgactgggacaggacccttagccactgcccttcacaccgttctagagttcacccaccacctgcagggtggaggctgcagaccccagagcaggggcgcttactttgacacaaagacctgaatatgctcatggagtccagagatatatccttcttctttccaaaataacctgtccctcctctcagccgcagcttccctccctgtcacagctgcagcccgcagtgaacacatgtgccccgacccagcgcagtcggctctgccctgcgcttgcccgtgtgaagggccagggtccttggctctcagaagagggatattcttgggctcccaacaagcgtggtgggccctgccctgggcctggcgtgtgagccatcaggaaagcccccgctgcaccacatcgcaatgcagagggtaactggtgcccccgacctaggtgctgctgtccatacagatccctgagagggtccactcctgtccccctctagattccttcccagtctctggtcgaggccagtctgcacatctcctgaggcttctgcttctgggacctgggttttctggatcagtatgtagagtgcctgggctgagagaggaaggagaggaaaggtctcagactgacagcttgaaccagcaaacagagcttgtccgtcctcagtttgctggttcaaggaagaggcctctggctgagtaggacggagtcctggccccccgcacatagcctgggagcctcattcttcctgtgcagagcagggtgcagtgggtactggtgccttttggttaatggaaattctttcttccattgttccaggggaaaggccatacaaatgtcagacctgcgagcgaaccttcaccttgaagcacagcctggttcgccaccagcggatccaccagaaagccaggcatgccaaacaccacgggaaggacagcgacaaggaagagcggggtgaggaggacagcgagaatgagtccacccacagcggcaacaacgccgtctcagagaacgaggctgagctggctcccaatgccagcaaccacatggctgtcacccggagccggaaggagggcttggccagtgccaccaaggactgcagccacagggaggagaaggtcacggcagggtggccgtctgagcctggccagggtgaccttaacccagagagcccggcggccctggggcaggacctgctggagccgcgcagcaagaggcctgcccacccaatcctggccacagctgatggcgcctcccagctcgtggggatggagtgacagcctcagtccccctcagcacagacaaaagccagcagagcaaagcgtctatacttcatggggtttcctcagtgccctttggctgttgaggagtgagagagagagagagagagagagagagagagacaagcaggagcgtggctgctcgctcagtgccatagccttaccgcagcctgcgcgggaggccacagcccgtgccgattccagtgccttaactacttaccggatccctccatattatcatgggtgttgtatttttccaaaatgacttcttaaacaaaacaaatattataatgaattgtctggagaggacctcttcatttgagcattagcgttattttgtattggtgtgtgtgagcttgttcttgtgaatctgtgatagcaccgtttgttctgtgagctggaaacagaaggaaaaaacatacccttgggtacccatagccaataactggaagaaaatgatgtgaatttcatgtaaatgaccagaggaaagatggataagatgataatttcttaaatagacattttccttttttctttgtgcttcatggtggagctgtcatctggtccttggtattacaggatgtggttgatgaaggtttccaatatggtttcaggccaaaaccagggaagattctagcttcagcctcatgtccatttccagtctgtcagcattagacatggtcactgttcaagtttcaagacatccattcttaactatagagaagagttactcccctggcgtcttaacctatggaaaacatgcacggataggatatatttgattgcctcctcttccctttcagtatatgtattattaatattattattattattattattattagttcatcagtttgctgttctctgcagtgagcagaatcaaatgggcaatatttgtcctgggagacctgtgccgcacccaggtccccgtgttaacgtgtgcctgcggttgtggttggcaccctcgggtggtagctcttctactgtaatgagacaagcctttcttctgtcactgcagaatttagaaggggccgtgagcagtcttcccaagcatggtccaggagcagctcagagagggtggagtgaggatgcatgcatccagggaacaggcatcaagaagccagggccgtgcctggagcactgcagagatgactttggagaaagcaaagcagtgacccagtgaccaggcacattactcgtgagcgaggtattcccagtcttcctgctaagcctaatccaagccttacccagctgtgctactgtcatttgcaaagcaaggaaatactactactggtaataaaactacacatgcaagatgtcagataagaaataggtttatatttaccttcctgcgatgtggggttggtgcttgaagataaatgtgctgtttctagtttcttaaatagcccacacccctggatgcaaaaaggcagggttatttttacccatgagcatcctgtgcaggcaatagacttccctcactgtctccgcctgcagggaggagaatgtaccccactgcacctgagctcctggtccctcagccaagacctcaggggtccccagccagcctgctgctggggacccctgtgcttgctgcagtgtatggagcctcttgccttcccctggggaggcacccctgtaccccagcttccttcccctggccttttctggccccagtgctcctcctttacatagacttgttcacacagaaacgtgcacgcccccttttctccgccacttcaccagtttctgaaatccaacctcccagacttcacaggaagatagatattcttgagataatgaaaagtgatatcttcgcatacgaaaggaaaaaaggttgaggtatatatgatttttaactgtattaggggtgtatgaaccagtttaaaaacgaggttttatttactgtagagatgaatgcaaatcagaaccaatgatcccttggcctacttagttaaaaccagttcatacatcccttagggtttttattattattattattattattacagttgttattgttgtttttgttgttattattatttggggtttcttgtgttttttctttgcgactctccacactaaacttgcaatattgtggggagaagctgtgactaaactctacgctgcggtgagatgtagcagtaatcagctcccagcgacgtgtgtagctggggctgccgctcgcaataatcactattgatttaaagctttacttagccttgatctgtaccctcgtagtcaataaggtcttgccacattttattagtgaggtggagaaacgtattatttgtttgttgtttttgcccttcccccaccccccaatattaaactgtgaaatttgtgatttgtttaaactctgggtgaatcatagcttagtttgcatgtccagctaatttgtttctatacattttgtttgattctctttctccttctctcagggcttttacaaaaaaatatatatatatggatcttctgaaaagttttttgaggtgcaagttttttctcttttttttttttttttttttttctcattgattaatggacatgatgctgagattcaatcactacatgaaacacctggctgtgaaaacaaaacaacccagagggctgtgttccaagcagcgctggggaagctacgtaacagtcggatgccagttttggaagattcaccatgcgttctgaccctctgttcgtctctttcctctcctctttcttcaagaaggaaattgatcctagtgatttcagcccatgcattaaacaggaaacaataataaatttgtagaattcatatttttctaaagggaacttaaaaactgctgctacatgttatgtacaaaactggtttatgccacatgaacagagaatcacaagtttggttttggtactttttgttcctctttgtattcagttgtatagaacttccaaattcagaatgagaagaaagctgttctgtatcaaaccatttaagcaataaatgttatattttaaaagctgcagattgccggtcacgtggccgtcctgtgatttgttgtgatcccatccccaaacccacagcccacttggggcaggtcccaggtgtgcagtaccattggggggagtcacaggtgcccaggaaagctcttgtcacccaggcagcatttttatttgcgctggaggctgtggcagtgactcttgcctatgctcccagcactttgggaagccaaagcaggagattcacttgaaaccagaagttcaagaccagcctgggcaaaatagtgagacccctatctctagaaaaaaatgtttaagaactagcttggcatggtggtacatgcctgttgtcccagctatttgggaggttgaggcaggaggatcgcttgagcccaggagtttgaggttgcaatgagctacgatcgttcctctgccctccagcctgggggacacagcaagaccctgctgtatgtaaaagcactcggctgcagttgtgagagctgctttgagagcatgtggaaagttaagtgcatggccactgtcagagcttcagagtggagatcttggtgttgggtgcacagggccaggaggctggacctaatgaggcaccacagtgcaggccactctgtcattggctaaagccagcatttttgtttcctgtgcaataatgcctaagaagtccgcctcgcctcttcttcctccaacccagtggtaagtgattgagtcagcacctagtggagggagaacaaaatctgttagtgtgaccagattttggtgagacgggaggggacagcaaccctagggctggggatggtgcaggttaaaactcacatttgggtaaaatagcaatcagcagagccccaactcctagcagagcctcaactcctataactagggagtggctctcaaaaagcaacactgggggctgggtgcggtgtctcacgcctgtaatcccagcactttgggaggccgaggtgggtggatcacaaggtcaggagattgagaccatcctggctaacacggtgaaacaccatctctactaaaaatacaaaaattagccaggcatggtggcaggtgcctatagtcccagctactcgggaggctgaggcaggagaatggtgtgaacccgcgaggcagagcttgtattaagccgagatcgcaccactgcactccagcctgggcgacagagtgagactccatctcaaaaaaacaaacactgggccgggagtggcggctcacacctgtaatcccagcactttgggaggccaaggcgggaggatcacttgaggtcaggagttcgagaccagcctggccaacatggtgaaactccatctctactaaaactgcaaaaaaatttgggtgtggtggtgtgtgcctgtaatcccagctactcgggaggctgaggcacgagactcccttggacccaggaggcagaggttgcagtgagccgagatgccgccactgcactccagcctgggccaacacagtgaaactgtctcaaaaaaaaaaaaaaaaaaaaaaacgaacactgaaagaagttggttgtggaggaggctgattgtggataatgctaaaatgcattgagtgcactgtaccatacactgctaagtgccacctccctgcaggaccagagctgtggctgtggtccttaagctttttcaggcccctctgttgaaagacgtagaatttaacacacatttatatgtgggagcttgggggatccgcatgcctgagtgggcggtggcaggtggagatgtactagccctgggtaagcggatctcaaacctcaggtcctccgcccaaagacatagccaaccacctgcgctgtgttagagatgcaggacaaagaagtggccacgagctgtgttgctggggacaagctggctggcatgacaatcccagttctgcctcttcgggctggtgaatggccttgtgcctcaatttcaccattcctaagaaagggatagcgatagtacctgcctcatgggcactgttgtgtggatgctatgagttaattacataaggtgcatgttaggggctctcgttattgtttctacagtcttctcatgggaatgcttccttggttgcctggtgaggaagtaggtagaacttcaccacacacattcatggcacagtgcggggaacagccagaggagggccttgtgggagatcaccaagatgcaggcactgtctttgaaccccagggagtcttgtcaccttctcctacctggcctcctctggccctgtaatcccactaccttcccgctcagcctgtgacctccccatggccccaggactctgcctgggccttggtgcttatccagcatccccaccctggaccaaagcctcctccactggaggagggcatggggcatggggatgggggagctggcggcatagacctagcacccaggatgaggcctagtcccttgttaccttactgctcagagtgtcgtctgaagacccaaagcatcagcatccctgggagcttgttagaaatggcaacctcaggttgacctggtgcggtggtgcatgcctgttgtcccagcactttgggaggctgaggcaagagaatcgcttgaggccaggagctcaaggctgcagtgagctatgttcacactccagcctgattgacagagcgagatcgcatcttcacaaaaataaaaacgtaaaccaaaaaataaaagaaatgagaacctctgacccacccagacctgctgagtcagaatttgcatgtgaacaagggccacagtggatatgtgcacacattgaagtttgagaagctccggtctagaccccaaagcttggttcagaataaggtggatggcggactcggcagctggctgcagagacggctgtggattctccccctcaaagacagaatccatctcagaatgagtgggcagaagccacatatggctttagagagtgccgatcttggccctccagaggttccttccacagtccctactccagccccagcacagactcagccactgcctaaacccgagtgccccaagagtcttgtttggggtttctgcctgtttgccatccttgtggattccaaaggctactttgaaagggctgaggagcgagtggggcctccaaccactggccaacagcgccagctgcctgcttgcctgtcctggtgttaagccttgggcctggagcgctcaggcctctccccttcataaccacctccctgaggaggacaggagtgagggaggatgactaggcttattttaagcttgtaattgaaggttgctctttagcaacaaaagagtcccctccaattctagactgccagagtcagtgtcctaaataagaaacaagcggtcactcctttcccgttttactgttaggggaaggaagccacagcccagtggggaagtgacatccctggcccttgccgttcaccacttcaagtcttgcccagctgtcagggcaggaattcatgtccccacggtggcatctgcttcccaggctgtggggccagcaaggggctcagctgctccccagccctgccttcctccatggatctgacatgactcttttatgggaatttacgtaaaagtaacgccttgctcagtgtggaaaatttaggagcttcaggaaaatataaagaaaattaaggaagtcatctcgcttctcaaataccgtgttaatttggtgagtgttgctcttttcattgggcctcacttttcccttcctcattctcagatgtgtttgtacaggactttgcacactgcagtgttttcctgtggtttttgtttcttttcttcacccaagtccagtgagctgtgaaggaaaaaaaatccttattccttcagagcagggacgagcattgaaatgatttgcccaggtcagctggctattgagtgcttttgttgggatgaaattctccaccagaaaaatcctaaaacagaagtccccaagaatgggtggtgtgtgtcgtccactgaaaagggagttactgaaaactaggaatgcgtggcctctaggaaacatggcactgttgtgatttggcacatagatatttggcatacatattcccagggtcactgagtaaattcccaactgttccagttctcttttgctgcatgacgaagaacaccaaaactttgggtcaggattcggtgggttgggcagggctctgcagggatggctcatctgtcctccatgaggcatcagctagggcagagcctccaagaccattttttctcgctcatatcaggtgcctctgtgtgtacaacccacccactcacctacccactaaaagaaccattctttgggttgcttgttaaaaattgcatttcaggccgggtgcagtggctcacacctgtaatcccagaactttgggaggccaaggtgggcagatcacctgaggtcaggagttcaagaccagcctggccaacatggtgaaactccatctctactaaaaatacaaaaattaggctggcatggtggcaggtgtctgtaatcctagctactcgggaggctgaggcgggagaatcacttgaacatgggaggcagatgttaccatgagccaagatcacgccactgcattccagcctgggtgacaagagtgagactctgtctcaaaaaaaaaaaaaaaattgcatttcagatctactaattcaggatctcaggagggaggacccagccatatacatttttagcaaattcctagagaatttgctaaagcccagaaaagtttgcaaaccagggctctgttaaagactgttccagattcctgcccctcagttgtacctctagttgcccctcaagctaacaccaaggcaaattgtttgcaatggagccattgtttggtctggggtaactctctgatatctaggatatgtactggaaacttccttcaagcctcctgcctggcctctttccctgcttttgcagccactcctctacatacattggcacaggtgctcccacccaactttaccacctaccccccaaaagggaacttctaagaacctgtggctgggctcgaccttggcactgagtctaggagcagttgcctccacctggcttacctccctgaagctttgggtccctggtctcctgatacgcacttgtcagggctggctcataatgctgggatccatatggataaatgaaaatgtggggccccactctgtcgcctgggctggagtgcaatggcacaatctcagctcactgcaaactccacctcctgggttcaagcagttctcgtgcttcagcctcctgagtagctgggactgtaggcatatgccaccacaattggctaattttttttgtatttttagtagagacaaggttttaccatgttgcccaggctggtctcgaacttctggctgcctcaagtgatctgccctcttggtctcccaaagtgctgagattacagacatgagccactgtgcccatcttgtgtttgtttttgttttgttttgttttttgttttttaagagacacggtctcactctgtcgcccagggtggagtgtagcgacgcaatctgagctcactgcagcctcaatctctcaggctcaagtgatcctcctgcctcagcttctcgagtagctaggaccaaggtgcacaccaccacacccggctaatttttttgtatgttttgtaggatggggtttcgccatgttgcccaggctggtctcaaattcctgggctcaagcaatcctcccaccgcggccttccaagtgttgggattacagcgtgagccactgtgcccggccaatgggctctccaaggccacattaccttagacattgggatacttacatgcaggtgtccacaggtgcctgagatctcacatccacccgaccctctctgcctccacacccaggcctccaccaggagccaagggggccgcaatcactaggcaagggcagggggttgagtggccaagagcccgtcccagggaggcaggagagagagggaggcaggaccacataggagccagggctcccggcagccagtgcacactccattgtcccatcagagttcactgacgaatctcagttcaaagatagtatcgtaaagagtttcaagatggggccctgggagcattgaactccaagcacaggccctcgcaggggtcccactgcaggaagccggccctgctgctgaccctgcccacctccctcagctccttggtcctgtcgggtctccctgctgaccccatggcactgctccacgctcctgtctgtggggcccccgtctgtccccacctagaattctgtttccataccaaggcctaaccaatggcccctgaccccgttcagtgttttgaaccagccactcctgtttttggcggccctgccctcccatgaatctcacgcccacggctgccctcggatctggagacagttgcacttgttatctggtatcagcactagggaggctcagtcaagccagcactaacggtgggtttggtgtccttgggacttctccacccagggcctgtgccaaggctggtcctcagtgcttggtcaagagtggctctggcggctctggggtggtggcctctgcagctcagtgcccctgccacccatgctcactggatgggggcaacacccttcctcccagttcagggtggatgggccccagagcaccacccagccagccaagcctccttgcccctgccctgccctccgaatggcccagatcatacctgctgcctttctttcctagctcactgcctccacccaagtcaccttctgtcctgactcccaaggacttgggtcccactggggaagtcgggaggaaatgggaagccttcctgactgtgagtgagggcaggaggggaggtggggtcagagagggcacctggagggtggcaggagagagcaggagagcgtgagagaggtggcagaggagggggtgcgagtaagaagagaacaccatcattgtttaccaaacctgaattacaccacaccaagttgtcctgttatttatttatttactcatttatgtattttagtgtgtttaattgaggttaaaaaaagaagcaagaaaagtgtttgcagattggctttatggcggtgagctttgcaatgatctctgaaaaagtccggggagtccggcaggcagatgagaatctaggcttgctggcgtatccagatgactcggaaggaggaccccagacggggaggggcagtgctgggagcaggaggcgtcctggtcaggctgtccatccatgtctacccagcaaatatttgcaggccctgagctcagcaggggaggaaatctcaggcaaatgagacacagactctgccctccagccgcttcggagaaaacagccgagaaggacactgttaaatggagtggcaagcccagagcatcaagggcatttggaggtggggggcactgctgcttggggacatgtagacagaatttatagaacgaggcccctggaaggatttctgcaggttgcagcagggtggaggagcgtcgccggcccggggccaggaagaagctcagggcacagggaagctggccacggggtgtcccatcacatcagagtggtgtgggctacggctggaaggggaggcaggccactggctgacacgccgcacagcagaccgtgaatagacgcatgagcgagtcagggagtcaggagagctctgaacacttgagttcatttcctgctggaggtgggagccgttgaaggttcttgagggcatccgtgaatgcaccggaactgtggtctagaaacgtcctagcaacagtgtgagacggggagccagcagagaaatcatcaaacagtctaggcagaaggtaacgagggccagatgtggtggtgtgcacctgtaatcccagctacttgggaggctgaggcaggaggatcacttgacctcaggagttcgagaccaacctggacaatgtagcaaggccctttcaaagaaaaaaaaaaaaggagttggggagagagagaaaaggtaatgagggtttgaagtgggctggggaggagaggagcactggagagatcgcatttggcagtacttgattaacgaagattgcaatgggggcgcactcaagctttcaacattgtcaccggaaattgggggaggtggtgccatgaaggatgccggggaagccaggtggagaagtcagtttgatggaacacagagatcatgggttccttcttgttggaggtgtctatcagaggtcttcaagtgacaaaaattcaactcagaggctgggtgcattgacttatgcctataatcccaacactttgggaggcagagacagaggcaggacttgagtccaggagttcgagactaccctgggcaacaaagtaagacccccatctctactataaataaataaataaataactcagatcagcctctacaaaaatgagaatgggttagcccacattgacaaaaagtccagaaagtgactttagttagatgcacgtccaccaaagctcatgttcgagcccaccatgtcccatctcctggttctgctttcttcctcagggagagcacctgccaggcagcagtgtcgctcagcttatgcgcagccagcttggggactacagcagctcatcctaacaagagaccagaacttcaggctggtctgaggcatgtgcccacctctgggtcacacgtcattcttgaagcagtgggcaagtcaaatatccccacccctcctgcacagaaaaggggaggatcccaagaagagaatgtgggggctgcctccaggaggagaagaaagacttgtgggtccactgcagacatccaggtggagatgtctggagcccaggggtcgggtaagagctacagccaggttggggttattgtgggaggagccgtaggagtgaatgagatcaggaaaggtggccggggtagacctaggacctagggacctaggaaagagacagacacgctggggaagaagcgtcagaggacagagggtgagacgcttgaaaaggaagtgggcgagaacagtgttgcctaaaaagagggagcccagttccctgaaggtgagggtgaagacaggccattgggctgagacgatgggcaaagggcagggtgtgggcagagctggtttgggacccagagcagtggaagggcagagcagcccttgccgagaccaagggacagcagggctgaatgaccgcaatgcagcacccgcttcgctttgcaaataaaatgcggactgcgcgagaaagcctggcttttagcgtccatgcgtgtccaggaacagcgaccagggcaagtgcttgagtgcgccaggctgggcgaggcagggagggactgagggctgggtccgggggagaggagtggccagggaggaggggcgacccaaaggcctccggtgatgcgctgacagaaggtaaaaacaaggaacaaagcaaaaccacacacaggacggcagcgcggagtccgggccctgccctctgcagcagcgcagcccggggactctggggctctccctgctgcctgtggaatttccaggccagcgcatctgattggcctggcctggggcagtgggtggggatttggatgtttccagagaagggaagatggcggtgagacagccgctcggcagctccagaggggtcgatcccgcgacaggggaagggggcgtgggcgtcacatggcagcgctgagacttgagtgctggaacagcccagcgaggaaggtcccaaagacagctcttttcaccaaagacaggccttgcgtttgcggtgcgggctccacccgcagttctgcttcaggtagaaaagggatgagggtgccgggccagcttgacccggtttccgcaggggcagaagcacttcctaccttcggcctgcagagcccctcaagcaacagggaaccacattctcctgcccttggaaaaagttgacccgcttcacagtgaagccagagaggcgaggtgggggcggcggggggatttggatgggacttccagacgcctttcttcttcccagtgcctacctagggatggggacgctaggacagctgaagctggcacatatctgatcactgttcctcaagcacctctttgtccatgcaccctccctgc

SEQ ID NO: 391 - DNA, 8083 bp, Homo sapiens
cttaaacccctgtcccaatgacgtcaagttcgcccgctggcttggaaggttcagacctatcttccatcaacaccatgatgtcggcggtcatgagtgtagggaaggtcacagagaatggcgggagcccccaggggatcaagtccccctcgaagcctccaggaccaaatcggattggcagaaggaaccaggaaacgaaagaggagaagtcttcctataactgccccctgtgtgagaagatttgcactacccagcaccagctgaccatgcacattcgccagcacaacacagacactggaggagccgaccactcatgcagcatctgcggaaagtcactgagctcggccagctccctcgatcgccacatgctggtgcactctggcgagaggccttacaagtgcactgtgtgtggccagtcatttaccaccaatgggaacatgcacagacatatgaagatccatgagaaggaccctaacagtgccacagccacagcccctccatctcctctgaaacgtaggcgattgtcctccaagaggaaactgagtcacgatgccgagtcagagagagaagacccagcaccagctaaaaagatggtagaagacgggcagtcaggtgacttggagaagaaagctgatgaagtctttcactgcccagtatgtttcaaggagtttgtttgcaagtatggactggagacccacatggagacccattcagataacccactaagatgtgacatttgttgtgtcacctttcgaacacatcgaggactgctgcgtcacaacgcgcttgtccacaaacaacttcccagggatgcaatgggcagacctttcatacagaacaacccttcaattcctgctggcttccacgacttaggattcacggacttctcctgtaggaagtttcctcgcatttctcaggcctggtgcgaaacaaacctgcggaggtgcatcagcgagcaacaccgttttgtctgcgacacctgtgacaaggcgttccccatgctctgctcactggctctgcacaagcagacccatgtggcggcagaccagggtcaagaaaagccgcaggccacgcccctgcctggtgacgccctggaccagaagggcttcctggccttgcttggcctgcagcacaccaaagacgtcaggcctgcccccgccgaggagcccctgccggatgacaaccaggcaattcagctccagacactcaagtgtcagctacctcaggaccccggctgcaccaacctgctgagcctgtcacctttcgaagctgcttccctaggcggttctctcacagttctccccgcgaccaaggacagcataaagcacctgtccctgcagcccttccagaagggcttcatcatccagcctgacagcagcattgtggtcaagcccatctctggcgagtcggccatcgagctggcagacatccagcaaattctgaagatggcagcctcggctccccctcagatcagtcttccgcccttctccaaggcccctgccgccccactgcaggcgatcttcaagcacatgccccctctgaagccaaagcccctggtcacaccacggacggtggtggccacctccacgcccccgcctctcatcaacgcccagcaggcttccccgggctgtatcagccccagcctgccgccaccgcccctgaagctcctcaaaggctcagtggaggcggcctccaacgcccacctgctgcagtccaagtccgggacccagccccacgcggccacgcggctctccctgcagcagccgcgggcggagctgccgggccagcctgagatgaagacgcagctggagcaggacagcatcatcgaggccctgctgccgctgagcatggaggccaagatcaagcaggagatcacagagggggaactcaaggccttcatgacagcgcccggcggcaagaagacgcccgccatgcgcaaggtgctctacccctgccgcttctgcaaccaggtgtttgccttctcgggggtcttgcgtgcccacgtgcgctcccacctgggcatctcgccataccagtgcaacatctgcgactacatcgccgccgacaaggccgcgctcatccgccacctgcgcacgcacagtggggagcggccctacatttgcaagatctgccactaccccttcactgtcaaagccaactgcgagcggcacctgcgcaagaagcacctcaaggccacccgcaaggatatcgagaagaacatcgagtatgtgagtagcagcgcggccgagctggtggacgccttctgcgccccggacaccgtgtgccggctgtgcggcgaggacctcaagcactatcgtgccctgcgcatccacatgcgcacgcactgcggccgcggcctgggcgggggccacaagggccgcaagcccttcgagtgcaaggagtgcagcgccgcgttcgcggccaagcgcaactgcatccaccacatcctcaagcagcacctgcacgtgcccgagcaggacatcgagagctacgtgctggccgccgacggcctgggccccgcagaggcgccggccgctgaggcgtcggggcgcggggaggacagtggctgcgctgcccttggtgactgcaagcccctcactgccttcctggaaccccagaacggctttcttcacaggggccccacccagcctccacctccccatgtctcgatcaagttggagcccgccagtagctttgcggtggacttcaatgagcccctggacttctcgcagaagggcctggccctggtccaagtgaagcaggaaaacatctcctttctgagcccttcttccctggtcccctatgactgctccatggagcccatcgacctgtccatccccaagaacttcaggaaaggggacaaggatttggccactcccagcgaagccaagaagcctgaggaggaggcggggagcagcgagcagccctctccctgcccagcacccggcccttctcttcctgtaactttggggcccagcggaatcctggaaagccccatggcccctgctccggcggccaccccggaacccccagcacagcccctgcagggccctgttcagctggcggtcccaatctactcctcagccctggtcagcagccctccactcgtgggcagctcagccctcctgagtggcacagccttgctgcgtccactgcggcccaagcccccgctgcttttgccaaagccccccgtgacagaagagctgcccccgctggcctccattgcccagatcatctcatctgtatcctcggcccccaccctgctgaaaaccaaggtggcggacccagggcccgcaagcactggcagtaacaccacggcttcagacagcttaggaggttctgtccccaaagccgccaccaccgccacccccgctgccaccaccagcccaaaagagtctagtgagcctcccgctccagccagcagcccagaggctgcctctcccaccgagcagggcccagcgggcacgtcgaagaagaggggccggaaaagggggatgaggagccgaccccgcgccaacagcggcggggtggacctggactccagcggggagtttgccagcatcgagaagatgctggccaccacagacaccaacaagttcagtccgtttctgcagacagcggaggacaacactcaggatgaggtggccggagcccctgccgaccaccatgggcccagtgatgaagagcagggcagtcccccagaagacaagctgctgagggccaagcggaactcgtacaccaactgcctgcagaagatcacctgtccccactgtccccgggttttcccttgggccagctccctacagaggcacatgctcacacacactgacagtcagtcggatgcggagactgcagccgccgcgggcgaagtgctagacctcacctcacgggacagagagcagccgtcggagggcgccactgagctccgccaggtcgcaggggatgcgcctgtggagcaggccacggcggaaacggcctcgccggtgcaccgggaagagcacgggcgtggggagagccatgagccggaggaggagcatggcactgaggagagcactggggacgccgacggcgcggaagaggacgcgtcgagcaaccagagcctggacctggacttcgccaccaagctcatggacttcaagctggcggagggcgacggcgaggcaggcgccgggggcgcggcctcgcaggagcagaagctcgcctgcgacacctgtgggaagagcttcaagttcctgggcaccctgagccgccaccggaaggcgcacggccgccaggagcccaaggacgagaagggagatggcgccagcactgcagaggaggggccccagcccgcccctgaacaggaggagaagccccccgagaccccggcagaggtggtggagtcggccccgggtgccggggaggccccggcggaaaagctcgcggaggagacggagggcccctccgacggggagagcgcggccgagaaaaggtcctcagagaagagcgacgatgacaagaaaccaaagacagactcccccaaaagcgtggccagcaaggcagacaagaggaagaaggtctgcagcgtgtgcaacaagcggttctggtcgctgcaggacctgacccggcacatgcgctcccacacaggggaaaggccatacaaatgtcagacctgcgagcgaaccttcaccttgaagcacagcctggttcgccaccagcggatccaccagaaagccaggcatgccaaacaccacgggaaggacagcgacaaggaagagcggggtgaggaggacagcgagaatgagtccacccacagcggcaacaacgccgtctcagagaacgaggctgagctggctcccaatgccagcaaccacatggctgtcacccggagccggaaggagggcttggccagtgccaccaaggactgcagccacagggaggagaaggtcacggcagggtggccgtctgagcctggccagggtgaccttaacccagagagcccggcggccctggggcaggacctgctggagccgcgcagcaagaggcctgcccacccaatcctggccacagctgatggcgcctcccagctcgtggggatggagtgacagcctcagtccccctcagcacagacaaaagccagcagagcaaagcgtctatacttcatggggtttcctcagtgccctttggctgttgaggagtgagagagagagagagagagagagagagagagacaagcaggagcgtggctgctcgctcagtgccatagccttaccgcagcctgcgcgggaggccacagcccgtgccgattccagtgccttaactacttaccggatccctccatattatcatgggtgttgtatttttccaaaatgacttcttaaacaaaacaaatattataatgaattgtctggagaggacctcttcatttgagcattagcgttattttgtattggtgtgtgtgagcttgttcttgtgaatctgtgatagcaccgtttgttctgtgagctggaaacagaaggaaaaaacatacccttgggtacccatagccaataactggaagaaaatgatgtgaatttcatgtaaatgaccagaggaaagatggataagatgataatttcttaaatagacattttccttttttctttgtgcttcatggtggagctgtcatctggtccttggtattacaggatgtggttgatgaaggtttccaatatggtttcaggccaaaaccagggaagattctagcttcagcctcatgtccatttccagtctgtcagcattagacatggtcactgttcaagtttcaagacatccattcttaactatagagaagagttactcccctggcgtcttaacctatggaaaacatgcacggataggatatatttgattgcctcctcttccctttcagtatatgtattattaatattattattattattattattattagttcatcagtttgctgttctctgcagtgagcagaatcaaatgggcaatatttgtcctgggagacctgtgccgcacccaggtccccgtgttaacgtgtgcctgcggttgtggttggcaccctcgggtggtagctcttctactgtaatgagacaagcctttcttctgtcactgcagaatttagaaggggccgtgagcagtcttcccaagcatggtccaggagcagctcagagagggtggagtgaggatgcatgcatccagggaacaggcatcaagaagccagggccgtgcctggagcactgcagagatgactttggagaaagcaaagcagtgacccagtgaccaggcacattactcgtgagcgaggtattcccagtcttcctgctaagcctaatccaagccttacccagctgtgctactgtcatttgcaaagcaaggaaatactactactggtaataaaactacacatgcaagatgtcagataagaaataggtttatatttaccttcctgcgatgtggggttggtgcttgaagataaatgtgctgtttctagtttcttaaatagcccacacccctggatgcaaaaaggcagggttatttttacccatgagcatcctgtgcaggcaatagacttccctcactgtctccgcctgcagggaggagaatgtaccccactgcacctgagctcctggtccctcagccaagacctcaggggtccccagccagcctgctgctggggacccctgtgcttgctgcagtgtatggagcctcttgccttcccctggggaggcacccctgtaccccagcttccttcccctggccttttctggccccagtgctcctcctttacatagacttgttcacacagaaacgtgcacgcccccttttctccgccacttcaccagtttctgaaatccaacctcccagacttcacaggaagatagatattcttgagataatgaaaagtgatatcttcgcatacgaaaggaaaaaaggttgaggtatatatgatttttaactgtattaggggtgtatgaaccagtttaaaaacgaggttttatttactgtagagatgaatgcaaatcagaaccaatgatcccttggcctacttagttaaaaccagttcatacatcccttagggtttttattattattattattattattacagttgttattgttgtttttgttgttattattatttggggtttcttgtgttttttctttgcgactctccacactaaacttgcaatattgtggggagaagctgtgactaaactctacgctgcggtgagatgtagcagtaatcagctcccagcgacgtgtgtagctggggctgccgctcgcaataatcactattgatttaaagctttacttagccttgatctgtaccctcgtagtcaataaggtcttgccacattttattagtgaggtggagaaacgtattatttgtttgttgtttttgcccttcccccaccccccaatattaaactgtgaaatttgtgatttgtttaaactctgggtgaatcatagcttagtttgcatgtccagctaatttgtttctatacattttgtttgattctctttctccttctctcagggcttttacaaaaaaatatatatatatggatcttctgaaaagttttttgaggtgcaagttttttctcttttttttttttttttttttttctcattgattaatggacatgatgctgagattcaatcactacatgaaacacctggctgtgaaaacaaaacaacccagagggctgtgttccaagcagcgctggggaagctacgtaacagtcggatgccagttttggaagattcaccatgcgttctgaccctctgttcgtctctttcctctcctctttcttcaagaaggaaattgatcctagtgatttcagcccatgcattaaacaggaaacaataataaatttgtagaattcatatttttctaaagggaacttaaaaactgctgctacatgttatgtacaaaactggtttatgccacatgaacagagaatcacaagtttggttttggtactttttgttcctctttgtattcagttgtatagaacttccaaattcagaatgagaagaaagctgttctgtatcaaaccatttaagcaataaatgttatattttaaaagctgca

SEQ ID NO: 392 - protein, 1669 aa, Homo sapiens
MTSSSPAGLEGSDLSSINTMMSAVMSVGKVTENGGSPQGIKSPSKPPGPNRIGRRNQETKEEKSSYNCPLCEKICTTQHQLTMHIRQHNTDTGGADHSCSICGKSLSSASSLDRHMLVHSGERPYKCTVCGQSFTTNGNMHRHMKIHEKDPNSATATAPPSPLKRRRLSSKRKLSHDAESEDPAPAKKMVEDGQSGDLEKKADEVFHCPVCFKEFVCKYGLETHMHSDNPLRCDICCVTFRTGLLRHNALVHKQLPRDAMGRPFIQNNPSIPAGFHDLGFTDFSCRKFPRISQAWCETNLRRCISEQHRFVCDTCDKAFPMLCSLALHKQTHVAADQGQEKPQATPLPGDALDQKGFLALLGLQHTKDVRPAPAEEPLPDDNQAIQLQTLKCQLPQDPGCTNLLSLSPFEAASLGGSLTVLPATKDSIKHLSLQPFQKGFIIQPDSSIVVKPISGESAIELADIQQILKMAASAPPQISLPPFSKAPAAPLQAIFKHMPPLKPKPLVTPRTVVATSTPPPLINAQQDGCISPSLPPPPLKLLKGSVEANAHLLQSKSGTQPHAATRLSLQQPRAELPGQPEMKTQLEQDSIIEALLPLSMEAKIKQEITEGELKAFMTAPGGKKTPAMRKVLYPCRFCNQVFAFSGVLRAHVRSHLGISPYQCNICDYIAADKAALIRHLRTHSGERPYICKICHYPFTVKANCERHLRKKHLKATRKDIEKNIEYVSSSAAELVDAFCAPDTVCRLCGEDLKHYRALRIHMRTHCGRGLGGGHKGRKPFECKECSAAFAAKRNCIHHILKQHLHVPEQDIESYVLAADGLGPAEAPAAEASGRGEDSGCAALGDCKPLTAFLEPQNGFLHRGPTQPPPPHVSIKLEPASSFAVDFNEPLDFSQKGLALVQVKQENISFLSPSSLVPYDCSMEPIDLSIPKNFRKGDKDLATPSEAKKPEEEAGSSEQPSPCPAPGPSLPVTLGPSGISPMAPAPAATPEPPAQPLQGPVQLAVPIYSSALVSSPPLVGSSALLSGTALLRPLRPKPPLLLPKPPVTEELPPLASIAQIISSVSSAPTLLKTKVADPGPASTGSNTTASDSLGGSVPKAATTATPAATTSPKESSEPPAPASSPEADTEQGPAGTSKKRGRKRGMRSRPRANSGGVDLDSSGEFASIEKMLATTDTNKFSPFLQTAEDNTQDEVAGAPADHHGPSDEEQGSPPEDKLLRAKRNSYTNCLQKITCPHCPRVFPWASSLQRHMLTHTDSQSDAETAAAAGEVLDLTSRDREQPSEGATELRQVAGDAPVEQATAETDVHREEHGRGESHEPEEEHGTEESTGDADGAEEDASSNQSLDLDFATKLMDFKLAEGDGEAGAGGAASQEQKLACDTCGKSFKFLGTLSRHRKAHGRQEPKDEKGDGASTAEEGPQPAPEQEEKPPETPAEVVESAPGAGEAPAEKLAEETEGPSDGESAAEKRSSEKSDDDKKPKTDSPKSVASKADKRKKVCSVCNKRFWSLQDLTRHMRSHTGERPYKCQTCERTFTLKHSLVRHQRIHQKARHAKHHGKDSDKEERGEEDSENESTHSGNNAVSENEAELAPNNHMAVTRSRKEGLASATKDCSHREEKVTAGWPSEPGQGDLNPESPAALGQDLLEPRSKRPAHPILATADGASQLVGME

SEQ ID NO: 393 - DNA, 5543 bp, Homo sapiens
gtggctgcgctgcccttggtgactgcaagcccctcactgccttcctggaaccccagaacggctttcttcacaggggccccacccagcctccacctccccatgtctcgatcaagttggagcccgccagtagctttgcggtggacttcaatgagcccctggacttctcgcagaagggcctggccctggtccaagtgaagcaggaaaacatctcctttctgagcccttcttccctggtcccctatgactgctccatggagcccatcgacctgtccatccccaagaacttcaggaaaggggacaaggatttggccactcccagcgaagccaagaagcctgaggaggaggcggggagcagcgagcagccctctccctgcccagcacccggcccttctcttcctgtaactttggggcccagcggaatcctggaaagccccatggcccctgctccggcggccaccccggaacccccagcacagcccctgcagggccctgttcagctggcggtcccaatctactcctcagccctggtcagcagccctccactcgtgggcagctcagccctcctgagtggcacagccttgctgcgtccactgcggcccaagcccccgctgcttttgccaaagccccccgtgacagaagagctgcccccgctggcctccattgcccagatcatctcatctgtatcctcggcccccaccctgctgaaaaccaaggtggcggacccagggcccgcaagcactggcagtaacaccacggcttcagacagcttaggaggttctgtccccaaagccgccaccaccgccacccccgctgccaccaccagcccaaaagagtctagtgagcctcccgctccagccagcagcccagaggctgcctctcccaccgagcagggcccagcgggcacgtcgaagaagaggggccggaaaagggggatgaggagccgaccccgcgccaacagcggcggggtggacctggactccagcggggagtttgccagcatcgagaagatgctggccaccacagacaccaacaagttcagtccgtttctgcagacagcggaggacaacactcaggatgaggtggccggagcccctgccgaccaccatgggcccagtgatgaagagcagggcagtcccccagaagacaagctgctgagggccaagcggaactcgtacaccaactgcctgcagaagatcacctgtccccactgtccccgggttttcccttgggccagctccctacagaggcacatgctcacacacactgacagtcagtcggatgcggagactgcagccgccgcgggcgaagtgctagacctcacctcacgggacagagagcagccgtcggagggcgccactgagctccgccaggtcgcaggggatgcgcctgtggagcaggccacggcggaaacggcctcgccggtgcaccgggaagagcacgggcgtggggagagccatgagccggaggaggagcatggcactgaggagagcactggggacgccgacggcgcggaagaggacgcgtcgagcaaccagagcctggacctggacttcgccaccaagctcatggacttcaagctggcggagggcgacggcgaggcaggcgccgggggcgcggcctcgcaggagcagaagctcgcctgcgacacctgtgggaagagcttcaagttcctgggcaccctgagccgccaccggaaggcgcacggccgccaggagcccaaggacgagaagggagatggcgccagcactgcagaggaggggccccagcccgcccctgaacaggaggagaagccccccgagaccccggcagaggtggtggagtcggccccgggtgccggggaggccccggcggaaaagctcgcggaggagacggagggcccctccgacggggagagcgcggccgagaaaaggtcctcagagaagagcgacgatgacaagaaaccaaagacagactcccccaaaagcgtggccagcaaggcagacaagaggaagaaggtctgcagcgtgtgcaacaagcggttctggtcgctgcaggacctgacccggcacatgcgctcccacacaggggaaaggccatacaaatgtcagacctgcgagcgaaccttcaccttgaagcacagcctggttcgccaccagcggatccaccagaaagccaggcatgccaaacaccacgggaaggacagcgacaaggaagagcggggtgaggaggacagcgagaatgagtccacccacagcggcaacaacgccgtctcagagaacgaggctgagctggctcccaatgccagcaaccacatggctgtcacccggagccggaaggagggcttggccagtgccaccaaggactgcagccacagggaggagaaggtcacggcagggtggccgtctgagcctggccagggtgaccttaacccagagagcccggcggccctggggcaggacctgctggagccgcgcagcaagaggcctgcccacccaatcctggccacagctgatggcgcctcccagctcgtggggatggagtgacagcctcagtccccctcagcacagacaaaagccagcagagcaaagcgtctatacttcatggggtttcctcagtgccctttggctgttgaggagtgagagagagagagagagagagagagagagagacaagcaggagcgtggctgctcgctcagtgccatagccttaccgcagcctgcgcgggaggccacagcccgtgccgattccagtgccttaactacttaccggatccctccatattatcatgggtgttgtatttttccaaaatgacttcttaaacaaaacaaatattataatgaattgtctggagaggacctcttcatttgagcattagcgttattttgtattggtgtgtgtgagcttgttcttgtgaatctgtgatagcaccgtttgttctgtgagctggaaacagaaggaaaaaacatacccttgggtacccatagccaataactggaagaaaatgatgtgaatttcatgtaaatgaccagaggaaagatggataagatgataatttcttaaatagacattttccttttttctttgtgcttcatggtggagctgtcatctggtccttggtattacaggatgtggttgatgaaggtttccaatatggtttcaggccaaaaccagggaagattctagcttcagcctcatgtccatttccagtctgtcagcattagacatggtcactgttcaagtttcaagacatccattcttaactatagagaagagttactcccctggcgtcttaacctatggaaaacatgcacggataggatatatttgattgcctcctcttccctttcagtatatgtattattaatattattattattattattattattagttcatcagtttgctgttctctgcagtgagcagaatcaaatgggcaatatttgtcctgggagacctgtgccgcacccaggtccccgtgttaacgtgtgcctgcggttgtggttggcaccctcgggtggtagctcttctactgtaatgagacaagcctttcttctgtcactgcagaatttagaaggggccgtgagcagtcttcccaagcatggtccaggagcagctcagagagggtggagtgaggatgcatgcatccagggaacaggcatcaagaagccagggccgtgcctggagcactgcagagatgactttggagaaagcaaagcagtgacccagtgaccaggcacattactcgtgagcgaggtattcccagtcttcctgctaagcctaatccaagccttacccagctgtgctactgtcatttgcaaagcaaggaaatactactactggtaataaaactacacatgcaagatgtcagataagaaataggtttatatttaccttcctgcgatgtggggttggtgcttgaagataaatgtgctgtttctagtttcttaaatagcccacacccctggatgcaaaaaggcagggttatttttacccatgagcatcctgtgcaggcaatagacttccctcactgtctccgcctgcagggaggagaatgtaccccactgcacctgagctcctggtccctcagccaagacctcaggggtccccagccagcctgctgctggggacccctgtgcttgctgcagtgtatggagcctcttgccttcccctggggaggcacccctgtaccccagcttccttcccctggccttttctggccccagtgctcctcctttacatagacttgttcacacagaaacgtgcacgcccccttttctccgccacttcaccagtttctgaaatccaacctcccagacttcacaggaagatagatattcttgagataatgaaaagtgatatcttcgcatacgaaaggaaaaaaggttgaggtatatatgatttttaactgtattaggggtgtatgaaccagtttaaaaacgaggttttatttactgtagagatgaatgcaaatcagaaccaatgatcccttggcctacttagttaaaaccagttcatacatcccttagggtttttattattattattattattattacagttgttattgttgtttttgttgttattattatttggggtttcttgtgttttttctttgcgactctccacactaaacttgcaatattgtggggagaagctgtgactaaactctacgctgcggtgagatgtagcagtaatcagctcccagcgacgtgtgtagctggggctgccgctcgcaataatcactattgatttaaagctttacttagccttgatctgtaccctcgtagtcaataaggtcttgccacattttattagtgaggtggagaaacgtattatttgtttgttgtttttgcccttcccccaccccccaatattaaactgtgaaatttgtgatttgtttaaactctgggtgaatcatagcttagtttgcatgtccagctaatttgtttctatacattttgtttgattctctttctccttctctcagggcttttacaaaaaaatatatatatatggatcttctgaaaagttttttgaggtgcaagttttttctcttttttttttttttttttttttctcattgattaatggacatgatgctgagattcaatcactacatgaaacacctggctgtgaaaacaaaacaacccagagggctgtgttccaagcagcgctggggaagctacgtaacagtcggatgccagttttggaagattcaccatgcgttctgaccctctgttcgtctctttcctctcctctttcttcaagaaggaaattgatcctagtgatttcagcccatgcattaaacaggaaacaataataaatttgtagaattcatatttttctaaagggaacttaaaaactgctgctacatgttatgtacaaaactggtttatgccacatgaacagagaatcacaagtttggttttggtactttttgttcctctttgtattcagttgtatagaacttccaaattcagaatgagaagaaagctgttctgtatcaaaccatttaagcaataaatgttatattttaaaagctgcagattgccggtcacgtggcc

SEQ ID NO: 394 - protein, 748 aa, Homo sapiens
MEPIDLSIPKNFRKGDKDLATPSEAKKPEEEAGSSEQPSPCPAPGPSLPVTLGPSGISPMAPAPAATPEPPAQPLQGPVQLAVPIYSSALVSSPPLVGSSALLSGTALLRPLRPKPPLLLPKPPVTEELPPLASIAQIISSVSSAPTLLKTKVADPGPASTGSNTTASDSLGGSVPKAATTATPAATTSPKESSEPPAPASSPEADTEQGPAGTSKKRGRKRGMRSRPRANSGGVDLDSSGEFASIEKMLATTDTNKFSPFLQTAEDNTQDEVAGAPADHHGPSDEEQGSPPEDKLLRAKRNSYTNCLQKITCPHCPRVFPWASSLQRHMLTHTDSQSDAETAAAAGEVLDLTSRDREQPSEGATELRQVAGDAPVEQATAETDVHREEHGRGESHEPEEEHGTEESTGDADGAEEDASSNQSLDLDFATKLMDFKLAEGDGEAGAGGAASQEQKLACDTCGKSFKFLGTLSRHRKAHGRQEPKDEKGDGASTAEEGPQPAPEQEEKPPETPAEVVESAPGAGEAPAEKLAEETEGPSDGESAAEKRSSEKSDDDKKPKTDSPKSVASKADKRKKVCSVCNKRFWSLQDLTRHMRSHTGERPYKCQTCERTFTLKHSLVRHQRIHQKARHAKHHGKDSDKEERGEEDSENESTHSGNNAVSENEAELAPNNHMAVTRSRKEGLASATKDCSHREEKVTAGWPSEPGQGDLNPESPAALGQDLLEPRSKRPAHPILATADGASQLVGME

SEQ ID NO: 395 - DNA, 194186 bp, Mus musculus
  misc_feature (1)...(194186): n = A,T,C or G
agaccaggctggccttgaactcagaaatccgcctgcctctgcctcccaagtgctgggattaaaggtgtgtgccactacgcccggctcaccactacttcttaatttgtcacatgcagttaattctatttgatctccatgatcctggctgctaggaccagaaaacctagttggttgtaaagacagctatccatgagtcagcccacagccaggtacataacccagtggactacttctacacagtaagaatattcaggacttctaactatgagctgactaaaccagatcctctcatcttccagtgtttacatctggaaggcttggtttaagttctttcaaacccactgctctcttctataacattcttcttttatcataagatgtcattggttaagagtctgattacaccagatattgccccgctcccccgagtttaacaaatgtgttgatcagctttgtaacctggaataactcacttaatctccaacaatattccttgtcttgtctccacatgtgacaggcagaatgatggccataaatgtgtccatgtcctgattcctgtaacatgcaaatatgtggagattttgcagttgtaactaaattagaaacctagagatgggcatctctgctattcatgttagtctggtatgatggcaaaggtccttaaaataagattcaaatttccccagctgtagtaaagaggagatgtggccagcaaaaggtggtgtgagaggcaatgtagagactagaggctatagagatggaggaagggaacattgagcgaagcaatgtggagaaagaggaggaaacagattatcccccatctagagtagaggagtcctgccacgtccacaccccaacttcactcagttagatttgtgttagacttctaaccctcagacatataagacaatgaatacgtgctgtgttaggctgctgtgtctatggtaactcgatataggagcattaaaaacctaaacattatattagatcacactgaatacacatgaggaaatgtctaaaggaatgtgtactttgatataatgttgaatacagcatcttttatggatgattaaggctctgtggtctcatcattaagaatatgttatttgagagatgaataaaaaatgaagatactaaagaatatgtaattcatactaaaacaagggcccctcatgctctgtttggctgctgcagcataatgaactatctaggaggtgatttaataaccattctgtattgatgtacagctctcaactattatacaaagggaaaacccagagtgatagcaagtcactcctactgtctccgtcttctgatccacctctcaggtctaaggtctgtattcacaacatctacgtgaggttctactgtattatatacttttattacatgtagtcattttttaatttcatcattgtatataactaataacagccatatataattatagtgatagtatggtgtggtatacaccatcctgtagaatgatatcaagccagttaccatactcattaccttgaatatttactgtatttacttatttttcctgttcatgactttctggtctttggacaacatcttcagccctgataagcaaccttcgaccttgtttctataagttcaatacatattaatgagaatgggtgggtttttggcctatgtctggcttatttcactgttgtaatattctccatccatgtcatcacaaaagaaagactcctccttctaggtctgtcactactacacagtgcataggtaccacttttcctctatctgttcacccactaatgattcttaggaaggtcccatacttttgctattgtgaaatatgttgcatgaatttgggagcagagaggactttctaacctagcgatgtcaggtcctttggttatatagccagaggtaggtgtgttgactcagtactgccttttaaaatagtttgcccctttgctaacaaaccagccttttaagtatcctttgtgccttcccaggtctttagcataacctaagttttgtgatgtttcttgacatggtgcattttacaacagtgtctcatggtgatgatagaggctaacattaaagggatacttcaaaaggcattagagatgctgtggccatgccttgtccatcctcacagttgctcgaaggcctcacctacaacctgaaaagctctccaaggcctattcacagcccaccagagtcaccaggaaaggactattaaccagaatagagttatcgttattgctgataagcacagtaaagagagctgactgttcattagaagacccttgtgaattacttaagaacatggcttggctgagctaaaaatctagagtatgctcacgaataccagtttcccaattgagcaagaatgtctgagtccttatcacagcctaccatcttctagactcaagtgaccctaaatgcaatttggcatttggacaggacattggaaactttgcatgactcagttagagaataatgcaaagctgtttcccaccaagccactttgatctatgtggagccaaatacctgggtctgtcatgtgataagctactaaaccagacagggggaaagagggtagatttttagtagagatcttagtagtttcaatcatggttctatttatcaaatgtttactagattccaaatatgtgttctccaacatgtgggaactgcccaagagcatcctgcaccccatgcaaacagatttagcaattccacagttcagccaaagggtctatagctgaccaggatactaggtaaatctaaggactgcattgtaaaacgttattcagtcaatgaggataaataagcaacagtttcttggccttagaagccttgcaaacaggagacaaaggcaccattgtgacattttgtgatgaatgaaatgaccgagatggaggaaaaagataattcttcgggacatgggatgttgaaggccatacacggccatgttgccagaaagagaaggatggagggcttttaaggccatgctataattatgagaggtcacagaatacatgagaacagtgtgttccatgttataggaagatgaaggctactggtgaatgtggacaaggctagtgagaacctaagcaaataacatgggtttggaggagctgagtcatttcagtttcatcttgtaaggagcaagggcctggtagacatctttaaagagggaggacatgtctgggaatatcgagcaccatggagatgcttcttcagttaatgtctcccaaaggcttgttgtcctgtcaagctgcacccatagcttagactgggaagtgtataaacagtaggaacttcatggtcatgatgctggctggtctggatagactcctggcatcacaggtgatactttccagtggcgtggccaccagttgtaagggcctaacaagctcctctggaactcttttatatgggcacaagagcagtcagaggggtgacaccttcatgccttaaccaccatccgtaacaaactttaatcacaatgaaaggtgcctttcaacaactgaagcttagagaaacacaaatatcccaggtcgttgtacctgctgcacgcccttctcagtatggacattagaaaatggccatcacagctaagaattgctgtagtagtccaagcaatacaagtgtaaactgagtggtggcacaggtgggcacagagaagcctaaggggttaatatggtttgaggtttatttatttattttttgacaaagcaactggaaacaacttttatttattatgacatgtatgaacttaagttagactttgtgttgccagtgccttgccctgcccagctcactggagtgcagggttttgcacctgagggcaaggctgtgaatggagatgggtgggaatggagaagggtgggaatggagagagcatgcagagaggctttttctggtctggataccatgagcacccccaccaagagcaggagaaacaatgaacatgttgggcctaacagtgaaacttaggcaacaggcaaaggaagagccttaactggcccaaggaggagaggaccaaggctgccaggtgtctataaaagaaagcagttcttggcccttcctttttgtttcagggctagggattgaactggggtgggggtgttggcatttagtctaggttgtgccccacagttatctggcaacatccaggtgtgcctggctcactataaaaggggctgcttgccccctcctctctctcttgctctcttgctcctgcccccccccatccccctccctcttctctctccacatgttcatggccagcctctactcatttactctctctttctgcctttctctgtctctactaccctctcaattccccccacccccaccccatgccctgaataaactttattctatactataccgtcatgtggcttgtccctcagggggaagggatgcatgtgcccacggaggcacccccttccccaacacctggctacacattcaccaaacatattcctcctctccttatatttttataaaatactcaggggggaagggatcttatgaatggtaggcaagtccttaaccactgacactgcccagcccttcatagtactgtataaacataaaccccctctagtatccccatcatcaggattaccaaggatgcaattaggaagaacacgggtgaagagccaggggttagaggcatggatccagatgaaaggagtgcactggggagaaagggggtggaaaagaagaagcagaggtacagaaaactggatataaagggagacgagaagacaaagccagcagagagtatgcaagggagggatacatacagggaggatgtagacaaagagctttgtttctgtgacagtgaagtgacagaaagaaaagaataggttggattctattgaaattgctattatcttattctaaatcactccatgcagactaaacagaataaacagatgctactggggttattagttaaaaatatctcaatttaaaagcggtaatcatttctcctgggatggtgatgacggagtcagagggatgagcgtgtcacatgaaaaggagaggggagagacggaggggaaagtagacatgtatgtccagcacagcagctggcagtccctttcggtgcctggagtggcaccagggattacagatgtgtgtggcagacaggaggtgtggtttgacactttttagttgcatagtcaagtaggcaaagcaggaaaatctatcaaatggttctatcagatgagggtgctcctcagtgctggatctgggcatctcttttcagagttgacacagatggattgccgtcttcatttctgagtagtcacaagacaaacgagcagaggccagggaaacagaggaactcaacctttcgagcccttgaaagcagctatgcagctctggcctttcctagtcttaagagtaagttgccttcaggtgactgctggtggaaccagaatggccgctgggttccctgctctcagaaatagggtgtgacggtttcatttcatgctctgtttgcatggcgcttcaagggcaagactgtacattgacactggatatgcacaagagtgtacatgcacgactgtaaattcacaatgctgcgtatgtttctataaatacgtggggagggtcccaggagattgtatctgaaacagaaagcaagggtttgttgtcagcaaaaggcacaagagaactgaaattagggccgatagtcagtggaactgaaacttggtttaccagattagcttgttacaagaggaatttattaagtgtgggatttaaaatttgatttaagaattatagaaaaataatcggtaataatatttttattttttttcagaagtcaaaaatgtttactattcagtaacgaagtgagtgattttaagaaaatttacagcattggtaaattttaaatgttggacttatatttcactggagaaggcctgtccatcagtagttggctttcaaatcccatacaaagtagaattacaacctagtaaaggctaattttagaatgaaagtgttcatatcatttctttttatcatgttaatgtgatgttgttggtttttttaaagaagcaaaaaaggtacagaaagatattaaaacaataaagcaaaatacaagttacaaagaaattagtgtttgctagaagtctaaaagcaaagagaagtgctctcaatgaatcagaatcctttagactcctacccattgtctcttataaagaagtcggtctcccctctgctctcttctgtgcccttgcttcctcacacactggcctctaagccaggacagtttcatctttgcaaatgccacctacctcctaataacctaataacctaataacctaataaccattcctgaaaatggtgaccactgatatccttctaaaggagtgatgtgtgatgctacagttgagaggagtacagactaggcagagtgattagtacaattcaagaaacagtgacattctccaaagccgtaaataagatttatagagaatagaagttgattggccagtgagtcttcagttgtaggtaattgctatgggaggcagaacacagtgctagcctgggcctctcctgtttttatgaagccattaacaccatcaaaggggacccttcctcaaagtctcatctaatctcaaccacctccaaatgaccaacactctgtgaggttgaggactgcgtttctaatacacaaatttgcagcagcacattcgggtaatggccttgctgagtctatgctgagtctatgtcttcactgaggtggagtcagggccgagtgaactaaggcatcacaaatgcgtatggaaggagcagggagcgtgcaggatcacatgggcccagaaggagcagggagcgtgcaggatcacatgggcacggaaggaggagagaagaggctagatcttgactttagttttctgcaactaaaaaggaacagcacaacactgtctcccatgcctgagcagggatcaggtaagaaaatgatggagaacttcgttgttaatgaatttgccaaaccaacacttgagcatacttatttgaattcttcagtggggagcagatttccagtggcttggaatgttttcaattgtggaaggaaaggagccaaacgagtgggaatcgtatgtgcacacacacatacgcctgcctacacggctacacctcaattagcccctttatctctagtgtttatctctgtccccttcctcctaattccgtacatttctcccttagaccaaacatccatgacaaagacagacctgctgtctgaggttagctgctatgtagcggagagttgtaaaccatttcatggtgttcactgagatgtcagccaacgggacagcaccaagaagccaattaaagcagccagagagcgtgcttaagcatggatggaaacgcaaacactgtcttcactgccccaagtggttagacatttcttgcttgtttatttttgtgagaaccatctgtagttcataattatttttgacaagcagcttgacctgccactaaccaaacagaagagaaacaacaaaacaaaacaaaaaaaaaagaaggtaaaaatccaagaacccaagtaagaaaccacatacagaaattctacatcttatcaactgtgaaaaaaaattgtttttctaaaataattctgatatggtttttttggaacaaattctcagttcatcagttgcctttaaagaagcatcctctctctctctggtctgagaggtatgtatggggattatatatgcctgtgtgtgtgtgcgtgtgcgtgtgcgtgtgcgtgtgtgtgtgtgttcaggtgtgcttcctcatgagtacatatgtggaggccagaggttgaagttgagtatattcctttatcactttccaacttatgttttgagacagggtctctcactgaacttattgctcaccagttcagctagactgactgaccagatgccaacccctgtccactagcctgtccactgttaagtatcagcgttacagacatgagctgccacatctggtttttatgtgggtgtcgtcacatctgcctggcaagcacgttccctactgagccagcacccacatatgtgtagcactgatttacaaggagactctgctgacatttgatatactataaatctgtaaattacatcctaatgttcagacatttaaattacacatcatgattaaatgtccaatgaaaaagtaatcctttaataacaagaaatgcatacagggatacttagacaaaatatgcacaggcctttttctctgtaccaccagctcattatgaaaactctgtgctattaaacaacaacaacaacttgccagatgagtaatctactcagaactcagatgaggtctggattcatagcttgtgctcaagaattatttgtaagaggaagttatctgattcacttcagacacatgtgggagaatagatggagatgtaggtgttggtgtgtttataaatcactctgcaagtctcgagctgagttgtatttctctattcgcccaaagtggtgtctgtttatgggtagaatatcttcagtgagaatttttgcaatcttagactgggctggttgactactgagtttccctcatagaaggtggaggatgggagagtcatgggatactcttgagtatctagttacttctcccaaccagtttcatgaaattcagtcctaactgcatatggttccaaaggtctcaagaaggggctagaacatacatgcaggtagagaaggactaggggaggggtctgtatccacacagccctgggatgaccatcatccatgttggatacagaccttcccgtgtggttgctttaagctcgcctacatgcctgcccctcacccctcttccatactctgtaagtaacccaaataaactctctggttccctagggttcactttggcttgccattagaacctcatgaggagggaaggtgggaggtccctcctcatggggggaaatctcaccatagcagcttggcaccaaagaggaacaccaggcatccatacatgtttaagagcatttgtcattcaaatactccttctcttttctctcaatctgctatctccccaagtaattccctaggcgactctcaggaataggaaacagggaagaagaaaatgaaaacccagatcaaaagatatagaattgaccctgataataacagcaagcactcatgtagtccttattttatgccagatgctaacccattcaatactcagaacactccacaatgtttcctgttgctcagaagaggacactgaggcacaaaagcgtgcaacataaaacatgactgatccagtggctcacttacctgctgcttagaagtagagaagaagaaaaggggttaggaccaggtggctttccacttccctcccactggttcaagtgtttttattcttacttcattgtaagttggaggttctccagtgaggatatagcccctaagtcattgcctactatatgccacaaataccataagtacttactatatgtcagaatgtcccatgtcaatttacagtagaaaccttcagaacaaatgtagtccatataaacaacaacaaaaaaataccaaaccaaatggctttttaaatagcctatattttcctgcaatgcaactccaaaaggccacttcaagtgaatttaaactcaacgtcaagatcactcctgtttcaaaccacagaaaagattacagaaaagaaatagttttgctacctactcaaaattataacatcttctcaacttattggacagtctgacagagaaagagaagtagaaaaatgaggagggagaaggaggacaaagagggggaagaggaggagggatgaagaagaggaggagggggaagagcaggaggagagggaggaggtggtggcagcagtacagagcggaaatgaattgagacaacatcgcctctcagcaaccggaaggaaaaaccccacacatgcacaggccacgaacatccgacgggtgtggttgctcagtagagaagagctgtcagctgcccttagatgcaaggaggggatctgcagagagagaagcataaggacacagagggacgagttcccatccctgcctgcctacctagaagagatcagggtgtccagggtcacaagatggtctgtccactgcggttctgcgttcaggtgagtgccagccccttgctgtggcttggggtgagggtagggctggcatgcattcagattcttacttcctgtgttggtgtcagacatccggccatgtctccagttaacaccccttaacagtggaagggagggttcagcctgccctggaggcagtttgacctggagcagacctggagtggctgtttctaggtcataaagagtctgatgatttctaccgtttaaaccttcctatttcagtgctgcttggtgtgtatgtatagggctcctcccttcgtgatgtcttcacagaacttaccctgaaggagataaagctctttgattatttcggtcctttaagcatagattacagttgtttgtgtcgtttgtggggggcggggctagaaattgtgactgcaagagtcctgccatatgtcatcagtaagttaatttatatgacaactatctagagagtgctcacaattgccagccctattttaagtcaaaacctagacaggaacgagcttatatagcaggagagaagtagacattaattaattcaaggaaggaagatttgctttcttctatacttcaaagttcttttcctgggtagtctgtgaattagcttggcctattagccagagaaaatagatttaattatatgttacataaagctagaagactcagagcatcagacaggtgactgaggctcatgtataatcagtccttaactgcagggagcaatctaggggtctggatttctagcaggtgctgggtcaataacatggcaatggagacaagcctgcatgtccttgatgtcctggagaatgccatttgcaatgacaggaaggcgatgttaactcagacgcaccaggtaccttctccatgggttagaatctctatggaagatgattaacatcttcctggtgcggacaatgacacgcactcataaatgagatttttttaaaagttgtagtttcttatatgaacaagcaagtgtcaatggttccatatctgtgatttcttaaaataaccccttaaaatatacaacatgtcataggggcatattttagatggcatattttggtggattcctacagtcacctttttgaggtattgtgttctgaaccccaaatgtgatgaaggccagaatatattctgggaaaaaatgaaccttccttggaatcagtaagggtccataaaaagcatggagataaaaactggattaaaaaggaggggttcaagtagcagtcggggggcagagagatcagccacacaaagctccgagaagagagatctgccgtcaaatgaagagagcacagagagatggaaaagacaagattgagcaggaatggggaaacggggaggcagcgtttaagatggtgtaagcaacagttctcaatccctttaggggttcaaacaaccctttcacagggtcatagcatatcagatatcctgcatatcagatatttacaatatgattcatagcagtagcaaaattccagttatgaagtagcacccaactcaattttatggttggggatcactacaacatgagaaactgcattaaagggtcacagcattaaggaagcttgagatccgctgctgtaggcgctctagggtatctgtgtggtacagcctcttgctcctgcagctatgatgaacaaattaacacaaaattacagcaagcactagagattgtatcaaggggttgcagggaacaaggaaggctgctgctggggtcatgtggtagaatattttgcagtcaaattgtattgtaacaatgagccttccaatgataaaaatgtacgggatagtcattgcctaaaccagcagcaggtaggtgacttgttattatcaggtaccacgtactgcactcaggttgggtatgccaggcttggatctgattggcagttgactcactcagtccctctctgcacagatgaaaaatgtggtataggatggcatggtgactgtgatctaaccaggagcaagactttttcagctccaccagaatgtgatgagacaggattgtatacttagcccatcactgacaaacattattcagcacatgactactatccagtggccaactgcccttgacttgaggcgttttggttctgagatctctcctatctattcaagggatgcagtcgtgggtaggggtgggtggcactcatcacccatctggtgtcattccggaaagagagcacatgaacaacctcaggaaaagctccttgtgacatgcatgacacatttctccaaaaggacatatcctgctacagatgctgcctttcctttgctggtgatcttgtccccccccccccccccccacaaatcacccggatgaaatttctagtgtggaacatagcatcgttttacatggtacaagatagcagcttgggtctgaatccagttgagtcatataaaaatttttattttgccatttcattgttttggtctattgattttagtctcagcaacaattttcagtgtgtatcagcatgatctgtgaggcctcattcaaaaatgttatccctgacccatctctctctttctttctctgtctctctatctctgtctctctgtctctgactctctctcatatgctgtctatttatggatagataaatagacagatgagaactgagaaaaataaagacttcaccctgcccaaccaatgcaggtttgaggaaagtacagcttttgctttttttttcatccacttctccatcacacaaaacccataaaccctcagtgaagggacccacgtaagtccctcccttctcaaagcccagggcctagagcagcagatcagatcagaagtgctggtcactttgcttgatgctagggagagccagatctcgtaaggtgctctcttgggagtttcccagtgatgtgttctctgcagttgcctatccctgctgcccagggtggctgctctgctaccacgccatcatccgaccgtatggcctgtgaagctctcataaccttccgactactttcaatgactctgaattccccacccacagcctcatttgcagtgagaggaaacatgtagaggaagcaagactgtgggtagctctgtgtggccctgccctgagaagcagagtggtgggccagagccttgggtcacaccaagggacacggcttcagcaagccatagtcatggactggccagaagctgtggctccctgctgctgcccagcatcacgagagcggatcggaacacacagagacaggcccaggatccacactcaaaagcccaagtgtggtttctactgagtgtgcatcactattaccccataagagagttaaaaaggcttcatttgggcctttgtaaattgaggaccatcttatatatacacaagtatatccagagtaaggtacctttaggatagccaagttgatgtataagatgatctgtctcagatactgttttgcttttcagaaacttggtattttcacagttgttgagggcctagtatgattcgagtaatgttctaggtcctgggaatgtagcatgaagttggcagacaagccccatcctcaagccaatcgtatatggaggcagaatagaaagtccaagaaaaagtaactgaaggatttatggtaaattgcacacctccgaaaatactgtgagttaggctaatgtcaatctcatttaaattttccctgtcaaaacagattagaatatactaagaaaaggagcaaagattttttttttaactttacagactttactatctatcaggggcaacaaatctaagggacttgatcatgggaaacacattctaacacctatacacagcatggtaaccattatatagctttcagtggtactggaacatataactcagctgtaggggaccagggcagtgaacaaattacatgcaattgtattcaaattaaaatggcagagtcatctgtgaacacttatttcgtgttcttcacaatctctctctctctctctctctctcatcatcatcatcagccagttaagagaaccacctcaaagtgacggctctcagaagacagaatcactggagagtgtgtgtaggtttctctgcatggctatttattttattaccctcatttcagtgcatgtgtgtgtgtgtgtgtgtgtgtgtgtgtgtgtgtgtgtgtgtatagagaacgggcatcagaaatggaggcattagcccatgttcttcagaactgggaatctatttgcttacaagagtgtgtctgtgctgccctgctgtgaaatgacacatgtgaccatgggcatggaaacagaacaaaagaggatcagcccttccttaaggaatgtagcagtcagaggcagcaggccaccatctgctctagtttagactgaccccaaaggtccctgtgttaaaggcattcattgtgccactgtgaaggtggaacctgcagggggtaagggttatcggagggaattaggtcactggatgcatgccccctgaagggaagttggggaccccaggcattccttttgtctcctgaccatgaggttggtggttttccttgccatatgcccacactattagatgcagccttgtcatgggcccaaagcagcagtgcgactaagcacgggcagtgctggttacttttctgattgctgtggcagaatactggacagaagcttatggttcaagagaggatgcagggcattggggtgaaggaggtttggcatcaaatgtgtctctagttgaggaggcaagggtgtgactggtcacattacatctgtagtgaggaatcagggaggtgaatgatgacatcagctggcttcctcctcttctcccattctcttcagtcttgtacctcggtccacagggtgtgcacttacattctggccgtgtcttttctccttagctaaactcagaaaagactaccacaggcagactcaaagatatatcacaggcagactcaaagacacatcacaggcacacacaaagacacatcacaggctcatgcaaaaaatgtatcataggcacaagctaagatatatcataggtgtacacaaagatatatcacaggcatatactaagatatattacaggcatacaaaacgatatatcacaggcacatactaagatatatcagtcacaaatgaagatatatcataagcacatgctagatatatcacaggtgcatcctaagatatgttacaggcacaaacaaagatatgccttgtaggtgattctagtgaagattagccatcacaagaactgaaaactctgaaacctgagccataataaacctttttttttctgtccagttggatgtctgaagcctttggttacagcgatgggaagctgaggggtgtttcaccccaaggtttcagtcagggctgggaagaccacaggggtggaactgcacactggcacacttcagagtggaattttagtaaagaaatcacggttaggacagactgctaattatctccaataagtaacccctactctcaagaatctctcctagttgagtggcgcagagaacacattttgatgagacaaaatcacattgaagacatacctaattatacaactaagtgaaagaagctagactgaagaagccctgtaatgtgtgattcccagatatggggcattctgggaaaggtgaaaccaccgagagatgaaagctcattggctgataatggctagcggggagaagaaggatgaggggacacagagggctttagaacagggcagtggcttcataggatgctacagctgtgaatgtttgatgttctacacttgaacaaaccagagtccccaacacttgagtataatccatgtactcattatttgtcgatgtaggtcaatcagtctaacaaatgcacaggtatggtgtgggatgctgacagtggggaagctatgcaccagtagggcagaaacacatggacatctccctacgttccttgcagttttgctctcagtcccagatttctattataaatagcttatatttttaaagagctaagcagcctcgttgacattctcaacaggggccaagaacatacgtaatcaggacctagcactcatgcttgggcccctattgtcccagctggtttggtttgatgaggtgccttgttgtttatttgtttgcaccaatgtgacacaagctagaggtatctgagaaggagaacaaaagtttgaggaaatgcccacactaaattcatatgtgggcaagcctatggtgcgttctcttcattgatgattgatgtgggagtctccaactcactgtgggcagtgctacctcggccctggtggtcctaggtgctataagaaagcaggttgaacaagccagtgagcgtctgctcctgcctccaggatcctatcccgtttaagttccagccctgattttcccaacaatggagtaagatgtggaagtgtgagcaggaatgaacccttttctctctaacttgcttttggtcctggtgttttacagcagcaatagaaaccttaactaaggcatctctacccagaaagacccttgggaaagagctgcaaagctttatcccttgctcacttcaccttgccaaggcagcctcctatcacagtgccattgtcaccccatcacacactcctcttgtaacctatttttcccagcaggagacacagtaagcacccacagtctgtttcctctgggctgtcagcagtcctatcctttttctctatacatcaacatataggaagtgctggagtgaaggaaggaaggagcaagttactgagtgtgtgagtgtcagaaactaggtctctgagacagggaaaagggctctctgctcttaagaaccagtccaaggtagccttgctccaatagaactcagagaggaaagcgtgaagaaagggggagggtagaaacggggggggggggggggggnnnnnnnnnnnnnnnnnnnnnnnnnnnnnnnnnnnnnnnnnnnnnnnnnnnnnnnnnnnnnnnnnnnnnnnnnnnnnnnnnnnnnnnnnnnnnnnnnnnnnnnnnnnnnnnnnnnnnnnnnnnnnnnnnnnnnnnnnnnnnnnnnnnnnnnnnnnnnnnnnnnnnnnnnnnnnnnnnnnnnnnnnnnnnnnnnnnnnnnnnnnnnnnnnnnnnnnnnnnnnnnnnnnnnnnnnnnnnnnnnnnnnnnnnnnnnnnnnnnnnnnnnnnnnnnnnnnnnnnnnnnnnnnnnnnnnnnnnnnnnnnnnnnnnnnnnnnnnnnnnnnnnnnnnnnnnnnnnnnnnnnnnnnnnnnnnnnnnnnnnnnnnnnnnnnnnnnnnnnnnnnnnnnnnnnnnnnnnnnnnnnnnnnnnnnnnnnnnnnnnnnnnnnnnnnnnnnnnnnnnnnnnnnnnnnnnnnnnnnnnnnnnnnnnnnnnnnnnnnnnnnnnnnnnnnnnnnnnnnnnnnnnnnncaggaagacagaggtggggtctgggatcgcccccttctgcacctcaccctggaggccaggcagttggctgaacgttgagtgcacctctctgtacagttgtgcacactgtcggcagagttagaattttcctcgggagaagccaaggtggccctcctccggtgctggagaacagcctgatggataaacaaagtttcaccaaagaatatctttggatggaacattttgcagagaaaatattgctggctgcttgctttgactttcatgcagcctcttactcaaacctgcctagcacccaggcctggccttctcggttgcccggagggatcggctagcagagagctctgtctcctgagctgagtttcacacctagtaccctggaagcgttccccaaatacttagagagatgctgggcctctctgtctcgtgctttctctctactggttgtttttctttctgagtagcatagcaggatgacttgaccctagcactctacatcctggcatgggnnnnnnnnnnnnnnnnnnnnnnnnnnnnnnnnnnnnnnnnnnnnnnnnnnnnnnnnnnnnnnnnnnnnnnnnnnnnnnnnnnnnnnnnnnnnnnnnnnnnnnnnnnnnnnnnnnnnnnnnnnnnnnnnnnnnnnnnnnnnnnnnnnnnnnnnnnnnnnnnnnnnnnnnnnnnnnnnnnnnnnnnnnnnnnnnnnnnnnnnnnnnnnnnnnnnnnnnnnnnnnnnnnnnnnnnnnnnnnnnnnnnnnnnnnnnnnnnnnnnnnnnnnnnnnnnnnnnnnnnnnnnnnnnnnnnnnnnnnnnnnnnnnnnnnnnnnnnnnnnnnnnnnnnnnnnnnnnnnnnnnnnnnnnnnnnnnnnnnnnnnnnnnnnnnnnnnnnnnnnnnnnnnnnnnnnnnnnnnnnnnnnnnnnnnnnnnnnnnnnnnnnnnnnnnnnnnnnnnnnnnnnnnnnnnnnnnnnnnnnnnnnnnnnnnnnnnnnnnnnnnnnnnnnnnnnnnnnnnnnnnnnnnnnnnnnnnnnnnnnnnnnnnnnnnnnnnnnnnnnnnnnnnnnnnnnnnnnnnnnnnnnnnnnnnnnnnnnnnnnnnnnnnnnnnnnnnnnnnnnnnnnnnnnnnnnnnnnnnnnnnnnnnnnnnnnnnnnnnnnnnnnnnnnnnnnnnnnnnnnnnnnnnnnnnnnnnnnnnnnnnnnnnnnnnnnnnnnnnnnnnnnnnnnnnnnnnnnnnnnnnnnnnnnnnnnnnnnnnnnnnnnnnnnnnnnnnnnnnnnnnnnnnnnnnnnnnnnnnnnnnnnnnnnnnnnnnnnnnnnnnnnnnnnnnnnnnnnnnnnnnnnnnnnnnnnnnnnnnnnnnnnnnnnnnnnnnnnnnnnnnnnnnnnnnnnnnnnnnnnnnnnnnnnnnnnnnnnnnnnnnnnnnnnnnnnnnnnnnnnnnnnnnnnnnnnnnnnnnnnnnnnnnnnnnnnnnnnnnnnnnnnnnnnnnnnnnnnnnnnnnnnnnnnnnnnnnnnnnnnnnnnnnnnnnnnnnnnnnnnnnnnnnnnnnnnnnnnnnnnnnnnnnnnnnnnnnnnnnnnnnnnnnnnnnnnnnnnnnnnnnnnnnnnnnnnnnnnnnnnnnnnnnnnnnnnnnnnnnnnnnnnnnnnnnnnnnnnnnnnnnnnnnnnnnnnnnnnnnnnnnnnnnnnnnnnnnnnnnnnnnnnnnnnnnnnnnnnnnnnnnnnnnnnnnnnnnnnnnnnnnnnnnnnnnnnnnnnnnnnnnnnnnnnnnnnnnnnnnnnnnnnnnnnnnnnnnnnnnnnnnnnnnnnnnnnnnnnnnnnnnnnnnnnnnnnnnnnnnnnnnnnnnnnnnnnnnnnnnnnnnnnnnnnnnnnnnnnnnnnnnnnnnnnnnnnnnnnnnnnnnnnnnnnnnnnnnnnnnnnnnnnnnnnnnnnnnnnnnnnnnnnnnnnnnnnnnnnnnnnnnnnnnnnnnnnnnnnnnnnnnttagttcaactcagcctcagtaaacaaaaacaagtggtgtctgaagctgctgagaggaggggctctcaaagccatttcactctcatatagaccaacttgtggatcagccactggtcaccaagcacatcccgggtccctgcagtgttctgagcccttgtgagcccaacacaaacatgatgaccaccagcatcgactttttcaaatggattctagttagaaaccttctgggctcattgactgtggtgttggcatgcccccaggttgtagtgtctgctgtgtggttcatgaataaagagaaagatttggcctcgtagactttcaacattcacagctccttaaaaatattgtgtccatcaagtgtgtctgttccctcatgtgcacgtgtatacatgccataacatgtgtgtggaagtcagagaataacctttgggtgtcagttttctctttttactatttgaggtttggggcttgaactcagttcatcaggcaccacggtgctaagtgcttttgccaactgagtcatctgatcaaccctcaacacggacaactcttgtgtgctaacgaagaatgacgagaataaaaagtgttactcaattatgtttattatctataaatccgacaggtcttcattactttgtccttctcaaatataaatgtacgcttctggctcacctccatccccatctgtctctccctctcaaagtgcaaacattcactaaggaccagaggaagggcttagtgccaggctgcccatgaagccattactctcatggcttccccttggctaacgccttgcctgtctcactcaccaaaatcctagggaattcacccccaagagtcagcagctactgcctctgacctcacctgggaaaagcccttggagaagccaagctgaagatcttcctgaactactgagaatcatgacagagatccgaacctcccacctctctgtggggctcatatgcagatgatgccaaaagaactagtagctacattacagaattctagtgagtcatttggtcagtgggtatcatacacacttcaaaacacattgccatagatggagctgagagtctggcctcctggggagagctaaaactcagactggatcatcgtaagaatttccatgggaaaccctctgagagaaagcacagcgacttgctaattgtagcttactctaaatctaagggcaatgtagcacttatgaagaaagatcagaaggtttgaatgccagtcattggtgggggaatctctgaatatggcaggcctgcctggtggactccttcagtgaggagatcagtcaaattgtctttctctgagatgctttccaacagtaaaaattgttaaaccatatttggcctggctgtctatttcaaaagttcaaccttataatcactttcacaggcgccccacactgccccgcctagatttccaacatttccttgatgccgtgtgattacaatggaaaggaatgccattcttctccagccgcagggaagtattgggcttcctttgtctcagaaaatagatgactgcttgtgtcagagaccttgacctaaatcttaattaatgcccatggcctgtttagaccagtgtgtgcaacttaaccagacagtcccaggagaaagaattagtgatcacagaaaggaaaaggtctatattttcgattgatcattcatggaatttattgcaatgcccattctgcctataatttagctttattaagtttggctcttggggtaatactttcttcttaatgttcagtagagtgaaaacttggtttctgttttattcttaaatgttctggttaatcctggctctaatacacagcattaatttagccaaaacattgatttagcatggcatggtggctcctgtccagtattttcaaatctgacttaggagggcttctgcaagttcaggtctagcctgggctacatactgaattctaggctatgcaaaacaagagtgagactctgtctcaagacaagaaaacaaaaataatagctgccaacattaatatactaattattgtagtattatttattatatattatatactaattaattaaattagcatatgttcagctcattaacccccatcgctgtattgaattttcacagtggacctagagattgttgattgtattcttctctttgatgataatgtgaccaaggagactgcagtgagaggccatttaggtaacactttgggcagctgatcaaatgatgtaggtgtgactagaacccagggcttctggctaaggaagagttcagccaatgacaaggtactacttttatcagggtctgggcatcatttatatcttcagtgtgaagacactggttttctttagactaactcccttttattttcagtcagggaggtcttccatggctgatattccaccttttccccctgtattggctacaagaattaacaggcgtggaaagcttccctatgtgtgaagtatcccttggagactgctggcttttcttcctaaatcctacatcatttgcccctccctttttgtcactcggcatggtgaaggtgtctcctcaagtacccatcatccatagatttcctcaaatttactttatcagaactggactagcagcgatggatttgaccccactactgttaatcactgtatctcaaagctcctggactttccattcaaagtcgtgatttacagcgtgaatgagatctgttttctagaagagagaatttcaaggagcagacagagctgaaggcatctgtctttactcatcccagctgcctacccctcagacagcctgggttatcaaaagcccatctctcactacagtgtcatcattatcatcaactcaatatgggccctcacataaagacctgcaacagaactagtttccctttgggggggaaaaaaagcaaggataagtccttgggaggctgaggtcatttggttttcctccatggaaacagggtatctctttattaatcagaaggcttaatctgattaatcagaggtaggaggggaaattgagaaaaacctgatttcagtagactgtacctttgtggtaagaaagtgtgcccaactgtgagtgggcaatagaagatttggtcaccataaactgccccctttgaaatatccagcttgtcacttactgctccttacagacccgctaagctgggtacagaagtcaagagacaggaaattcaggaatttcttatgtgtcagaaagaatccgccataatagatatcattgcaaaataaataatcagggattgggaggagttccatactatggctctcccttttcttcaaagttgttttcatttctcaggggcattctattggccaagtgggatattcagtgaggaggtggaagagattaggggtgtgcagaatgacataataataggccatccggtgctctgcatgtttaagcaaacagacattctctgattcgcagccatcctctgagggaggtagcgttcctacagctgtagagtatacataggggttaaaaaaaaaccattctgcatgggtccatatactggttaggtcaaaggcttgtgtgtagtatcttaacctctttgtgagttagctttctcaccgttaaataataataatgctatgattatttaaatcaccttatataataaggccatacacatgtggggaagtacacgctgagggaccaccctgaggtacagtgactggttggaaagtgcacaggcttcagcatgcagttacacctacagttaagtcctgctatatcaaaaggacacatgccaggatacacgagcgaggagacctggcatcctctactgggagtcctgagctgaaggaccatgcaggatgcacgtgcctcttccagcaatgacttatgtaggatatggaatgctgactacccgagaagctcattagagactcagtgccagagtattggttggggctggtcatttagacagtctctgtcttaaacaccacaatcccagactcctgggagaaaagcagatttttggtataaaacacatttttttttgaacccatagctgagtatgtatggaatgacaggagccttctatgagtccccagatgtaagccaagggccagccttacaagcagggctttctgaagacaggggtttcaggtctctctgtgttcattgcctcattggtttgttgggaaattagatgagtgtgcgcccttacgacactaccttatagttgagaaactctgaaaccgttttagtcatgactagtaaacacaacagatctatggagactttaaattgccacagggccacacttaactaactagaactcgaattctcatctgtctgactaaaacccacccaaccatgcatcaacttacttcactctaacaagaaaaaaaatggcctccttcttcgaaccaccacggaatggagttggtcgcagactcccctctcaggcttttagtggaaggagattttaaatatgagtgatagtgttgaatgcatagctttcttgtgctataagcaatatcacgttgtggtgcagagtcctcattggttaaacctattcagagtatgtcctggattgatttctttttgctctgatagcatcacagcctaaagcaacttggaggaggaaaggcttacacgtccaggtacaatccatcattgagggatgtctgggaaagaaccaaagcagaaagcatgatgggatgctgcttactactcggcttgcccactaactcatgctcagccagctttcttatacaacccaggacatcctgcccaggcgtggtatgatccacatcaatcaacagcaagaaaatgtgccacagacatgtctacagcctgtctgatccaggcaatcttccaattaagactccctcagatgactctaagctgtgtcaagttgacagctggagctaactagaagagagtaaatctatgggccacaactttaacgaaccaagaaagcatattttggactctgtaccatctttcctgctcagttagtgatgctttcttgatgtcccttccttttgaaagtatgtatcacagatgccccaagaatttctattagtaagatctggatagtagatcttgctgtgataatcagaaatcattcagctataaagcatttaggcctaaaaattccttcttcacttcttcccctgtggaagccatcatcaatttcacttattatggaatggcttctgtctcatgtttctccaggtttgagggcagcagaaatacctgtcttagtcagagtctcaagaaaaacagaacggatagaataaattacctttcctcccctgcctacatatatatatgggacacacacacacacacacacacacacacacacaggatttattagaatgacttacaagctgtgattcgacaacagccatctaccagtggaagcccaggaattcagtagctgttcagtccacgtcagaattccaaaggagtgtgctctaatgtcagtgaagcaatggacttgccaataagagggagggcaagcaggcaaagagagaacttcttttatataagctaccatgggaagatgtggcccagattaaaggtggatctctccacctcaaaagattgggattaaaagtgggttttccccacttcagacaacttaagaaaaattcttcataggtgtggccagatgcttgggtttctgctaaatccagatagagtaaaattgacatgcaagaatagccaccacagtatgcaacagctatcttaaatgtattctaggctgtcccacagaagtgtcctcactaaaacgatcacagtcaattgagagagaacttttgattaagagcctaggaagctagaaagaggaaaagggctagaaggagcctttagaaggaaagttaaaacttttctataagttacttcattaatggatcattgatatctgaacacagagtaggaaaaagcaacttcagattaataatttaatgttgccattgttaatcgctatgcagctatgtttttaataagcagagattttgtaaacctcttagtcatttttattttttagagtctagatttatacatagtgaatattcagtaaaaatcagttccatcaacacacaagcctcaaagcattcatctttgggttctgtggtagatgatgtcccaagtgaacaggtatctatttcctggatagctgtagtcagcccagaaccagatcttgacacctctataaatcacttcctctggtaaggaaagtgtgatggtttgaatgagaatggctcatatatttgaattcttactcaccggtagagttgtttgggaagaattaggaggcgtggccttgttggaggagctgtgtcactgggaatgggctttcaagactccaccacaggtacagtgtctctctgctactgtctgtgaatgtgaagctctcagatcctgctcctgtgccatgcctaactgcttcccaccatgatgatcatggacttaccctccaaaactgtaaatgatcccccaaatatatgctttctctcattagagttgccttgatcatggtgtcttttcagagcaataggactaagacaaagagtaagcaaaagaatagagttttcacaaaacaattcaagtggaatggtcccaatatataattagaatgaatacatgcatttgaactcatgggatacagtggtcaaaggactggttgttcatatctgggcgcatgggtgctcctgaatgatttaagatgtgtcaagtcaaagtaagatggataacaaaccagaagcagagaaaaggagagaaataagagttgaaaatgagatgatgctggtgtaatttcagattactatagcagagagtcacagatttatttttggaggtcagaagtacatgatccagaggccactgtggttgaggtcctgctcctgggtagcaggggttaccttcttgtggttgtactctcgcgtcttaaaaaataacaagacagatgagaggtctctattttagtcttgcgatcaaggcacaaatccattcatgaggattgtagccccattatgtaacacttctcaaaacctccacctcctaacatcagtatgttaatggctaggtttcaatgcatgaatttgagagattcagtctattaaagccagtgcaatgcagattattgagattcatttttcctaatgtgcctcccaaatattccctgggtatctatgactttgcctttgcttgggtagatttttatctagtatatcaggcttagcatttagcatacatgcgtatgtacatacatacacatgtacacacacacacacacacacacacacccatacatccatatacacacagagagagactgaaagagagagagagagagagagagagagagagagagagagagagagggagggagggagggggagagaggagagagagagagagagagagagagagagagagagagagagagagagagagagagagcacttgtgacttctgaatatcatttcttggactctccagtccagtctaagcaccaacggcctggccttccatatgttatagctcttctccctaagtgggtatgctagaacaatctactcccaaagtatgggaaatggcagaaaggtgctttgggagcaaagaaaagaggttcatagatctagtattgcatagtgcaatttattgatcaacttactgagagaaatatggtcatagtgtacagcaatgtcaggtagatctctactatttgagtcagaagaagatgtctgtgtatgcatattggttaggataacttcagtgacttcaggcaagccagattgtacctactctattttaagaaaacatcaatgttgaatacatcccagaagccaggattcaattgaaatacatttaatgacactctaatcatttaacctacttatatttctctaagagacagtgcagaaaacataaaaaccaactctgacatctctaggataattgtggtgattatgacacaagatagctgtcctcatgtcaaattcaatccagtttctttgtgaatctcccctgactgtgttgctatcttctcttctgggtgttgtgagggactgaagtttgttccattggcagtgtcattaaaccacagaattcagagctggaaagtgacatcacttctctatccagtgacactttagcaaataaaacctactgccttcagtacatcagcatgactcagtgtggttactacatatcaatctgccatgttgcatggaaagtcttgttgtcctttggtgatatgaaatgaatctcaagttatcaaggaacaaagtgggcgaatcatcatctctaccctgaaaatatgttcaaggtcaagaacatgtttagtgaagtgtatggccacctcatacaacagatctccctgaagtccaagataaatggctcaggtgatttggaacgtcatatgaaagagaagatttttcaagtctgcctgacagtggatgaagcaatatatattttttaaagatgtacttattattatatctaagtacactgtaactatcttcatatagcaccagaagagggtgtcagatctcattacagatggttgtgagccaccatgtggttgctgggatttgaactccggaccttcggaagaacagtcagtgctcttaaccgctgagccatctctccagtccagatgaagcaatatttgtgggactgatgtaattattccagtctgcaagaacatgagaaaaaggtaaaatttgcagagttagaacttaacgatcactctatcctgacttatatatagtttttttttctatgtatgaatttgtcaagggaaaattcatacatacacacacacacacacacacacacacacacacacacacacacacatacacccatacacacacacacacacacacacacacacacacacacacacacacacacatacccatacacccatacacacacacacacacacacacacacatagcttatgtcttctggatacaagaaagaaagggagtttgttctttcaaaccagttggaaatgtcttcaccatgtctgaaagataaacagaagcttccccagccccttcctcagggaaatccgagcacagaaaatgctgctgttggactcctcagcaaaacccatttgcttttgaactctttcgagtatagacaggaaggctttatggaacagcccagcttgcttctctagccgtttttctgcgcagagatcaatacgatttctttcttcctagtcccctcacacctgcctcggctgaaacactgattgttgacctctcagcaatgcataggactttgagattcttagggcctgccactccacgctgtgagacttttctgttctctctgtgttgcaagcagaagctctttaagcattttggacacaatacacgtaagagatgtgttgcaactgcagatggcccttacaaaaacatttggtcctacaccactactagaatgacgatctgcaagttctgcctccttctgccctacaaatggcaatgtgtactgtaaattacaagaattcagcctttcttactctctgttgtatgaatgtgacccttgcttttggtatctggcttttctcaggctctttcagagagaacaactgttcctgatctctcctcacaataccttttcctccatcagtacatcgtctctcacacatagcaatgcccacactttaagtcagagaaaaagagtactcatatcaagagatgatttaaaacacatatctgtatgtgctttgtgcttatgttcccttacacacaccacagcatgaatgtcggaggacagccttggatgttggtccagcacttccatcttgcttgaggcagggtctctcttcctgccactgttttgcgttctcccggctagctggcccacaggtctccaagagtcttctgtttttacctcctctcttgcaataggagtgttgcaactgcagacatgtgctacgttgttcttttacatggactctaggagttcaaacttagcttatcaggctgttgaccagagctttcacctcctaggacatctcttctgctcaagaggcagttattaagagtgccgtgaaggtcacattcctgctctctcctaagcacctgttctaccatccgccatgctcatgaaatcccatgagattccccactagaaaactatacgttttccctggaggatgactggtctctctaaatggcttccaaggagaaaaaaaaattcccaaattaaacttttaaaaatctaacataacattttcctgtcagcatatttggagatgattcttgagacataaagattgtaaacacagaaccataaaggctttggtagaactgggcatgttataagcatgtatcaacaatcccaggactcaagaattggagacagggggtatcatgaattcaagaccaaactgaggtacctaacgaaaccttgcctcaacaacaaaaatccaccctcctagagtttacaaagccaagccaactggcccacttatagcattaaggggaagtgcattggtcgcccaaccactaagtggctgtcccttagctgttgaaatgtcacatctggaggtggaatgcggaagccatggtgactgtctgggttaaagggcagagaaggctgggtgttgcttctggtcacagactctgcccttcccttaggcagattttatagaactaatttagaaaggatcacaaggatcctcacaagtagaggctctggttagagccaaaacccttctccagagaggaaccagatggacccctgttccttagggatcattaaactatgcaccaacaaatttactgtcagggaagcaggatgaaagagaaagactctgtttgaaattgttcttactgttatttgtgtttatttgggggatgccgtttcttatttcaacccgttacgtaaaagctacaaaagccacatgagcaccattccagcgttcctctaaagcttggatctcaggctccttatttagtggttaataatggtcagtggtttcacttcctttttaactttatttggggtgtgtctagccttgaggtctgggatgtggccatgagtagttctctgtagtccaagaagcattgcttgccctaatggagacagttagagagacagtattatgctgcctgcagccttctccacactgagaacaaaaacaactgatgggatatgagatgctcagagtccctggtgcaaccattgtaggagattcagtgatcattcaggaagatcattgtaagcttaggaacaggaatgaagagaaacagcgatgagaatgtgcctgtgtaatcaccctacaaatatatttaaaaaccaaaacactacaagaagattttttttaaaaaaggtcagaaatgaactggtgggcaaggcataaatagaaagtaataaagcaaaatggaatttgtagaagattaggcaggattggccaggggccccagaataggacacagccgctgttggtacattgtgctcagtgcaaagttcctaatgttgaaagcaggaaatcctgttgttcccacccatatcctcagccaaggtcccatgagactgcctcagagccaacagaatcagttctcctgtggtaaaggatatagtccatagtcttcaagcagctgactgcaaagaaaagatagattcttgaggtgatgggtataccagttatctggtttgatcattatatcacatgttttaaaatatctcactgtattccacaaatatacatttagtattaaagccagggcttctttgtgttaagcaaatattcaaccactgaactatacctccaatcttttccattcttcaccagaaatttactaattactgtactaggttgaggtccaaaggcaatggtatgaacgacgtaaagagaccacactagatactcaactgaatttaggatctaaaatggtgctcctaatggcaggtgacagcttctgaaaacagtttctatgtctgcatatatctggtcttgcctggttctactctaacagaaataggggtggatgaggcagcaatccctcttctcacaagccctcagggtgcatggaaagttcaagatgtaccaaacatggagtcaaacaatggtttctgttggtcgtttttgaaatgcgaggaaagcaatctatcattgatgagagttgatgaactgacattcgtgaataatttatattcatgtcaccttcaaagattttaaaaaacaacaacacagatctctggctccaaccaattcttgtaaagcccaaattcacagatgtgtgaagccagtactgtgtttctaaagcaccctaggtggtgttaggagccaccaggtgcaggaacactggcctataggaaccccttgcctcaaaaacaaaaggaaatcatggaattctagagggaggtcccacaaagaccagaagttccctcaatttaaatatgtaagtcccatttttaaaaagacccttctctggttgtgacaggagaggttattctctatactgcctttctgcagcagtccctgtagccctttatggaagtctgcatctccaaaggcctgcttgaaacaccctgagggctctgttgttacccctccatagacccttatacattaatgatgaaactagtctcaaaaaaagcaacattacctgattatgggccaaaaacatgtgaccagccttccagatttgctggggactagcatttccaagacatagtaatatattgggtttttaatctatctatcatctatttgtttgtctgtcggttgcctgtgccctgaactactcactgtctgaccctacctgcccttaaggactggaggtgaggtggcacagagtcaacgacacagactctgaacactgctgcaagctcctttaatacccttcacccacatcccattggtcccaagaaagcatctcttctaaacagcagttcctgattggctggccttgtctgcattagcaattcttggtctctcaggcagtcctcaattagatcctcctgcaggagatgcttttgtggctgtgccgggcatgggggtagtttttacatagaggcagcctctatctatctatctatctatctatctatctatctatctatctatctatctatctatctgtctatctatctatctatctatgatgtgtgtgcatgtactgtatggtagcagtggaagtcagaggacagctttcaggagttggttctctttccactatgttggccccagggaatcaaactcaagtcatccagcttagaaactaatgccttgacccacttgagccatcttgctttaaactagagatactctaggacaaatcagggtgaacgggccacttcagatcataacatctaccaagcccatagttcttgcctttaggaaagttctttattgtactgtgtcttagttagggttttactgctgtgaactgacaccattaccaaggcaactcttataaggacaacatttaattggggctggattacaggttcagtccattatcatcaaggcagaaagcatggcagcatccaggcagacaaggtgcaggaggagctgagagctctacatcttcatctaaggctgctagtggaagactggcttctaggcagctaggatgagggtcttaaagcccacaccaacagtgacacacctactccaacagggacacaccttctaatagtgccactccctgggccaagcatatacaaaccatcacaccatgttactggaaaaagagttgagattactgttcctttccttcgtaaaacttgattctctgctttgaaagatcaatgctgccaatggctttcaaaaacattctctgttgtcccattatgcctgcattcatgtcttctctgcctctcaagtcattccatccaatgatatgacaagtatacaaatttgtgacatatggcattgtgatggattgtatattctcggaccatggagtggtaccatctggaggtgtggcctggttggaataggtgtgtcactgtgggtgtgggcttaagagtcatcctagttgcctggaagtcagtcttccactagcagcctttggataaagacgtagaactctcagctcctcctgcaccatgcctgcctggatgctgccatgctcccaccttgatggtaatgaactgaacctctgaatctgtaagccagcccaattaaatgttttttttataagacttgccgtggtcatggtgtctgttcacagcagtaaaaccgtaactaatacagtcattatactttataaaactctgtgtattatataccctgagttgccagtaaaagacatctagtagccaatgccctaaataaacaagagaagtacagtagttagaacagaaaggaggggttgtaaacagccacaagaggtcaaatgcagacaactgactgtggggcccagccctagctgataactctgtagcacaactccagcacctaaggctcaagaaatctcacagaaaacgaagtagaaggactctaaaagtcagaggattgggaggtttgctttctttccttcttcaatagaggaaccagattgttttctgtattggatgagaatctgtacctgtgagctctcaacagtaggcttggttagatggggcataaacggtgacaataccagttgacctgggaaatgtcataaggccccactcctagatgaccagctataggcaattaacgactactaagagagggagaatcagggtcatctgctggtatccaataccaagtggtcagccctaaacacagatataagcaagcaacactgaagggattcaaaaggctctatttataaatttctgtgtatgtagatgtgaaacggtaataaatgtttttaagttcctggcactgttgggcataggtttatcttgtcgagacttggtctcttccacctctgttcactgacatggttttccccacactggcagcaatatggcagctgcagttgtgtgcatccacaatcctcccccaaacccaaccaacttcatcttactcccaattccttttataaacttgcctaaggtcatcttcctggggtaggataaaaccaacctagccaagagcaagtacaattacatttgtttggggtctcataatagtggcaatccatgaaaagagagactcccacagaattgaagatgtgctcacaggttttacaagatggcagctgtacttacagctttaagctacaatgggatcagtaattccattggttgctattctgaaatggtaagcaaagctggctgaagtgtccctgacagcatctagtagataaaagaggggactttgtcataggtcaacagagactacgaatcttacaaaaccacctcatgtgctacatccatctgtagctcaatgcaaggtttcagctcagaggtatctgactgacaaggcttctcagagagagagatgaggtgacatacccagcagtccagcactgaggggtctgaggagagaggatcttcaaagcaggcaaacctgggatacaaatgaagacccttttcatactacctcatcataaatattgacttcctaactccactttaagtcccccaaacaaatgtcatttcattttagtttatcttgttcttggcaaaccttctttgagttgacttgtaccctttgcctgtttctaaagcacatactgatgttgggacaatataatatcctgatgcactgcactatagccttgtgccaacaccgtcaggcatagacttggaacaccgagttacatttcccaaaggcagtcagagtatgttctagaaaggagggaagatggaagttggttaggtataaacaattggtgccggggagtcttgggtggacttcaatggagcaacaagccaaccccatgagggtgattttgccacagtgtgaagcttcatttctttgtctttcgccccactgagatctaagtgttagccaaataccagggtctgtgactccagggctgtcgtcatcaggtctaattttaaagatgtgcccagcatttagttgaaactggagaagtcccagggtcaatgtgacttcatcaggataatgaggtccttaaaaattggggacaggagactcatactccttgtctttctttggtcggtttcagaagggtctatgacacatgggatttggtttctttcttcagtgtgtcccataggcaaaagaagaaatagctgcacagcactgttttgttttgtttgtttttttccctcttccttcctgtaagtcatacacaggccaagtctgctttgttcaaaccactggcttttgagttgctagacaagttcagacggagctgtttgtgttattcttctagtctgcagctaagccagagggaaagtaatccttgtggctaattttcagtctagatttatcccttgttactgctgaaaccttggatcaagccagtgtgaaaatattggctccctgagaccctcaaattatggctccgtgttattcttcctgcctcaacatttcaggccgttccaccttgtcaggttgttctctcttctcctgtaggaaggtttaagcattttttctttccttccatgccaccgtggctctcttccagcttgccttctgccttcccagtgctgagcatgaaaacctcacacatactgggcagatgctgtgttacatagctgtcacccagccttcattcctggaagctcatctatttgaaaggttaacatcagaaatgttatctctccaattaaggaacatctcagtcatttggactctggagaataatgggaccactgtgaccacgtttttagatttctttaatgaagtcccatggctcgggaggacagaagtctgagcccagtcagcagacagggccattttcccacagagctttagggagtctccactcccttctgtctcctagaggtccccaaattctgtggcctgtggcagcatcattctgacctctgcctctgcctttccagagctacctcctcagtttctgtcctcatctactgttgacccgtaaggacaatgactaacgtattagagctggctttaatgaccttctcttacctggatgagatctgagagctgtgtccaaatagggtcatattcctaggaatttgggattaaagcttcaatatacccctttgcaggatggggcacagatgaaaccttcacagtgtagccgtgaggataatgacagaaatccaagagacagagctctgactcctcagtctcagggaagggatggattttgatagtggcaactgttttccagtgtagacttttagcaaaatgtgcagttgtatgccttaaatatctacaaattttatgtgtcaatttttcttcaggaaaggtggagttggggaatggatttcacttctcctatgaaggttttatgattccctgggtaacatcccttcccctaacacattctctctctactcacaaatacactatactttgctgtgcatcctaaccacatatttaactatctccttcctagataacttcctgggtaacaagatattgcttgatatcttggtcatgtccctccatcacccactagggcacctggcacacagtaggaactcactaagtcaataatctaaggaatgtgttactccaatgaccttgctaactgactgaaggcctggacagaaatggcaggcttcggatccttaagattcccttgctctctgaggatctgtgagcccatctttcttttcccacggccagtcacagaggaagttgccaaagccagatgatgacacttctgcttgggctacccaggtctacaatttcaaatcagggaatttgaaagagaaactaaaccaggagaaaaacatagcttggatgagccaagaacggcaaaataccaagttgtgcaatagtaatggtgggccccagggaccacttggcttgcccagactatcagatgctatatatgtcaaccttgtacttgggcttgggacaaatttgtggcttaagtatcatctgatgccttgcccttaagtctggcctctagaggtcaggctgacacctgacatcctcatcttcactaattttgagatacaaaaatgctggacaggagtgagcccttgtttcccaaaatggtggaacccttgaactcattgaccacacagacctagctgccaactcatgtattgttaattagataaagcttcagcctgaaatatcaaggtgagtttgctcacatcttccacacacttgtcagtctagaaccaggaaggatccttggttgaagcgatctagcccatgcatacacagaaagggacagagtattcatccccaaagttgcagctggaagaaaccacgaaaggccaggcgtcatgatccttgtgccttggggttcctaacctcggccttgcttggggtaacacaggagtcctacgatgagctgtggctttgaggaagatatgggggaggaactaaaacagcctgggtgaggttggtccatggagatgcaggcaggacaagaaaagagaatgggacaaggaaatggggtttattctgaagaaccagcaacagggacatctgactgaccttctccttacagctcacaggccactgttcacgggatgacactggctgagcacagacttctatgctgaagagagctcactctctcagtgtgctcagacgagagctgagaccctaccaagtattaaccctggcccgtcacctacagcagccactggttgagtaatcaaagcaagtctaatagggcttgaaaagctagtctctgatactccagggctcctcagttcctctctccactctctggagagacctgttagccacaaacagaggaccatctctatggagatatgtcaaagaagagactcaagtgctctgtgcttgtgaattctagtgtgtccattataacaagattgactccgttctgtaaacagaggggactttgaactcacctgggggcccctgagtctttttatagccatacaacaaaagtggagttcaggtatttacttccctgctaaagagcattgctctgctggggtgtgtccctaatggctaacactggtctcccttgttctgtgcgtttccaaggttgtccccattatcacttaaaacagtagggctggggagtctgctgagccagggcctattacagaaagctcccttctgtgcaacataaaagatataaatcctgggacaacaggcatgtctgctcattgaatgaacattaactgaggagtattcacatttcaaggatggagagataaataggccaaagcaatatttagatacagtagattgtgttaagcagtgattggggctctagaggaaggacgaagctgtaagttggtgttatgtaagaaactttaaacaaggagatcctggtacccctgcaggtatgggtcagaaccaccactaaagagagcaggtgctgaagttgtatttgagcaatagcgaagaggccagtatagtggcaggtgacaaaccagggacaatgctatgagattaaccttgagattttctccattccttctatctagtgtggtcttctgagttttgctaaaagcaccttccaccaaggcagtcctttcacatgtctgctatatccaaacatcctttcccctgcgtctgcttcaggaaaagtctttcacgtgtctgctttagcaaggcatcctttcacctgtgtgctccagcaaaacatcatttgacgtaattaactttccaaagaaactagaagtttccacttcaggtgggtggctccccagaagaacatacaggtatgcactcatgcatgcgcgcgcgcacacacacacacacacacacacacacacacacaccgtgtttattatgctcgcacctgctgtcttgttgtccagtctctatatactcctctactgtcctgaacaccaaggtcacctcttacacaaataactttaggaaaccctaaagtcccatcccatcgtgtgaaactgcatactgtcagcacaagtcacaaatggcatggtctctccctgtgcagttttcttggctcaggttgaaagcattaatcagcctgtcttctctggctgtcatccccctcctgactcctccctgtgaagtcttagaagttcccccactgggtttcctcgttctcttccctcagaaccttcaagttaacattaatctcgctcccagctcctaacagtgctccctgaccctcttcccaggctctcttctccagtcaccctctttcagtcagtcaggaagaacctttgaaaaactttatctgtcctcattaatatcacccccacttccaggagaattccccagattccttttctacagacagagctggctgctggcatttataactctagagtcaaaaggccttggaatgagaagtatgggaactccccctcctcccactctgtgcctcaatccctggggttttcttaaacactgaatctttaccaggaaggagcaagaatttgtacaaggattgtgagtaaaagtgaagaaaagaaagtgtgtgtgtgtgtgtgtgtgtgtgtgtgtgtgtgtgtaaatggacgtgtaacttgtgtaggtgcacatgtgtgtggagaccagatgtcaaccttgggtgttgttgtttaggcctcatgtctcactaagatctggggttcacccagctaggctaggctagctactccctgggattcccctgtctccacctctccaggcctgggactagaagcacgtgccaccgtctccagctttctacctgagtgctaagggactgaaccttggtcctcatgtttgtgtaagaaaacgcgtcactaactgagctgtctgtccagcaccaagagtgggggtttttgagggagaggggagcatgttgaatgactatcatgaaataaataagaggcaaagtctctattttctgagcttccgaaccaggagataaggctgaggagaagggagctgtggactgcctgacaagaaggccttggttctaagcaagagtgggattgcaagtcacaagtggaaatttactgtctatgtgaggtagagatcagaaacagcaggtgtctggcagcagataaaactgaagccatccacaccaggctcccgcatgtgaccttgaaggttgtattcattttgccaacagtttgaccggaacagacctgccctcacctaaacccggagattcaatatgctcttttgtttgaggcgtgtgccactcaggatgggagcgagtctccacaagcagccgtggctatgttgtctctgccctcttctgagcttctccccaccttgaaggctcccactctccctgataaccatcttcaatgggctgtgcttcaaggagagtgggccaggtggattgtttttccatctgtctggaattcagtgctaaatgaggtgctgaactccaaggccccccttcataatcgcgtgtgtgcattacaagggcttatcacacgttttagagccagagacgtgcccggcttaagtgtcaggagataatgcacttgagcgtttaaacatattaatggccttcaagaaccagaagtggggctgtgggcagtggtggctgggtaacagatggcattgtgttcacccccacctcctgccacttaactccacttctcggccttttgatactctacctcccagattccctcctttcttctaaagaataaagcccagaaaagtatctgtgaacatttactgtaaatacccacactcatagcagaggccagctgaagcatctaacaaaggcactgtcccctgccctgtagcttgtctctgtgtggcctttgacttgcccccttgcttcctgactttgaattgggcaaaaactggtttcctaaattttgctatacatgaatgaatattctgtaactttagagtgtgccctcaaattggcatatagtaatagtaaaaaaaaattatgcattttgctcatgtgagatttactgagtaacttgtatatggcaggcacttaatattataacaatgagtataacaggccaaagccttgtccacatgaaagtcacatcctgaactgggtatggtgctgagtgcctgtaattccacacttgggaggctgaaacgtggactgcatgggctgcatcgcatcaccaccaccaacaaagtcaacagaaagaaaaaaaaaaaaaaaaaaagaattgttctgggttatttggcatacaattttacttccagctctccagaggctgagaccggaggattgcagaagttgaacttcaaggcaagcctagatcacagcttggggtacatgatgagaccctatttcaaaaacaaacaaacaaacaaacaaattaaatactgttgtatagtgatatgtcctagtgaggaaattaaagatagaaaatactcaaactagaattccccctcttagaagggaattctataaagtttactttttaaagtcaaacttaatttatgtgctgtaaaattcacacatgtgaagtatccaggcaagtgtgtatgtatgtatgtatgtatgtatgtatgatgtatgtatagcataagctgtgaacttttgacctagtttccagtaacatgttccaggaacatggagcaggcttcaaatccaatcggagagggtttggttgcttccatagccttcacaccactctcacaccagtggtcattttgcctggcaggttggtgttgtagcattcagggtccaacactgagtaagaccaccgttgtcttttctccctctgtggcctacataacaccttccattcctatggaaactaaccagaaggggggacagtttcctgtttgctccagcctggtttctccatgctctgaagccaaagtgtgttgtgtcttcagcactgggtataaccagccaaaagtaatgccaactgtctatattgtctggggacacctctgagatctcccagaccaacaactcccaaggaagtatctcagacctaggacatttggaccagcagagaaccagtttcttttgactgtattcatttttttccacttgggaatatactctccaagtttattatttgttaagtcccatgatttaagactgaattctggacattgcttccgggatctgtcacttggcatttccctgtaggacgtcctcatgcctcctctttacaaatcatagagtcctgcactggctgttcattttccatattcccttatatatagtcatttcagtgtgtgtgcaggtatgtaccacaataccggtatggaggccggaggatgattttctagagttgcttcctcctacttacaggtaccggggatcgaacttagcaagcaccctcaccccctgagccctgccattggttctgcttcccattttttcccaacgctatgttgccttgtgtgccttgaccagctttgtaatagtttgtggggatggacgggtgtgacaccagtgacctctgccacaggcagccatctgaggagattcccttcacatagcaggctgttttggtttgggttttcctctttcacataagatatgagggatctatctaggaaaaggattccaagcagagcgtcagtgggaagggctggaggtaggaggagccttagccccttagcagaacagcagggaagaaggcagggaacagagcgagcgaaagaaacagctttatgtgaaaagaacagaaccaaaatgcctccttgatgccacactaagagaaagcattattatttctctgtatcttttcaaaaccagacagatagaaacattattgcttgtttttaaacagctttcccccctccccctgccaactttatgtattgtattttcctaccctaccaaggagctttgtaaaacttgcttttcaagccatgggctggctgcatttattttgcagacccaggggacagatgtggaaagaacaacagaatgatacatagcgggaggtggccagcggttggatgaccagttactagaaaagaaagaagctacaacatgcagaagctaattgtccttacagtattggctcacatgtggcacgactgactgattcatccaatagatgggtgaagaagttgtaaagtctcaacaatggcgacaataaccactgtttggagtgtacaggccaggcatagccccaaacgccacaactgcctgagcagtcatcaaagtggataacgtggcccttaatgagatcctcaaaggatgtggtaggtgagcagaaagcttcactaaatacagctgcaggctgtcaaaatccccagcctggctgatgagcaagctggggagaggcaagcagagactacgtgctcagtagggaaggaaaaggtctccaggctgtgggaggctggccacctgcccacttctgcacctgccgtcttccccacatcctggaagggcatgttggtcctccctctgactccctccacctttccatagtgaatgtagcagcagagagtgggtgttttccagtgtagtcatcgatacctgtgctgtggcgacagcacaaaagtccatcggaggtgaataacgaaacttagtcatttctaaaacatctaaaggcattgttgggggggggggggtgttggaaatggactaattaactggggcccttcatgttaggtttggtttgatttccattgcccggtgcagctttcctatgccccgaagcctgtgtacaaatagactggagttgaaacgcaagttgggtgggttattgttgctttaaaatggggtctcaagtgacctatgcttccttcagctttgctctgtagttatgaatggacttgaacttgtcaacctcctacctctctctatctctccggtgcctgcattacagatgtgcaccaccacaggctgtttttaagtggaagtcaatgtgtttcacggactttccttttactcatggaggaagtctcagaacaatctacggctgtctcttccctttcacacatctgtctcttcttcccttaattctcttccttttccttgccttcttctttcctcttctcaaactatagggatcatttctgccattgctcatgtggttatttgatttgttttgttttcattaagattaactacagagtctgttttatagtatttgattagaattggcattcagttcccttatataagacggcattttcataaaatttaatacatccttctgagcagtgtaagtactctctaaattactcttaatacctaatacaatgtttactggctagttttgtgtcaacttgacacaggctggagttatcacagagaaaggagcttcagttgaggaaatgcctccatgagatccagctgtggggcattttctcaattggtgatcaagcggggagggccccttgtgggtaatgccatccctgggctggtagtcttgggttctataagagagcaggctgagcaagccaggggaagcaagccagtaaagaacatccctccatggcctctgcatcagctcctgctttctgacctgcttgagttccagtcctgacttccttggtgaacagcagcatggaagtgtaagctgaataaaacctttcctccccaacttgcttcttggtcatgatgtttgtgcaggaatagaaaccctgactaagacacaatgtaagtgaatttgaaagagttgatacaactgtggtgtttagggaatggtgacaagagagaagtctggcatgtcagcacacaggtaggacattttcagagtgtccacccatggtctcttaaatcaaggggcatggaaccccagccaagaaggtcagacagagctcttacatttattctgccaaacagaaattaagggatgtggcttggttgaaaacggccccattccccagacattgacagtactgaaactccatccctgcctgaagcaaggatgttattgtctatacgcctggcttaggggtgcttaaagcacagcacgtatgccctggcctctgtaacctcacagtgtagctgagaagtctgttaaggagggtgtgaggtgtgctacagtcaagttagtcacggagcttggggaacattgagatggtctctcagagaaggatgcacgattttaaaagcaagaccaactttgcaagggtatgccgctataagaagacctgggtgtagctaagtgttatgggacaggtatgagcagtacctatccaacaaggaggcctcctctgtcctaggggcaacagggagacatcaacacgttttcaggatagcaggtgtgagaatagttcatagttaaagaggtgttcctgaaaggctgggctacaagtctgagacaagcctgggctagcatatgagaccatgtcgagagggagggagggagggagggagggagagagagagagagagacacacacacacacacacacacacacacacacacacacacagagagagagagagagagagagagagagaaagagagacagagacacagacacagacacagagacacagagagagacagagagtagaaaggtggtttcgtgtgccatcagtccctgtaccccagcatagttagagccttcttaacctctgagttggaagtctgactgcaaaccagcccttccatcttccaacatgaaggtaaaaggacttacaactctggtggaagcaagatcaaaggcagctcccagatctcagtgctgtggtctctgaggaccaaacacacattaagccgacttgtgaaatggtggccactgatatcaaatggtttttgtttatcacatttacgtctttcatcctaaaggctcacgaaagacacactgcttctgcttcttactgggccagtgacaaggcttttcatgtgtgtcaacctaacagtcagccattacaccctgagacttagacctgagcagctggaaaacagctattacagggtttgaactagagctctgttccagcgctgcccccctcctcagcctgcgtgcctggacttgccaccgccacaggaagaaagcccctgctacccatggggatattgtgtttctctgtctgcttcaacagcagcacgtaaaagatctcaggtcaaacaccaatacattacagactcacacacactgtccaatagccccatattgcacagaagagtagccctgtgagagaaactcacagacgtaggttcagacctgcctggcactccatgtaaagactgggacaggggcatactacgaagaacaggaaggagatgaagcttgctagactcttttcacgagactggttttgagcttgcttattttggcattcagtatcatgagctgtcactatccagaaacatctgtaggctctttaagttgtatagcttttaacgctggggtaagaggtttctaagtcacacctcccaaacactaccaccacattgcattaagtagacttatatgtccctactctacctccaactccccaaaaaagaaatcctaaatttcatcaatgatatcagacgtagcagccctcattgtcagaaacactccacaagatagggtggcagctctctcccctccagcctcgctctgtacagactgagggtcactgttgctacccactcctgtgacagaagattatactaccgttcactccttcgggaaaggagccaaattcacattttcatgcatgacctctattcattgcacatggttttcttcctggtgtaactcttcccccaatcactgcatgcagttatcattaggtgtaagaccactgtatgcttctttccctctcctgagtgcacttatctaccatcctcgcttgactcacccttgccacgacagacttgagagtttggaaatgaattctctcaccatcgattttgtaagccctatattaatcacgactttgtcttcctagtggggagggtaaagcatctttcgtgaagttctcatatcttatgccttcagcccagtctccatccatcgttcatatcagtcagtcaattcagccctcccaggagctctagtgtgaggcagcacagaaaacacctagggaggagaggttgggttttaattcagttttgtgtggcctagtattcgttctccgttgctggaaatgagtagatgaggctcaccagtgtgattagcggtttctctctgaaaatctttgggcatcgtatcttcacaaggattcgcctgtaaagatttgcataactgcctgtctatctgatggactggggagaaaacaggcactcaacatcagttccagaaggaatgctaggttgccaaggaggcaccagcaaaccccagaatagcctggagagtgactcagtaataaagtacataccagaccctatggagcaccctcagtatcaaaagcataaataaccataggctttgatgcaccgacctggccctttataaataatgagagaaagaaatggggcttacataccaggaggcaccatgacatctcagtgttggaggatctggcctgagagctacaggcagatagatcaagaataggaaacaggtcttctttgtttctgcttctctttggcttccatagacatgcctctgagtaatagtgttgcaattctaacttctgttcgcagaagagtttgtacaatgaaagcaagaacagattgtcttttgactctggagtacagctggcgctcctccagcctattctaggtgcttatcccctgcctttgtgatagttcatctttggttatcaattgcaggagattagcatcacctaggagacacacattttagtgtgtatattaggatgttttcaaagaggttcagctggggagggaagcaccctaaatgtgaatgtcactcccccatgggctagggtcctggaacagatttaaaagaggacatgagttcatctctttatccagactggttagcccatccccaccatgaaggtctgtatccttaaaccatgagcccaaggcaaccttccttccttaagctgcttttgttgggtactttgacagggatatttgaaatatccctatccttcagcatgcttcttgctcaatctcataagaccctttcattcatttccaagttcccagcactctcggctccggtcgaatagctttctgatccattatctctattgatttagctccttctgtatatgtgtcaaaggccttctttctcccaaagttaaagtcccatcaacatggacaaaaatcttatctgtagaactagtatagaattaaatacaatttcaattctaaatgagaggaaaagctgaccagaagtaggttatctctgtatgcctgtctcttatatagactttcacagtttaacagagaagccactaggtatttgccatgaataagatttcatgaattaaaatcacataaggttaaaacccagctcttcagtcacacttgccatattggaaaaagttgttagccatatgtctagtgcctacaatactgataagactagttagtgaacatttcttatgtcagagagagttctgctaggaagtgcatatggagacaatggccttcttggtctaggcagaaaccagtcctacctcttagccacagtatagtgcatctcaacttttgctgaatagtttgaactagatctttctttgtcataggaggctacagtgcagtgtaggacattctgaagcatgcgtgacatctatccctccccagttgcagctcttgaaaaatggctccatatcccctagagggctgaactgaccccagcttagcaactctgctaagatggcagaggcaagagaggccagggaggactttacaaacatgcttaggagtgagatgggttcaggttcgtgaacactaagaggtagagacatggcaggagatgggtcaggctcactatgggtgctcctagaatgtaacagagaaaagtttcagaatgatagttatagtcagaaagaaattcttcccttgactttgggacttttcttgatactaaaatgtcatgtatgccaaagctcccccaaaagacagggaaaactgtaaatacaaagaaaggcagcaaagaaggtggcccaaggggcagattgcagggtgagtccatttattccagtgaaggtaaagggctatgtcctgtatcactctgagatttctactgctgggttgagctctcatatccccaaatggccatttgcatactaaatggccattactgcctcatctgctacataagggctataaattccaatcccgaaatggtctctcttcccaggaacagagttataaaaacgtttgcccttccataggtctttgacatatgctggaccacatttgtgtatttgtcccttggccctctggagagcttagcacttctccctgacccaggcaagatttttatgtgctatgcattcctttccgtcgtgacatcatgcgtgtatctcgccatgggatgctgaatcaaggcacagggaagacttagccgtctccaacgagcaactggttttcattattttaaggaaatcaggttctgaaatatttatggtcagagaccccttcgtggttccttcctgacctctcctttcaggagcaatcttgtagagaaggagaaccctctgcctgctccgcatgggaccactaactcacagcagagctgagccagccatgccgtgggaagaccacaaggaggcttatttgctagacactccaagctgaaatgaatggaactgaagccagaacagggccaagacttaaaaaggctgaaggcccaccctggcagcaacgtgcctgcatcagagctttaactcatgttcttttcatttggaggatgatggcaatgatctcacaagaaaataaagaccgtgagtcagctgttgtgatggtactgagataaaagagaagccaccccacagcagacagtgtgtgcctgagcctgcggtaggatgagttgctggatgccttcagcagagacttctacttagccctttttcaaacagttgtgggaatcaacatgctcgttggccaaaggggccagcatcatacaaagttgtcctatataatctgagccagtttcaaatggccaaatagttccttctatggaacaactaaaggcgattcttagatttttgttctttttctcatagaaggtgcttttgacatttttgaatggataagtcttcattataagggtgtcatttagcatccctagatactgagcagaagttgctaagtgatgtccttgacacacacccacacacccacacccacccatatttcccaatacactgggtggatagtatatcacaaagtttgttgcctttgaaactagaatcttagtgcaagtcatagggcatttagcaagaggcatgtccttttttttttttctggctttctgctattgtgaatgtgtggagatgcccctccaggctgctcattccttgccccatagtgagatcttaggggtggaaaagaggaggcgggaatgagcaattgcacagatatttccatttcctctccctgatcatatcctaatgtgaatacaccctaatgaattcccccaggggtggggcaagaaaccttacctaggagggaaactgccccaaggcaaagcctcctctgccgccgcaggcaccttgtccgggtgcttctgctgccgtgctggctctttcctttttagctcccctttacggctatatgtcacagaggcaggaaggatgctagagttgtcagggggtcacagagattagaactggatctgggtaaaaagcgtgacatccattaatgtggttttcatcctcaagactgggaggtcgtttggttgcaaatatcctgggaaggatctcaaaactgcccacaccttccagaaggataacagaactagattgacttcaataaaagagaccatgtaataaaagtgccaggtttctatgtgttggcttggtatggataggtttgtttgacctaaaactacatcagcattgggcagtgtcgatcgattcatgctgactaaggttctgattaagacaacttctacttgttggaagtcatccagccttacttgatgtgattgtcctgaagcaccaagaactgtgtgaggaccttacagcgatgacagaaaggctggggaagtctcagtctttttcttcaaaagaagttgagacccagcagcactgactggcttgttggaggtcatacaagtggtgtcttttggctgccgtgaccatgccatgaccaggacagttcccaccgtaccctgttgtcttggcataattatcactctaaatccttgttgttctagaaggagttctagtttggaggaagagtttgatgtccctctgtctcaaacacaatgccttctagctatgaattcatcacttttccccttacacaactccatcccttctttctttttttgtggttctcaaaatggcccctcctgtctgaggccatctgtcatgcttttgcaaattagtcattctcaaagtttgggtgactgtaagtgacaatccaagtccagatttcctaaaccatgggtccctttgttctcaagaggataaaacaagataaccacaggggtgggatcagccaggcacccagcagcccaagccttgacaaccttagacaaccatctctgtgctcctaggttcttggtgacaaaggctggggtaagtagatggtagcacaaatgagacttttatacggcttttattttgttttgtttttaatgaaatacacacagggttgaagagaaattcactataaaatcccacccattgggctctgaaagtcccatatgtccgatgactcaacatgaaactcataggctggtaatactttgaaatcctctgtgaacaataaaagctaagcatgagaaaggaagggtttcacatatacacaaggaaaaggaagacaaaaagaaagaaaaaaatcaaagatcctttctcatctgcccagtggagtggaagacaccagtgtcctgaatctatttattaatgccaccctcatgaatgtcctacatgtaatataacttggcgaagtttctataataatgagccaggaagagccagctgtgagctgggaacacccacagctgtgtgcttggctcactgcagttgtagtgccgatgaagcagaacttctgataaccaaggtctatgggacgtgggagcaacgtgttaaaacgaaaacccattctatatagaatgggaagataaaaatgaatcctttatagcctaagggtcttggtaatgctgcttaattaaaagggtgatgtacagatgaatctcttcctaatgagcagccttcctgacagccttggaaataattacacagcaaacattatttaatccaggctcaacaacacagtctttgctgccagcaaacttgggtttgaccagtgtctactgacagcgaggaggtgagaccttgagtgaacctctaaacctcagttagcttcatctttccaactgcacaataaagacactggtccttaccaatagatcctactgttattgaaagggcgaagggataaatagtacatacataaagtgcgcagcattgagtctagctcaggcgcaccactcttattatttaaacaaccataactttggagatcaagtgccaagtattgcataagacaatggggcctcacaaatgagtcaaaaggtctgtctgcaggcaggatcttgtagcccggggcagtggctgataaacacgtggatattaatatggggattctaaagtagaataaggtagaaaagatcaatgtgtagatgctgatttactgatttgtttactgacttacttaaagctcggcctatctgctgagcatgatgtcacctgctacctgaaacagaatggcctggagaaatagctgagacagtgggtcattgtccttaagctgctgaccgccatgtccgagtctgtaaaacctcacctgcttggcctccccaccttgtgttttagagtataaaatgagaatacagactggacccaggattgaagcatctccgttctgccactctctcgggtcccagagcatatggtcttgaaagatccccccaacagttccccccaacaggcagaggggaaagtgtatttagaatggtgatgctgacgtttcttagcggttgctacttgggttcacttttgaaagaaacatggataaagattctccacatacagagaaagatgattgtaagatctgtgctactgacggacttttcgctaagtggatggaaaaggcaatggacagctaggctccggctcagctcttgaacacattgtgactcactctaagaggggaaataaagcttactattgcttagttttatctaccagccccccccccccccacagagctggggacaccatggaattgggaagcatgagtttctgaggtccaagcagctgatctgtgctcactcggtcattagtggtcatgatctaccgagaacattgcccatgatggaggaggagctgcctcttcaggcttctcccagaattcctgcttttctgaaagcagagattgttcttttggaagtttcagtacacactttaaccacccccattgtgtgtgtgtgtgtgtgtgtgtgtgtgtctgtctgtctgtctgtctgtgtgtgtctgtctgtgtgtgtgtgtctgcctgactataactgtctctgtgtgtgtctttctgtctgtctgtctgtttctgtgtgtctgcacatgtgtctgtctgtgtttctgtgtgtctgtgtgtctgtgtgtctgtctgtctctctctctctctctctttcgtgtgtgtgtgtgtgtgctgggaattgaacccagagcattttgtatgcatgttcagcaagagttctagtactgaactattacttggcccttttagtactttacatgtttgagacaaggtcttgctaagttatgcaggatgccatggaacttgttggcctctattttgtgatcttcctgcctcaggctcttgagtagctggacttacaggtatgcatcactaagcttagataaagcccagatttcatgtaagaatctcttcctgctgaggtttctgccccataagttgatctttatttacattgactgcttctatataacaactgtcttggtagaaacgggtcgtagaacttggcaggatgacatgtttgtttggagcatcactaaaaaaatcagtccatgagctggggccctggacctctgaatagtttagggttaaagaatctggttgttcaggagacaggtgaagagtgaggaattgagatcaggctgggaaggagctggagaaggcagagcaggcagttacagaagtgatttggggccaattcaatgggaaacttgaagccaaagaggcagcacctggtgctggctgtcctggtgagagacacaggggctgaaggacttacacctccgcatctgcttcctcatgtgctccgcatgtgctttgcccacagtctcctgacatgctattttttaaaattatttgtgatctaattactgccactctaagtaaaagaaaattcaaaaacgttgttagtgtgaacctttcctttcctttctgcagcattggttcaaatgcagacaaagaagcattgaacccatatgctaaagggccaaaaaagatacgtgatttgcatattccattctaactggaacaatagaaactgcgcagaaccaatcccactgcttttgcttcacttctgttgtttttaattgaaaattcatgcactctattctgatcatggtttccccttccccatctcctccaggatcctttctacctccccagccatccagctccatgccttctctctctctctctctctctctctctctctctctctctctctctctctctaacacacaagtcaataaaatatttcttcttgatctaagcaagcgctacccaccacctctgccactggcttctcaaatgtaaagaagaataaacagcaaaatggatgaagctgcctgattcttagaaaaccactggcttccatattggaggtcagtttttatccctgaacggaaagtctggcctcctctccctccacagcgaattgtgatgtagacaaaacatacttctctcgactactcctggaagtccatagatccccacacatggtggacgcacagaatatgttgctcaaaatgaatgctttctgtaaatgagacagcaagggagcacaggcatgtatccttgtacacgttccctgtttctgcacatgttgccttgttccaaattcacttactacatacaagttcaaatagaagaatggtgctttctttctagcttttccaaaaacgtgtgtgtgtgtgtgtgtgtgtgtgtgtgtgtgtgtgtgtgtgtgtgtatgtgttgttgcatgcatgtctctgtgtgtgtgtgtgtgcacagattcccatgcatggtcttaagctagtccttgatgtgggtgagtcagctccaaatgtatagagatacctttcttgtgtgcccagaccaagggctgtgtgagcaaccaaagtatcctagtcataccaccattgaacttcccagtcatcagtatatggccatagaggccagagaaggataaccctggaactggaattatatgtggctatgagctttggttctctggaagattgggcagtgctcttaactgcagagccaattctccagctcccaaaataagacttattacgaaggcagaaaatcctcaagcctgctcaagggcccttatggaacagcacaggtggcctgctttgaggttggctctgcccacaggaaggatgcatgcatggaaataggaaatggatcatggaatgtgtgagatgcacttgggaggaacactaatggccggccacctttcacagggagggatacaaacaggaggagtctgtgcagccagctccattgactacaagaggaacagctccccagtacaggccatgccagtagaaaggacacatgcagaggtgaggagaccaaagtgaatgaagagctagaggtttaattaatgctctatcctggaaattccagggaaaattgattaaatacagataaggatcaggagaaagaaagatgctgtacatatttatgtaatggagtgtctctggatgtgggacccaagtccaaacaacaaattcattaatgttttctatactctttcaactcatagcctgaggggtagctttatacaatgttttaaataatttcatgaaacatgaaacaaaaaaaaaaaaaaaaacatacagcatgggatattttagcccctcagacgtttcgagatttgggcctttgggttcaaatgcaagatgtccctcctggactggccagtgattttcagcagttcatggctatttggatgtgttttcaggcactgaagaccctgtaccacttcaaaacccctgaggtgagctggtacggatgtggctcttcaaagtatcaatcctgctggataattctgctgctttccctcttctatccttagtaagaaagcaaaataatatcaataacatggcagccttcttcccttgtaaagactcctacctctgctctccaagagttttcaatacagaaacagacaggaaacaggttacagagacagcagctaatggaaggccaccaacttaccagacaccaaaacctaccatgtatctgtgaggttttgcaatatagtaactctaggctgtcctggggaatgtttcacaactctgtgactctatccctcattgccccgcacaagaacacaagtcttttatgttaacttagaacagactttctcagcctcagccctgctaacagttcatgtgagataactgttgacaaacaccatcctgtgaaatgcaagtttatatagcactgttggtttctgtgctgattagggagggcttgtttgtttgtttgtttgtttgtttccaacttgacagaagctggagtcttctgggaagggagaatctcaacctaaaaatgctttaagcgttatagacagaatctcttgtgtactctatggctatatcacctgtcaataaaaaaaaaacttatggtccataggaagtggtagaatagaaggtaggacatggggtagagccaggcatgagaggattcgccacccacgtccatgaaggaggacagagtggagcagaggtaaacaggcatgtggcagaagttagaatagaataatggcatgattagcttatgaactagtcagggaacagccaaagcttgtagacaatataactgagtctcagaggcattattctgggagtttggagttctcagtaggcaagcttgtggtgcattttcttaatggatgtggtggggtcccacccactatgggaggtactacccctagatagcagttgtaggtcatatcaaaaagaaagttcagcaaaccatgaaaagtaagccagtgggcagcaatcctctgagggctcttcttcagtgcctgcctctagcttcctgtcctgcttgggttcctgccctgacttcccttgacaatagacaatcatcagaataagccaaataaagtctttttttcctatatgttggttttgatcacagtcttcatcactgcaatagaaagcaagtaagaacagaggctacccacagataccaatagcaatcctttagtccactgcacaacaatcatgccagatgccaccctatgtgaaacccacagacaagtgtctatgctgttcaggaacatagctgaacacagcaatgcttcttacattagccagtgtctgctttctgaaagcatctctttattacctctagtccccggctactactgagtggcaagtctcctcttttaaaaaagcatttgatcaagggctgtgtacagctacagagattcagtccattatcatcatgacactggagcagtagctgagaactacatctgatcagagagaaagaaaataagagagggaaaaagagagagagagagggagagagagagggagagagagagatacagttcataagttaatcatgccattattctattctaacttctgccacatggctgtttacctctgctccactctgtcctccttcatggacatgggtggcgaatcctctcatgcctggctctaccccatgtcccaccttctattctaccacttccagacactggacttaccatggacctttgaaaccttgaagtgacaattttcctctagtaaggccacgcctcctgatccttctgatcctttcaaatagtcactccttgttgactaagcattcaaatatatgagtctatgggggtcattcttaccattcttattcaaatcaacacacacacacacacacacacacacacacacacacacaccctgcttgaagtctacaaaggtgtttgttaacatactatcccttttctagctctctacagtagtgtatattaatatttgacaatagcttgatattaatcaaccttatcacatgtctcgtatcatttaattctcaaggagaaaaagataatttcaataaagtagtattccacttttttttttttccgagacagtttctctgtgtagccctggctgtccaggaactcactctgtagaccaggctggcctcaaactcagaaattcgcctgcctctgcctcccaagtgctgggattaaaggcgtgcgccaccacgcctggcagtatgtccatttttacatatgggaaaggaagccgagaattgataattaacttgtccaagatcaccaaggtagaaatggatttgaacttgaattttaatttttctcagttttattttatatgtatgggtattttaccagcatatctatctgtacctagtgcatgcctggaacccacagggggaagaggaaggcatcagagtacctgagctagagttatagatagttgtgtcctgaggatagaacctggatcctctcgtaaaactgccagtggacttaactgctgagccacctctccagcctcttgaacttgaaatttttagctgctaatctaagaccctttcacttctgtggacatttctgaagttgagtgtatttgaatagcatctaagggttcattttgtgtacaatgcacattcctaggtctcactcctaggtactgggtcagcaggggtataacaacaacacctaaaaatcaagacatcagcacacctatcctttgattctggtccatctggtctgcagaggctatgtaatagttggaaaccaaactccatttcactacataatatggcaactttttgaagagccattggcagacaaaggattgagggagaggagagaagattgaagaaggcaggatcactatggcaatttggagttaatgaaaagagttgatactctcctttctgctccatcctggcagtcctagtcaattgtctgacagtggcaatgccttaccacaagtgctgctactcccagagatagatgcccctggctttttcctgctcttgtgtaaccaagcacatgtggtccgctggctggttctccagcaggaactagggcttctgtcagctccctgacagttcctcctaaggcactttctttggcttactttcattactggacacagcgccatagcaatgcatttatccaaagatgctttaagaaatccttggccttccatagagcctttttccctggaatcttgacttctgtttggactctaagagccctggatgagccccaaagtctggtctggtctctttagcttttaagtagtaaggcaaagccagggctgggagatactctgcagcaatgtgccttccaatgaagaatattagaacccaatattcttgaagctcagagtccattaaaattcaatagatcatctagggactctctcaagctttagatctagccaagggaaaagaatgtccgaggcaggcttgtgtttcaaactctagcccttccaagtctcccaagaggcataaaataaaacctacagataaagccctttgctcagtgtacccattacttgtttgcaagcaattgtatgtctgccctgcaaccctccccagggtcatggcacttttaaataagcatctgtaatatgacacacccagcctttcacccacccagcttgctgggagttgagtgtctctgacttgagattgcatcgctcttctctctccagcccagccactgctgctggtgagtctgtctctcctttgatgagttgcagcttctgggataggtctgtggccactcctgtgacccagaatggagcacagctgctctacttaattgttctgccacgagttcaccatttgcagagagccaaatcttgttcaagaccgtgctcctaacccagccaggcgggtcagatggaaagacagaccgttgactccctcagagctagagccctggagattgaagttctgaagagacaatcccatcctctgtgacatctacatatctcctctttccctgggaggtagggaactgggaacttgagttcttcgccattatgcccctggttgctgaattataatcagaacctgctggttgcaactaggaccccacctagctctaggataaacgttccaagaagcctttgagaaattgagatctcccttcctcagcttcttgcttctcttttgtcccctccgtcttctcctcctggactgcagatcaaacctagagcctctcacatgccagacaagcacagttttcttctttaaagaagaaggaaacctgagacactgtaaagccacgatgtgtgtcttaaatctatgtaggccaggcaaagagctgacttgtctacgtagcctggctcactcccctgctccccccacccctttctgaccaagtcacaggtcacttatgcagaccatttcacagaccatttcataatcaagaggatggctctatcagacttctctccttgatcaccacatggccatcttcaccctataatttgcatggctgaggcaggaggattgctgagactttgaaaccaccctgggcaatagtgagactctgtcttaaaaagagggaggaggaagaggaggaggaggaggaggaggaggaggagnnnnnnnnnnnnnnnnnnnngaaggaggagaaggagaaggagaaggagaaggagaaggagaaggagaaggagaaggagaaggagaaggagaaggagaaggagaaggagaaggagaaggaagaagctcacactcacagtatgtttcttgacattggccacagcctggaatgagacctggaatggggtggtctccttgtgtagtgaccaaaggcatcatggtagctgaccatcagggcactggtctggcctttggaggggaggatgctagagtattgtttctttggaatgacaagaacaaaggagccttccaataaggacttcaatcttttgaagtcagaccctagagccagagtgactggatttagcaaaatgtgaatagtgtttgttttttgtttgttttattttgttttgttttgtttttttaagacagggtttctctgtgtagacttggctgtcctggaactcactcactcactcaggctggcctcaaactcagaaatccgcctgcctctgcctcccaagtgctgggattaaaggcatgtgccaccacccccggcgtgaatagtgtttcttaaatgtacttaacatataaaatatttgctgcttctctgaaattcacattttactgggtgccttgtgttttatctgccaacgctctggacaatcctcagtaaacatgacttttttttccttcaagtttgtatttggtgatgaaggtgagaaacacaggctatggaaatatctcttaagagaaggagcaaccagaggccttgaaccttagcgagttgtgagcccattttccctttcacaggcaggttgagttgctctccacagaggaatatgaggagggatggctctccctaaagtcagggcaagaatgtctgacctcgtggccaatactccacaaaaggttggcttggcttccttcctgcctcaagaagttgttagttgctggctgatgtggatggagttggtgatgcttgggaactgcctgatacttgcatagaggatttatgaggtagtagtagcagagcaggacacttttgtagttacctgtatgtgctcagggagaagcaatctcacaagctttcttgatttagactcatcagctgatgaactacatttctaagaaaagaaaggcaccaactctggtagaagccattggttaccccactctttctttctcttccttcttcaacactgtgctccctaacccacttctctgtggtgttttgttgttgttgttgttgttgttgttttgttttctgtgtatggatggttttgcatacatttcatctgtgtactgtgtgcttgcctggtgcctacccaggacagaagaggaagtcagatctcctagaactcgagtcacagacagttgtgagctgccatgtgggtgttgggaattgaacccaggtcctctggaagagtagccagtgctctcaatgtataatcctgattgacaggaacgcactgcttgctgtgggcatagcactgaccagacttttcactggcaatctgacagggtgtggccatccccaatgggactgattcctgagcctttcctgggctgaggagggaatgagagtgtgtgcaagtttgtttaatgagaaggtgggtttccctgttgctgttactgtcaaaatccttaatcagagttgttaagttacaacccaaataggaatttagagatgttagagatggagtccaggaacttgtgcatgctaggcaagtgttctgcctctgtgcttcacacacagctgtttgaatttgtgacatcaatagaatatcttaagattgttttggcttcaaataataaaagagacttaactcaacttgttactgggtaagagggaaaggaggagaggggagaggtagtaaatgtagggacaagaatacatcttgtggtgccacagtaggatggtcagacagtaaggatagcactcaagagccaggggaccagaagtctacagaattctgttccctagcttgcttactcctaacattttcctctccctttggttcaacctttggcaccaataacagatgctagctcacacccaccaaggtcatgttggagacgaaatgagtgaaaggctgtgtgtgtgtgtacatgcacctacaaacctaagaccttcttatgacaactccccacctctagggaaaggctttggccatgaaagtggagctagtgcccatccctggccagaggacttggaagagtagagttcagtaagattttcaggttgaaatgagaaacccctcaactcgatgtaagccaggtgaaccttcgtaatgtgggtcaatcttccaaatggcgcctgtgcaggtaaacggggttgtttatctttgctactttggtatgaggacaggagagagataataaaaacagcacagaaacaaaatgcagcttaactgcccaataaacctatctgttagtcagtcttctattgctgggaagagttgctatcaccacggcaactcttataaaacatttcactcaggaaaacatttcactgggactggcttacagtttcagaagtttcagccattatcatcatggcggcaagcatggtagtgtgcaggcagaagacaatactgattacataacaggtacgagtcccccatgtcgtcaggtcgcagacagttgagcaacaacccgccttcccctgcttcccaaagccagtgagctcctgacctcagccccacactccttcctgtcacccacccttccttctttgatgagctgtagttttaagtttctgacctatgccacacttggcaatggggtccatatttctctcatctctctcactgttaacccagaggcatctggtgactgtccccaccatcccactgaaaggacctctccaagaacacccatagcctaactgtaggattctccctccttgtgatttataaaataccatgacggtctgaaccccgtcctgctcctccgaccctttctgcactatgccttcttggaactgattcagacttctgccaagtttatcaggctttttatctccttaggaaattgaattttcataaggaaccagacaaacaacaacaaccaaaaaaaaaaaaaaaaaaacaaaccatttttctaagctttatctcaacattatacaaaaacccctccctttctctttaaaatagtgagaaagtcctgctggttgttcaccggccaaggcttggtgcccaagaccaatgtggatacaatggctgaagggatacccaatattttaactcttgttctttttatcagctggggcccaggagatgacaggaccttctgagaaagctctgtaatggattgtccccttcattactttacaagctcttctggggacatcatgagcactcttccttcagcagcagcatcactaagctccatgactccaaagtctgcatctccactggtcacatctctctagatcccagacgcaggtacataacctcttagactctccacggtgacatccccacgtgacaccagaatgtcccgtgtcccattaaatctaccactgtttcataggcttgtttattagtttcccttttcacaatgacaccagacttcacccagtctcccgaggttcctcttgagagcccttccctatctttctaatcacatgcagactctggtcttttctcttttacttattaacaccttcctcctttctcatctggaagaaagctgtccccatggagaaagtctttcaaaacttctagtagatgcctgataccatggatggtaggtaccaagtctcatacatactgtgtttgttcttacacacacacacacacacacacacacacacacacacacacacacatacacacacacacacatgcctatgctaacactcagttcacaagccggacatagtaggagatgaacaacagcaactaaaaataaaaagattctgctgtgatgggacttgcctaagacacatgaattgtctatttctggaattttccatttaacattttagtgccttaattgacagcatgggtgaaggaggacagctgcacttgcatgggtttgtaatggatatctctcagcctccactcctggagctgagtactgaatgaggcacacatctggagtagctgggacttcaggaaacccaaaggtctcggcaaagatgagtcagaggcccagtcaagaaaaaaaaaaaataaaaattaatagcagatgaatgagggaggtgatggttagcatccaagaactagactggaatgcaaggtgccatcgtgtcttctcttctgcaagattcctgaaaagaccaggaaaagagcccgaatccagcacccagtaggacaccacctcagaaccttaacagcgaactttgacctccacccacccgattttcacgaccaccgtgactttctgcttgcctgcactttggcaccagtttagaatattttgctgtttgtagagaatgttaaaacgtttgttgctatgcctccaggctgcaaattccggtgcccaggcagagccccctctactttgctttctctattaagtcttccccagtgaaaacaaagggaacccttgttttgaagacatttaaaacatacctgaggatttccatttcgctggaaagccaagcatctccaaggacccatctctaagagctgaggtcatttgaagagctggataccaacaagatctaagctcggttaaatggagccaaaccacccattttgactgtttagccaaattcaagtatgtccaatgcattagaatactaaatcctcaacaaattctcctttggcgtgacctgacaagatccctggtatttatttattatttttatataaatggaaaaaattatagcagaactgggaaacttccacaggtaactaggttagagcactgaatgagacccaagagagtgctgtacagggatcttccctgccaaagagcaacaaaagacttgactttctgctctgcatgcaggtggctgatggactgttttacgatggggataattatctctgtctttctctcttagttacctaccaaaataaactgcaaatcccaacatattagaaagactccatcatcagctggcaggcaaaaccttagcagggctccctagccctgggagatgaaattgctaaggaagagaagtcagtccatctatggttcaaagggccagtgttaggtacagtggggagctttgggagccgattcttcctcctttcctgggggggggggggcactactgactcccagatgatggtctttccggacatctttgatgtaaatgtggcaaaggtctgtctttatttcctcatagtaccaattctttaaaggcaggtcaagcagagagctgcattcgatttatgatgttcaactgggaatgtcccatgatacaacaggattggaaagagcgagaaagagagggactcttggctaaagatacttttgctagtatttcaacaattacatatccagatagaggcttgaaaacagattttcctttccttcccttccctttcctttcctttcctttcctttcctttcctttcctttcctttcctttcctttcctttcctttcctttcctttctcttttcttcttttccatttccttccttccttccttccttccttccttccttccttccttccttccttcctttcctctctctctctctctctctctctctctctctctctctctctctctttttctggcagataattgtattttaattatattcatccacactccccacccttcccttttgcatcccctctcccaattacttcccttggtcctttaaacagtttgcttctactgtcaggacacatgcacatgcaggtttgtatgtgtttatatgaaatctaaaaagcacaagtgagagatgtgggagtcaagtccacggtgggtggtgcctactccctaggcagttggtcctgggctgtatcagagagcaggatgagtaagccatagagagccatatattctcccatggtttctgcttcagtccttgcctccaggttcctgccttgagttcctgccctgatttccctcagtgtcagactgtgacatggaagtataaaccaaacacacccttccttcctcatgctgctataggtcatggtattttatcagagcaatagacacctccatacttatttccatggtggagagactagtttgtgttccatcggcagtggataacaattccttttgtctttctcctccccagcccagtgtgatcacaattatcatgatgctctaggattggcacatagctacagagtatgtcgggttcatgcttctacagtgagatgcatgaggcagggtgtttataaagacaagagggtctatttacctcacagttgtagagtacagagtctaagatcagtcagctcaactggagaccagcctgcaattccccaaagagccccactgacttggtgagggtgcacatcacaaccagaattgggttggagtaagcgctcacatctctagccagcgagcagcaaggaaggttaccacaatccccctctagagcactcccaataacttaaggacctcccataagctgccctcaccttccagaggttcccccctctctcccagtagcacagcattgggaaccaagcccttctatgggaacctttggggagcatttaacattcaagtctgcaccagtcctctgcttatctgcacagtggcttatcccctagatccatgtgctatgctctgtggtaccttaaaaatcacagtaccagctgaattagagctcggactttatcccctggatcttccaaaactctacatcttcccttgactgccattcttcaaatagccatggctattagcataaatacggtcattgctatttcatatcacacggacactatgagcagtaactctgtgactcctagttattccaatcacagtgtgtacagagtgtatctggaaatgaatgaggagcctagaaacttttcagaaaaaggaatgatgacatactatagttattcccagtacaaagtgactaaagctaaaaagaaatatatgccgatataaataccatcccatgctggcaggaacatgcactgtcctggaaaacattcacattaaagttaaaaatgtacgcatagatcatgtagctagtgcatctatctctcggtttttgcacaatacaaataggcctccaagtgcaatgcaaaatggcgaagcactagagaagatttcactgtgtatcagaagcaacgtggacagacacagctgctgtgtgcgcacactagaataacacatacaacaaaggcaggtacgagctatagccatcagaaatagcatcaatgaatctcatcaacccgatccatgtgatgtgtggtctgtttctgccaactacacaaagagaaaggcagggaagagacctcaagctgggagagatagctttcagtgggtcctactactgagagaaactggggacccaacagtttatttttgatactattttgtttatgtgtagatacaagatttgtgacagttattatatgtaattagtttccctttccactttcactgtgcttatgtgcatttgatgtatgtgttgcatgcatgcatgtgtgtgtatgtgtgtgtgtgtgtgtgtatgtttctgacagacattgttggaaactagaaaataaaatcacacaagatagtgcatttttttccaataataaatctggaacatccctccactccccaaaaatgaggtgtttaagataagagtacacattatagtcctatatatttaagaactatagcttacaccaagaagctagtaaataaaacttctctctggcttcaggactattggggcagttgcagcctcacattggactatgtaacaccaatggtccccggtccagcctcccatccgagccttccatcccatgtttcaagagctttggtaccctggccatgcacctcccagccctctagtctacttttaccttataaccctctgccccaggaaggtgagccagtggtaaagagctggaagtaggcgaggatcactgcgctggaatgactaatgtcctattactccgcacatggtctttaagagaaagcatgatcaatacattgacactacctcttggccacagactcattcagaaagtgctagaagaaattcagaatccaaaccctaagaccctatccagagtcatcctggcctggacgtaagggcagcactgccttttaagtgtaaagaaaagacagcagagaacctagtcgtacgtggctacagtctcagctgggcctggggctgagggagacagacaataagctccaggccagcaagccctaggaacttagtgaggactgattcagaaagaaggaaagatgactggaaataggacgtatttgtaaaacattcccctagaatgcacgaggcccaaggtttaatctccagtgctagaaggagaattttaaaagtacgtgcaggggggatttcattttaaacacccagagtgccagcatcactgcatgccttcatttgggtgtcaagtatgtttcttacaatttaggaagctctacttttgttctgtatcgacatatgtattttgcatttacacacacacacacacacacacacacccctacacatacaaatataattatataattcctagcactgtatactatgacttcccccaagcacagctcaaccctaaatgattgccttgtaaacacagtttggcagttgaagtccttgcagatgtgaggatctacaggggaatgaacaggatgctgggaacctacctgcaactccccgctgggtatcagctcccttggggtagagaagcttggttgatcatgcatggggtctgcagaacacaggagtcatgggctcttgtccccttgccttgcaagtgtctcagaggaaaattccctccccacctcctcgccaagacgagaaaatactgtgctaagaaatccaaaattacaggaggctgttcccacccatggagaagcagtagggaccaactcccattgccctctgcttggattggaaagcttgtcttcctccttcgagaagctgggtggggttaggagaaagttggcttaccaactactgtgtgccagacccattcctcctcaactttctgctctaacgcctacttcattttgattttgttcttgacaggggaacctctttttaatattttccataaatacaaacagagagagagagacagagagtgtgtgtgagacacacacagagacagacagacagacacacacacacacaaattaaaactgatacctacagctgtgaggaaatgagagaaaaaaagtgaagtattggccagcaccagccctctgaatgcccagttcattcttccaaataaaaaaaataataaaataaaattcaagctttgcatctcagctattttaaaaaccacatttccaaaatattgcttttccctctttgtgagggaaatatgaaaaacacatggcttgagtgatccttgcaagctactagcaacaggtaaaacaggaactgggggtggcttcaaatagataaacacagaaatatgctaagttggtttaaaggaggatcgcaagatgaggaggaaggtgtgaaagagcggaaagcaagtctaaagccctggattatagatggcgtagagcccttgatgagaaaacttataatgtgcctactactcaagccacacctaatttccatcttctttcttcttttgttctctcttggcatactgcatatgtggccaaggtacctatcactacacaactcactttgcacaactagactgtgagctgcctaagggcaggaccgagttatatgtatctttgacatttaagtagatatagcaagaacttgctatggctttgtgcatacatgaataaatgagtggtggattccattcactgtgctgtggatttaacttcccctgacatctgtgatgtgacccttcaaatgacagaaatgtctcgacccattccagagttttacatgtttttgcatttctaacttgtgtcttcaaggctagtgaagtgtgagtctccagcaccagacgctggcggagaagcacggcagagttgttcatggggagatatgacaaggaggaaacaggccagcagactgcagccctgggactgtcctggagatccagagtgccaacgctcctcaagagaaaatgtgggcgagggtgagtcctgacagaaaacacaattttgtgattgtctttttctctagtgtcacagggatctattcctctcacaccgtgtgacgaatgatgtgccaagcctggaattgatatctggagagaaaacattaattataggacatcagatgttgctctggtgggcggttttttcatatagataggctgctgtgcacatggaattttcttccaaccagaagtctttgttgctgtcatctggatacaagtgggacataggagagcaggtgcttgggcaaacctggaagtctccagacctattcaaagaggtggtctgtgttgtgtgtgtgtgtgtgtgtgtgtgtgtgtgtgtgtgtgctttcctgtgctgatcatttggataactccatgcatattaaagtgctccacaagaaaatgaacttcctnnnnnnnnnnnnnnnnnnnnnnnnnnnnnnnnnnnnnnnnnnnnnnnnnnnnnnnnnnnnnnnnnnnnnnnnnnnnnnnnnnnnnnnnnnnnnnnnnnnnnnnnnnnnnnnnnnnnnnnnnnnnnnnnnnnnnnttcagtggtagaatgcttgccatacatgagggaagcccttgattcagtcccaagcaatgccacacagacagacagacagacacacacaccccacaccacacagacacatacccccacaccactaacaccacatacacactacaaaaacaccacatacacccacacacacacagtataccacacatacagagcaacatacactcatacccacacaacatgcacacactcatgcacaccacaccgcacagacacacactttaccacatacacaccacacacacacacacacacacacatcatatactacaccacacacacaacacaccacacacagagagatatacatacacatacaaacacatacaccatcaccacatccaccattcacacacacatacacaacacatacatcatataccataccttacacacacaacacaccacacagaaacatacacacatacataccaccaccacatacatctcacacacacccacgccaccaccaccaccaccactacatgcacacatgaaaatcagttcatctatctaaatatggaatcctagagactcttaaaaacaaatacaaagctcctgtggactgcacctgtgaattgactcctgaaggaggcaggaatcacaacatggtgtggtgacactggggactgggggtccgggatctgcgttggacctcactctcttacttagtcatgtcagccaagagctagctgcttggcctctttggtcccctgtctcagaccttagaagatggctctgggaagatgagttaaaggctgaaaataaaatacttaaagccttgcactttaaaggaaaagttagttcttggacaccagacagctgctttctgtgtcacacagagaagcaccaactacagacgaagagaaaccatctgagcagccacagcaagcagacaggccgcttctgcttgcagaagaagaggctgtaaggtagcttttaccatcaatgaaaagactgcccaggaagtcattaaaaaacacttgaattttcataccaccttggtgttttaagataaagtcgagacttccggcagcaacagggaagattcccagacacagaattgtctcagctttaagtcgtcattcatgctgaagttgagaatgagcaggagttgagaacacctcaggggcatgtttagccaggattgtcttttgggaaaagctctgttgaagtcataaacactctcacaaccaagcttccttcaaaaacacccagtaaaggaaagcaggcccagaagtcattgatccactatgacatcagcaagcaacggagaggtcacgccgcacctgcaggactatctgagggctgcagaagggctaggcaccctttgcagcccagccttgtttgattttggtttgttttcagagagctggtagttaaacatttacccaggcacacctggcgaagacaaggaggctggctctgaaggcctgtaaactgcaaactgctttcgttggcattcatccgctgtggcctcagaggaaggcaggaagccgaccattggaaaggcgagctgcggttaatctgaagacaaagctagatcatacttcacagagacaaaaatagtccgtggacactgtcccttcttccctagtagatacaagttcagtgcagagccaaggtcaacatgtcctctgtatacttatgtctggttaagagggtgtgtgatggatgtggtgtccaaaggaaacttcagctccccaaactccaaggggcagcccatatatccagaaatgagctcaaaatggactatagaatgtctggcagttagagaaaagccaccgtttcccaacaacttgtgaaatcagttcccagcagccacacagagtcatttttatactcagctctggcacaagaaacatggcacctataggcacatcaaagcctgtgctagcctgcagcctctctcagtaccacaagtacctccctgtgacacatgtcaaaggtcatgctaatatcctggcccttctcacctccttacccgaaactccctccagcttatggcctttcctccccacagctgctcattcctcttataacccagctattcacatttctttcttccttccttcctttctatctatctatctatctatctatctacctatcatctacctacctatcatctatcatctatccatccatcatctatatatcatctatcatttatctgtctatctatcatctatctatccatcatctatctatctatctatctatctatctatctatctatctcttattcccacttcttcttcccccctgcctctctctctcttcctgctatctcactatctctactattctctcctttcctgtttccatagccccagccatggtcagtttactttgtctgttttggactcatccagatgcctctggtagttctcgctcgtatttccaatacaaatcttaaccatatggagcagtcattttggcagttctttactattccccctcacatgatctgttgccaaaacccaggagaggtaaacattgatccctttgggagggcccagccccttataaccaaactaagttgctgacttgactcatacggtacagaccgtttgtttccactgccttcagccacccaccatcttcaactccaaatgtcagagtccgagcctcctcagctgcttctcttccacctgctctagtcatgcatctctcctcgtcctctcgggaagtatgctcttggcatctctggctctcggaacctactaaaagcccctgggtacccgccatgtggaaaggctctatttctcattgtctgggagaaggctgctatatgcttctccactgtgactggggcatctcttggaaaagacgcctacccctgtccctatattggaagcctccctctggcgagttttctgtttccgatcttattccctaaacctcccccatcatatccttgatctgttcctggctccctccccaccgttctctcgggatcttggagcttggctcacctgccttctcagtctctttccctcctcagactcggagagcacattaaagcctcgctgtctaactacagatactttggcacccatatatatagctcagtggccaaaacatggcatgcttgattcccaaattcttgcagattgtaacaacttctgccactgtccaagtgaacgacctaaacaaatcttttctctctgagctttctctgctccccacgtttgccagtctcacaaatccaagcagtcctgggtctccactcactctgaccacagagactcaaatgtctgggcgtggataatgttgaaatgttgtcacatgctgttctgccctgtataaagctggcttacaacctttcttctctagacccaagcatgcttgtttccaacatctccatcctgggtcaggctgcccacctgactctgacagagagaaggacaataagacagaatagcccccctgctccagaaaagcaaaaacaataaataaataaataaataaataaataaaccaatcagcaccccccccccaaaactacgtactttaaaatagcatagggattactgcttctcatcccatactcctcttggttttgttgacaactcttataaatgaaaaagtgtagccaccgatgtttaaccttgttgactgccccacccctgcatacagcgcagaggtgacttgtacacatgttctttaatcctttaaaactataactatgtaaaatataactactctggcatcctttgagggattcggaaatgctagctagtaatagttactctccagctccctttaatctttgggtttctcctgggcaaatgaaaatcaacctaattttataggaccttgacaattttaattcaaaaaggatacttgaccccaaaagacacctaagaagcattcatccatgctctccccctctgtctcaaaaagcccctgggccgctattggctgcagctgaagcagaaatggaggcttcgccttctcacttgagggagaacatttcacatgtcttaggtactcagagtcaccagaaaagatggctgagacacagacctgcagatactacccattctcagtgactctcattcacagcatcctgggtggggcctaggaatggaccattttagcaacttcagtgttgtttgctaacatgcagacaatctgaaggccttctaactgaggccatgggtactaatcttgatccccatactacatatctaggctctgttagttccatactgagaagatgcctgcagatggtcctgctgcccttgttgtcagtgagtgcagataggtgcacatcacagcgcatcttgaagacttcttcctcttgcacaaatatcctgtcttccgaaactaaatcatgcactggccgtgcaaggtacagaatgaaactaaattctccttctggtcctctagttttactgaggtgtaagtcagccatgaaaagcagtttagcacagacaggcattttatttaagcatgtggagtcccgtgagcttgtctggggaataagaagcacatttaggaatggagtgcctcgcaggtgttaaggtagcctggaaagaggcacaactggaccaaggcttcattctcttctcgggtggcatttgctgaagggtttctagggctcattatggcctacaaagtccagctgtggcaatttgccatcagcaagacagaccaaggtccagggaaggcaacagagtctatggtgcagcagcaagtgaccctgacgtgccagtgaactttccctttctcctaaacactccccctgatttagccccagctcatgagggtttgcagtgtcatctgtggcttcctctccccacaaatgagcctcaattactctaaaacctgaagctttagggatttcttgaaaaatggttcttttactcagtcaaaatacagcaagaaagaaaccgtgtagaacaaacttacgtagccgactttccccgacctctcaatatccacccaggcctaaggcattttccacatgatgagaaagatcccagagggttcagcagttgagagtactgactgctcttccaaaggaccatggttcagttcccagcacctatgtgggagctcacaatgacctagaaatgcctggtctagtcaacctgatgccttctctgacttccgagggtactacaaactacgtagtgtacagacatatgtgcatgtaaaacacacacacacacacacacacacacacacagagagagagagagagagagagagagagagagagagagagagagagaataaagaaataatatatctttaaaaaaatcctaaaagcagtacaacaaaaatcctgtgcttactgagaattctccaatggccttatgttcaccagtcctatatgtatatcacaaactgggggatggtgactcctcttgccctgaggtttatattcctcataacaaggttgactctgtatctctctggattggtaacaaacattttcagtatcgattcttcatgctttgtctctattctcttttaaaactgtcttccaacttaactcctatattgtgacacacatagagtcattgctacattaaaagtcagtatgtgtactctctcctactcttacccttagacctctcaggttttcatgcttcactcagagaaagcatctttctagacctagtttatacatagtactgtttactccctttttaatttctatctttgacctatactgtgccattctttaactaagcacagctggaagggacattagtcaggataatgccatgctaagttgctgtgacaagcaagccctacaatcccagtggctccttgtgggacagcacatgactttcatggtcagcgaaatctgagcttcttccaccatgtggctctggcttctctgggttgctcacttctggtagtgttgaggaaatagcaggtgaggacatatcagggatgaaggctctaaattcaactcaaaaaaggtagagagataggcagagatgcgggtgccaagatgactcaacccggtgttttccagagggcatctcacatgctggcacaaactcttatccataagtgcttgtaaagagccaaatatggctgacccttcagtccagatctttatctctaaggctccaagttgagaaagcctgtgactactctaccccaaagccacagttcccaggcagcaccggtgggtctgagagctggacagatgcaagctccaggaagcaagtgccagtggcaagctctaattatgggaaatgcatcctgcttcctcggggaggtacaattactgccaggaaagctgaggaaagcagacagaaaatagatgtgatgcttcgagcagaggccttgctgcctccgaaggcttgtgttttgaacttgactctttcaagataagtttaaagggtggagacggggcttatgggaaagacattctgaagtagggcttggcttgcaaccatcatgtggtttggggcaaatgagtctggaagggctattctcaagtcagataaaacgtgaaaagaagcagaggcgtctaaaaagcaagataaaagcaagggaaggggtgtgaacctccagggtctcaaggtggaatctgagaatggcctgggagagtgatatcttatcagcagagaggcctcctgtgtggtgaaaatccatatatccgcctctccttctccacgtccgagagacccaggctacaggtggtgttaaagaacatttccaaatccttacttaccatccgagattgtgtgcatctagaggatcactgttttgtctttgttttttatatgtatttatttggcggggtgggaggtgtgtcacagcacaagtgtgggaagaggacaacttgcaggagtcaaagctatgcgagttccttagatagaacccaagctatgaggctcgggaataaaaagcctttacctactgaaccatctcgccggcccacgactgtaggctctttagcctggctagcaaaaacctgtatgttactcagtgtgtgtgtgtgtgtgtgtgtgtgtgtgtgtgtgtgtgtgtgtgtgtgtgtgttatatgtatgcatgtgtgtatgtgtgttaatatgtgtatgcatgtgtgtgttatatgtatatgcatgcagtgtgtgtgtgtcttatatatgtatgcatgtgtgtatgtgtgttaatatgtgtatgcatgtgtgtatgtaatatgtgtatgcatgtgtgtgttatatgtatatgcatgcagtgtgtgtgtgtcttatatatgtatgcatgtgtgtatgtgtattaatatgtgtatgcatgtgtgtatgtaatatgtgtatgcatgtgtgtgttatatgtatatgcatgcagtgtgtgtgtgtgtgtgtgtgtgtgtgtgtgtgttacatttgggtgtgttacagactccacaatatatgtcataggctagtctcacacaatctctctgtatttatttcacaaattctggggttgggagcccatgcataataggacctggctatactctccatactcttaaggctcttggagaaattatttaacatcctgacatcttccataatagctagagaggaaaaaataaattaaaaatattatctgccacttgtctgaaaaggttaatacaacctgtacatttcttaacataaagttaaataacgagctaggcgtggtatcacatgcctgtggtttcattacttaggagcctgaagctggtggatcaccgtgagtttgagattgacctgggctatcaagtgaaacccttctcaagacaaatctacaaaagtcaaatactactacaaataaataaataaataaataaataactctatagtattaaccagaattactttattgtacctttctcaattttatttttatatatcttcacaattctatttcttagatgacagatcaagaattaagacacaacaaacctctgaatctcaaggtcaaccaaccttacccttcaggtttctatttcattgtcatttttccatgttaactgtgcacacacatgcatgtgcatacacctctaagttctttcaggatatccaagccacctgccttctcctcatgcctcccaacctcaaaactcagagtcaagctcagactttgccatacccaattgatgctcagaaaaacccattcatcttgttggtttcagaatgactgctaaaaaagtaataataataaatgggccccctgtttccccaaatgacagggataaggtgagctttagaaacaatgaaattacagagttaatctcataaaatatttatacagaatataaaggagctggagagacaaccttgatgcagttatgagaataagccaaaaagccacccatctagatgtaaagaagaagaatgtagagccaggcttgctggcaggcatctgttaactccattgctcaacagtctgatgatacaggagaattctgactccaaggctagtgtcagctacatagtaagaccctgtcaagagaccgagggggtgaagggcagggttaggcaaggcctcaaattttaattatggagcatagcgggaaggacatgcatatggttgcaagttaatgagtagaaagtcaattagctgactgaacagctaattcgccacaaaagcactgtgagaatcagagaggccctagatgcagagcccaggcacacgtgcctaggaaagatactgtcttggtgctacggttctttgatacactgtgtatctatctaccctatggtctagactgccgtacatcaccagcagtcagattttaaggtctctcttctgactctgccaagtgtcaccagagctgcaaagcatgctggtctcctcaccaactgtgtttattaccttacattaatatcattcttctaatgccaggtcctgcttcctttgtaagcttgccaaccaaacctcttttatgagcctaacagatctcaggccgttgtgtacgcctcaggatcaacagcacagtaagggataaatctgcctgagcagacagtacgttgcttagcaacacatcagcccgtcctctgcattagacatgggtcattctgacgtcatcacattcaaaggttgtgctaatgttacagctgacttcagagtctggattagacagttactgtatagcaagtcagaaacaggctgtgcactaaggggatggagatagccaagaccatttcaacaggccactgtatctgtgactccaccatagacagcttcttcaatggcagcaatacccttgacagagtaatgttttccaggttttttcataccttcttccctcgcagtggctgtgaggtatgaaatacagtgatagctcattgcaaaatcagtttccaagatgagttacatgatccctttcacctgttaggtaataggtgtggttaagtcttacccttgtgccttctccagtctgtcactgacccaaactctatcttgaatcttgggcatgagatgtaagaattcatgcaaaagctgtgaaagcaagaaaaggtaagttataaggattactatagagtctcagataggaatacattagacagtgcataaaagttagcggatgagggagatggtgagtgctatgtgccctgacatacacagaggaattacagtactgcagaaatgcttataatactgtcaatggcaaccataggaatagaacaagataatgtatgaagtgaaacaagccaggcatggggtgaaacaaggcaggcctggagataccagcaccacctttcacactcatgagcaagccaaagaagctgatctcacagaagtaaagtagaactctgcccagtagagatttggaaggctagagtctagggaggagagatggagccaggatggttgatagactgagagaggaagaataacagaagggtctacagcacagtagagaactatatcttataactaattaaagataaagaaaacctggtagagacgattttagatggatcaagcatactgctaagtgtttgaggtgggcaagcccattatgttgattggactgcgacccatttgcatacttgtactgaaacctcaaactaccccaccccataaataggaacaaataggtgtcaattaaaacgtaggccattgcaatagggagatggctcagctgttaaaggctaagctcacaaccaaaaaaacaaaacaaaacaaaacaaaacaaaacaaaacaaaacaaaaaaaccaaagtcatggatttgagaggggatattgtaggggcatgggaggagttagagtaaggagagggaaggtggaaatgatgtatatccagtatactcatatatgaaatcctcaaaaagtatcatccatcaatttaaaaatcaagctttagttatgagtctagaagggttccgagccctagttataccagattgtcacatacaaacctgtctgccaacattaagtacttggtctctttagagagatctgttgaagcataatgggtatgtacgaagataagtggacaaaaggctccacttttgtagtggtagcagtcaacaccggtgacactggctctctctggacaatgaacaaccccttcagcccctcaggtttccttacacacatttttagccctacctcctgactcctcctaccttccatgggcaacctgtttccttaatttttaggatttcctagaaataagtgtgaaagaaacatagttatgctggctctgtgtgnnnnnnnnnnnnnnnnnnnnnnnnnnnnnnnnnnnnnnnnnnnnnnnggcgtacacacgtgtgtataagtggtgttgaaagactgagaggagcccctcgctcaggcctcaggacaatagcagacacccaagaactcacgataaaccaagcttgatgcaaaccacatgaggctttattcggggaaagccagagctctggggatgactcatatcccacgcagggatagaggagttgacctcgaggggaaagaggacccagtttttataggccctcagaggggaaaggagaaggggggagtaggggatttccagatctaaacaatgtctattctaaaatgattgattcctcaagaaatgggtatgggagggaaacaaggaaagagtctaatgaaggtgcagcactctggattggccccggctatgattgctggtgagatttcccgactctttcccagcaacccatatcacaaacacctggcagtgaggtgcagcaatgggcacacacctggtcagaacattggcagacacacaggttcgaggatcggccagagcattgtgcacctctatttttctaaatcagtgaagctagttctactaacaatgaaatctattttgccaatttcagggcttctgtgaccttttacattctgtcaggatctttcagtgtatatacatgctcatggagatgtgtatctataaacatcctggatcctttcactcaacatacttgatttgatttctacccattttttagcatatatcagcatatattcattccttattgctgttactattactgtgtaatactcctatgagtgcactgtggtttacctgcttatatttgagagacacttgagttgttctcagcttggggcagttagaaataaagtcctttaaatgtttatgttaaaatatttgagtggaaatagacctccttttctctcgagtaatacccaggaatagaccgtgcatctggttcactgctgacttcctaagaaactgccaaaccatacccaccagcagcaacgtatgaacgttctggtttctctacatccttgtcaacacttggtgtagccaggtttttcctttaactttagccattcacatagaggggtggagtgacattttctgaatatcatttgtgactagagatgttaatacaccttttcatgtgattttttttgtcacccccaattctcttttggggacaaagtgtgcacatgactgtggagtccaaaggtcaatactgtgtgtcttcctcagttgactgtctgtttttgtttgtgagatagtatccctcactgccctggggctcgctgacccagcaggctgggctaactggacagcatgccccagtaatcttcatgactgtacctctccaagtctagactacatgtctatccatgtcattgtgcccagaattttgcacttgggtaccagggattcaaactctggtccttgtgtagcaagcactttaccaactgagccaatccccactagacacccaccccttgtgttctctcataaaatgtctattcaagtatttcctcttcaaaggattgttttcttatttctgagactgagtttcttatccatcctcacttggtcaaactgatgtgttatggtccctttcttccaaaacctgctttgctttttttattttgttaacaatgtccttaaattaacaagtgattcattgtggatgataatctattcatttactttactttatggattgcgtatttgatgcaaatacactctgcctaacacaaagtcacagatgttttctcccatagtttatagttttaggctttatgcttattgcttgatatttatatggtgaaagatactgactggtctatcccttcctatgtgggtaatctattgtacagacagcatttgctgaaaggacactctccacttgaatttgtttgctcctttgtcgagtcagttttccatgtatgtgggtgggcaaccctattgtactgacccacttgtctgtcaggtcctacactcatgaagagtatggctttgggagtcctgacactaagtcacagtattcctctggtcccttctgtaaagtgtcttgcttttagcttgttgtgatttgtttttgttagtctgggttgtttatgtttgcacatgaagtaaaaattcaatttctaccgaaagattgcattatgattttgcttgggagaagggttgtcccaagcattgtctagtattgagttttctggttcttgaatacattgcgtgtcaccatttctttctctcttcttccacttttctctctctggcattttatggggtttagtgtatagagaactgttgatgggcagtggtggtgcaggcctttaatctcaggacttgggaggcagaggctggtaaatcccccagacaactcgagagagagagagagagagagagagagagagagagagagagagagagagagagagaagcttcctcctctacaggagctgaaggcccagacccttccttcagcagcacacatggaggcaggaaggaggggacagtggtgcctctccccccagagttctgactgcaaagagaaagatcaaggttgtgagctcaggcaccgggttcaatcccaactctgacacatctcatacttggaagatgtcgtctctctagaatttaagttttctggtcatcagagcatcccagcagcccctggaaagcctctgtgagataaactcaagaagctcacagaacaattccagtcacataataggcaactaataaatattagcagcagcagctgattttcttatcaatagcacctcagagtaagaaagtagacataatgctgacttactaggcagactggaccacttggttaacggcttcaggtatgcctctcatctgcctttggccattttgagctgactagaactttccagaaggaaaatctttgcattatggggagtagccaccgagggagcccaccatgatgggcaatccccgtgtttagctttacaactggttcctttatttacttgggacatcttgaggtctggggggtctggaggaggctgctctaattatttccccttactactcctgaaatctaaaagcctgactcccttagacaatgacttgaccctagaaaaactagttccagaggcctcactcactacatcaagcaggaggagccagaggactccaggactggctgcctctgataaatgagaccttttcttgaatgatttggccccaaatattcacacaaacaaggttagaaaccaggctcagctggtctgtcactcagaacttccccaaagccttcatctcaagccccaattccacccctaccccgtgcagaaccagccaaaatctttgttctcagagctgatacaaaaagcatttattcctttggtaaggagtctgcaggaatacaggagtaaaggcgtttgcaggagtcgtagattttgatgaagaagatgaaaggacttatttgtttggtatcaggcataatgactgttggatttcctgttgtgcgatgcccttgcttctgagctcagggtagaaggagtggtgagcagccatccaaggcagtttgaaagccattttcacctcacaccatcagcttgctcagcaagcatgtaaacaagaggactgggctggagaaacacgagagggaaagaaaagttgtttggtctgctgtctggagcagtccatcccaggccaaaaggaaaacccagcaataacaacagggagttcacagcccacactcacatctgtgacgccttccttaatggtgctggggaactctcccaagacgacaagctgctagctcatcctctcccaccattatgacctgaaaagctcccatctgtctggaaaggatggaagtgtcatccgagtccatgaatcaggggtgaagaaacttcagttctgtggaaggtcggcaggtgcaagtgttttacaaatatttgctgtcatctggaaatccatcattgtatctagtacccagaaaacagaggtgggagtaacggaagttcaaggccagtctgggttccacagcaagacactatttttaaaaggtgggtgtgggggataactccaatgatgtaaccttccaggaaaagcaagctttctaaaggacacacgtttccattacttcgataaagcatatggacaatcattctatttatttaagtgactcagtacatggctatggtgtaataattaatggtaaggcgtccacagacctagcggtggtttgcccaagcattaaatgttccctgatcatgtccactttatttaatgtcattttccgatcttacataaatgctacaaactccgctgtatcatcattctgtattgtaaagactctgcttatagccccagccatgtccatctgtcatctctgccttctagcaattgccactgtgaactagaacagtggttctcaactatggcagtaagatgaaatcccctagggattatatgtgcctggattacatcccccaagctgtggctctaccagtctggtgttattacctggacactcacataccgtaaacctccttagttgtttctgttgagaagtccagtctggagaccactggaaatatgaaaatgataacctatctgatagaaatgtgcataaagttaggttagcatgatcctagactctcctacaaataagattagcatattaacattctggtgtgtgtttagagatctcaggtcttgatttcttcttcctactgctccaggaacatgacctcaggttagggagagacagatgaaccagtagttagatgtttctgactacagggctctgcccagcttcaaatctcaactgtggcacttttctctgtgactttggatgagtgtcttgacctttctgtggctcagccctatcaggaaagtgtaaagtgtgggaaggatgcattgagcctgtgcagagcagcatgtgacaaactgttagtactccagagcctgcagggaactggattttctccagttggttaaggtaggaatgttatggcacgcaaaggttagcaactgtagagcgctgcctttaatctaggcaagaacagggaaaggattgtcagtacttaggagaagccagagccgggcagttatagcaactgacacagatgaggcccagccaggcacaaacctgtcatcccagctctcaggaggcagaggcaagagggtgctaattttaagtccagcttgcactgtgtaaagagacatcatctcaaaaatggtggacagagctggagatgttgctcactgtgtgcaaggtgctgggtgcaatctccaaccagcatcccctctctgtcacacacacacacacacacagtataagtggaaagagagaagaggacacaaagcagaggggaaatccctagcccctttccttccagcctctctctgctcctgctggaggctcgctctggctggctacccacagaagccaaagagaacatggaacccacaagcagagaacagaggatgacgcaggtggaaggagaggcagatggaaatcaccagcatggagagctgcattcgtcccccctgggcctgagaaattcattgggagccagcaaggttacatagcaccagctgtggcacctgagacaaaatggtccctcatctgtcctcattcccaaaactaagatgggccaacactgtgatggaagaaagttcactcgttattataagtgccacaagtgcaggtattggggaccttgagcatctcctgtccctccctctctgtgccttcttcctgtgctcctcttccaccctccctctgaagatctaaacacagatgtcccttctcctcactgcctcacgaatcctgcttcctggagaccagctggcagcgtcctctgtaatgtcttcccttaccacctccctgtccccaaatgcctcctctctttttttctcactcatgaatgttgacctttaatacaatggagactccagtcatccaccctctcactccttacacaagtagccattcttagctcggctcacattagcttcacaaaaccttccgaggtgcttcagcaaccgccgaggtctgagtggcatcagcagaagcacgggctcttctggtaacttccattgtaggtgccagggccagaggtggctctcgcaggaggtatccctgccctcggctaactccctctaggctttgccactgccctagtctgcagacccaagtaatcaacatttaggttcctgccagggtctcagagcttgttctgtagtgatgtgtgtgcgtgcttaagtcagaccctttgcaatgagtctttctttctttccaaccttaagggttttacagatcctacaaccacacattcccttaccagacttgattaaactattcgtctttgcttattactgagcttctcgctaagccctttggcccctcctcccaactgtgtgtgctttgccaatggccattcccctgacctgttctcccttgcatgtctagtgatgactgactgtgctttcccagggaatgaataggaacctgctcttagtgcctcacagtaccatgtacttagtgcctgtgcagcatgagagacctccagacaaagcaaagtctcgatgtccagtgaggcctggtgagctggcatttggcaagattttaacaagttagccaatcacacataccctgtagcctaagcattcaatcgatccttgttctcaaagactttttttaaatcaggaaaggttgatagggcaggagggtgggagggagcttttatatcctaatttataaggaccatttagactccatgttgtaagaggaatatgcatgtgcatgttaccaatacctcagcacatcacagttaacagtttggttgttctgagttactctccagccacgggatagatagtacttccaagaagtatccaagccaagacacccaggttaagggagggttgatgagagcaccagacatcacccatctcaggagtggttggccacctaacccgaggggcaagactgagctcccgagtgactgtcttcatgtgcccttcccaggataatcagctttctggagagttggaaatgagatgggatgcagtttgcgtggggtgtcaatccactgccatctcaggtcaaagttctctgaataaagtacaccttaaaaactgttctttggatggatcacaaggcccccaatggaggagctagagaaagtactcaaggagctaaaggggtctgcaaccctatatgtggaacaacattatgaactaaccagtaccccggagctcttgtctctagctgcatatgtatcaaaagatggcctagtcggccatcactggaaagagaggcccattggacacacaaactttatatgccccagtacaggggaatgccagggccaaaaagtgggagtgggtgggtaggggagtgtgtgggggggtgtattggggacttttaggatagcattggaaatgtaaatgaggaaaatacctaataaaaaattaattctaaaaaaaaaaaaacaaaaaaactgttctttggggccacagcataagtgtttgtatcctggttataggaagacagtgtgtgataatttgagttagcacaggatgaatgctgcttaagtagaacatcgatgataacaaaattgcatcatgcttcaaaaaaaaaaaaagaagctgtgattatcattttcatgaatgaagacccatttcttactcgagtactatggactttttgatggatttcctcatctctgtttgcatatgcataatttaggtggctaagagatgtttcccactttcaaatttcatgtgtcagctgacatgttgaatacgtgacagtatttcgtgcatacaggaaattgatctgtcagtagctgaagatggatctcgagatggcttcctagtgctaaaacattgtaaagtggaattatgtgaccttccttcctgttgacataggtaagggtaaggtttgtacttctaccctccagttcccacttccttcaatgtggtatctcagccaaaccagcaccttccccatgggtcactacgtcgatagacaaggaaaaacaaagcttagttttgagcaatcttgcgtgactccaaagaatgtctcagctcctagttcattatagatgaacacaaatacaagcaaaccatcaacttgtcataataacacctgttcttgtatgcctgagactccctcgtcacatctgtcccagctgctgatgttggctgctaagcaagcttcctgccaattgtctcacctattccccccactgagaaaggaatatgtactatatattcatggtataacatatgatgctttgaaataacatcgaagaatagttcaatcaagttaactaaagtatccattgccctcaactagcacactgatctttttgtccataggactcttaacctctactctctcggtgatttttaggaatataatcctttactgttaaccatagccatcatgatgtacaaaagagagtcctagaacttgttcatcttgtctatagctttgtgtccctggagacacaccccctcctcacttacaagctctacttactcagcatttttaagtgctacatatacaatggcattatggggccatttgttttattgtcattggcttatttgacttagtataaatttctccagttttgcctatatcatcccagattactgagtaaatactgaagactgagtaacagtctgggtgagtatgtgttgtgtgtacgtgtgtcttttcacatcttctttatcagctcatttatcagcagatgttattgccatatcttttctattgcaaacaacgcagcagtgacgaagctacagataacttttgatgtgttaagttcatttgatatctagtagtaggattgctatatcataagctagctctgttttcaatttcctgaagcgtctgcataccattttttttttataatggctacaccagcttccttccatccaaccatggacaaagattttgttgtctccacattctccctggcatttgatgtttgggaagtttcgggtcttgccatctggacagatgtgctgtgggtctccctatactgcaatggaccttgctcagctcagcacaccctacttggagcacagttctttaaacacagtgagcccaaggagcaagtagactgaggcatggatcaaggaacttatgagtgagaaatgggaaactcccatgcattcatcctcctggagagcaagaagcacaggtagacaaccacattctgtgagctttacccatagtgtcctacccttgcctgttggaaatacccagagtatgtgatccctgccgcattaaccttggaccaagtctgactcatgactggggcatcgtttccaagtctgagtaagtatctaagggcatagcctgggtgacccttcagaacagatgcagggacactccctgtccatgggattgggtggattaggggccagatcagcattctgaaatcccatctgtggtaataaaccacctttattacgcctgtaaaactttgaaatgagaatacgtgcaaacttgacatgttccactgacgctcatagtaaccagcaacctcagttctaacctggttcctggacttcatgcggagtggactcttggaagttagcctcaataccacagtttggttttgctctgaaatgatatccagggatccatcccataattagcctccaagcgatgacaccattgcatacactagcaagcctttgttgcaaggacggtgatatagctgtcccttgtgagactaggccagggcctagcaaacacagaagtggatgctcacagtcaactattggatggatctcagggcccccaatggaggagctagagaaagtacccaaggagctaaagagatctgcaaccctatcggaggaacaacattatgaactaactagtaccccagagctcttgactctagctgcatatgtatcaaaagatgacctagtcggccatcactagaaagagaggcccattggtcaggcaaacgttatatgacccagtacaggggaatgccagggccaaaatatgggaatgggtgggtaggggagtggggggggggacttttgggatagcattggaaatgtaattgaagaaaatacgtaataaaaaaataaaaaaataataataataaaaagaaaatgatcggacaaaagagcccacagttgtctcactgtagcatttggctgagtggcaccattagaagtgggtagagcaaccctgcatagggaaaggctgtttgtgtgggcaactaggaaagttctagggaggagagacccagttacacacaaaagaacacaaagcacttcagattcgtgttcgctcaccctggcacgcgtggaaaggaggctgtttgggtgtgtagaagtgcttcccaaagagcaagcccagaccaggtgatgctccaaagttacaagtgccctgtgagttactgggtgtccatttctgcctccagttgtgtaaacaatgccttgcgtaatgtggatcttgataatattgactcaaaaccttgaaatagatgaagtcatactgagtcactaataggagggactctgccagctggaaagggagcacggagttcagcccagggtgggacagtgtaaagagcagcgtgagggagtaggcagagatacggtcacaagcattggcctcccaggcattgtgtgtgtgtgtggcatttgtcatgatccagactgcccttgctgtaagcaaagtccatccctttgtatggacttgttttggtaaaagctaagtagagaggcactatttatttataaccccgtttttcatttttaagtaaccagtcttttggtgctagttatcataatgtttaatgtgcttattattgtctggtcattttagaaacaaaatttcactatgtagtcccagctggcctagagctcactatgtagatcaaggtggtgatcttcctggaattatgggtatgtggtgcgtgtgtgtctgtgtgtgtgtgtgtgtgtgtgtgtgtgtgtgtgtgtgtgtgtatacatataattttcaagaatgtatctgttagtgctgagcatagtggctctcacctagaataccagcatcagaaatttgagtcaatcctcagctctctagcaattgtgaggttagcctaaggactaactacctcaaaaaaaaaaaaatcagataaaaaaaacaaaaatacctctgttaggtttaagtacacaaaaatatggaggtagataatcatatacctatgtaagtctcaacattacaagccatccaacataccttgtcctatgctgtttaccttcaaagaaccaggctaatgaggcaacattttaatagactgtttttcttcccataggctagcacaaagtccatggtccctttgaagatctgctaataatctataaaaacaaatggagcttggtgaccaatattccccagaccctgctgctgtaggaagcaggttcaagtgtgcacaggccagtgatttcggggtccagagagaagcaaccggttgaacctggagagaagggaaaagccagcaggcagttacaaaggactaaaaggagttcaaacaatcgagtgtgtatatgggatgaacagttctcttctttgcacccttgagggagtgtgcattgaagtatgaccagaatgaagccagtaacaggaaggggacctcccagggcagctcctagttattttttcttgaacacagagactcctctgtggtctcacttttttggctctgaaccttggtcacatatttctaggggccgtgtaagccaaggacagtggagagtgcagcaagaaaccaatcaacctgatgttagggaggaaagaaagacatgcctgctgttattcatgaaaaaaaaaatgggacttcctcttttttctagttaatgaccttgaagtaaattcgtcaggcacaacttgcccggtccaaccagagaggaaaccctcactgcaaatctggaccaatgcagctgtgcacacagcaagagacaagacagagcccaagcatagccaaaggaggaaacaattgcttcattgcatctggaggatttgagagcatagaggctacggcatcacatcttccattcagcctgtcctttcctagaagaaacactcacgggtggaaggagtgtgaaattaaaaaatggccagaggatagataaaacagtagcacagacctgtatttaatcccagtggagattgggaagactggaggatcaatacgaagcagcatgtttgaggttagcctggcatctatgagacgccatcttttaaaagtaaaaagatttatcagtggaggtgaatagcaggatcgatttgttttcaccacataacaagttctccttggagacatggaaaccctgacttttcaatttggacaaaagaaaggcaagctcccgggctggggagtcaagggagaaagcagagggaggagttactggcttgataggctagctcagccatagcctggtctgtgaaagaacagttgcctactgtcctgggaccaccaaggaggagcttgggaaaatatatcactttataagaaccaagggcaacgctgtgtcctgcagctcgggctgcttctcaatactccagtccagtttatagagcagtggcacgaatgcagaattgagggatacagtcacccttcagctatgcgtgtgtttaccatccccttaccaacaacagctggggaaatgggtgacaagggcggggggggggggggggagctgagcaagccagggaggccagcctctaagataaagacttagagtgtccttgatgaactggactttagccccagccacctgtaacagttgcagcaggacaatggctctgcttttttacagacaggaggggtggtctcaccaccaagtcagttatcctgaagtttaacatcctcctgccttagtttgctaagcactgtgagtaggtccatgaatgcctagcaaggctaaggactttttgcctttatccttccaagtcttacgttgatggattcactctcagaatgctcccattctgtagagtcaactatgaagctcttagaatgcgccttctcctagtctctgggagcattgccctccaagaagtaaaccaaaagctggtcactgctaagaccatccccagccatgttcccaaaaccttctatagcactctgagtgggcttctctgccctactgaagcagggaaaacacatgagtaaaggactctgagctcttgggattgtgcccattgaaggcaatgctctggtgccatttatccacagctagccttggtgttgccgtccttgtttagaacacccagcctccaatcctgatagccacccattccacagtctggtcttctaatttctctgctttctgcttaaagcattgccttgttcctttgaggtctgaagcatctctagggatggaaagcatagtgaggtcagcaacctgaagggtgtatggtctccatcccagtgccttattgattacataaatgtccctcatggtaatgagtgataactttgaaggcttgttccctggcctgccagcttctatacacagacagacactggaggaaagtgtcccttgtagtccacccctgctgaagtgaaatgccccacagatttcttacttcagagctacgtcactggaggcccataagacaagtaggttcccttgaggtctcagctgtgctgaacatgtctacttgtttgttttaggtaggtaagtgaagctatcattcctgggaaggagagaaatactgggaggtatcggatcactggagactttgaaaattcagaacagtgtggtggtggtacctgtcaatccccacacactgaagagaggaggagaacttggaggtactgtggttctacctcctgtaggtcagtcagtcacttactattttgtaatcaaagccactgcaggcgacttggtttctcagttgaagttggcaagttgctagaagaactctatgcaaacccttttcttttttggtcaggcttggctttcttttttgtttatcaataagggatatttatttcttaggccttattcttcaacggaagttaagagattattcttagaaaatccctggggggtggggggaatgagtcactgtgttagcacactctcagaacttaaattggcacaagccaatcagagaggaagccatgttaccatcacaaactggatttctctctgagaataggagagaacacagaacaaactaaagggaaccatgattccctcttgctccttttccccaaattcccagttgctctccgaagaggctgcagtatccaagggtaaaatggagctgtttacattgctgacctattgcttgcctgactggagtctagatcagacttgtaatagtacaagctctgtagaagagccattgcagagatcaaaggtcaactctatataacattaccactgacattccagtcccaaacttcttgtgtgtatgtgtgtgtgtgtgtgtgtatctgtgtctgtgtgcattcatattaacataggtgcagatgtgtgcatgcaaagaccagggttcaacattgaatgtgcgctccttaattactctccatcttagtatttaagcacagtctctcactgaacatggagttcactgactcagctagacccagggatcctcctatccctgtctccccagctctgggattatatgtgccacaccaaggtttcatgtgggtgtcttatgtcacactgagtacttcatagctatgtggtaagccatctctctcaatctcacctttagcacattctccctacattcactgaattcactaaaatcaaggagcttggcctgttgctacacatttcaaaactagaagaaatcagcacttttgtacgagaaatgctttttgggaaccccagcctttctttctaagttcaaatatcccaattctttaatcttcaactttacttacatttcttaaaacaaagtctctccttccagtttcaagaagattagattttctctggaaccagattaaaagcccaagacaagatataatgctcccatttcgatcagctgaaataaatataactttattgcttttcttcaagcactggcaaattttttattgtcttcaagagccaataacttcagctcactattatttgagctttttattagtaaatgactttttataagtatagtgattctgactggtgtttataggtccagagttcagatcccagaacccatgttaactataaaatgcatggtggctgattatgggatggatccccgagtggggtagtctctggatagtctatcctttcatcttagctccaaactttgtctctgtaactcctttcatgggttttttgttccatattctaaggaggaatgaagtatccacccattggtcttccctcttcttgattttcttgtgttttgcaaattgtatcttgggtgttctatgtttctgggctaatatccacttatcagtgagtgcatgtctaatgacttcttttgtgattgggttacctcactacggatgatatcctctagatacattcatttgtccaagaatttcataaatttattgtttttaatagctgagtagtactctatgtgtaaatgtaccacattttctgtatccattcttctgttgagggacatctgggttctttccagcttctggctatcataaataacccagacactattgcatattccagcaagattttgatgaagggaccctggtatagctctctcatatgaggctatgccggtgtctggcaaatacagaagtggatgctcacagtcatctataagatggaacacaggacccccaatggagaagctagaggaagcacccaaggagctgaaggggtctgcaaccctataggtggaacaacaatatgaactaaccagtacccccagagctcttgactctagctgcatatgtagcagaagatggcctagtcagccatcactgggaagagaggccccttggtattgcaaactttatatgccccagtacaggggaatgccagggccaagaagcgggcttgggtgcgtaggggagcagggcggggggagggtatagggaactttcaggatagcatttgtaatgtatataaagaaaatatctaataaaaatatttaaaataaaaataaaatgcatggtggcctgacagcctgccggtgatctcagccttagaaagcacagaggatctatagaacaagctagctggagatatcagccatttcagacacacatacacagagaggggggggagagggagannnnnnnnnnnnnnnnnnnnggagagggagagggagagggagagggagaggaaatgtactgattctattgtttgttttgattgtcagatttatgatgttgtaatggctaccagattaaaaatcagagaattcttcattataaattaattgtgattggtgatttgaaagaggatggcctccctcccataggctcacatatttgaatgctagtgtccccagttaaagacagataaggaggtatgactttgttggaggaagtatatgattgtgggtgagtgttgagactccaaaagcccatgccattcccagtaagctctctttgcctcgtgcttgttggtcagatgtaagctatcagctaccgctccaacagcatagctccctgctgccatgttccctgccttgatggtcatggactcactgtctgaaactgtaagtgcccattagatgctttttttctataatttgccttggccatactgctttgtcatggcaatgggagaacaaccaagatggtgtgatataaatcagatttcattagacaaaatatcaatctataaaagtttgctggataagctacagacaccaaatgagagagaacagctgggagagtcaggcataaccaacatgttacctccagaaaatagttgtagtctaggagctggggttttgctttgaaatctcaaaaacatggtcatctctgtgtctggggtattatcaccatctgctactgaaaccattcctcacctacataactaaggctagcctcaaattcataatcttcctctgtcagcttctcacatgctgaaattactgaaattccacagtcaagcagaaaagcactttaaagatgtgtgaggtgtcttttctccatgtgcatggggacgccttaggatgctgtggtagtttgaataggaatgccccccatacattcttgtgtttgaatgctcggctcatagggaatggcactattaggaggtgtggctttttctgagtaggtgtggccttgttggaggaagtatgtcactgtaggggtaggctcaagatacgtcctgtatggcacagtctccttttgctacctttggaccaagatgtagaaatctaagctccatctccagcaccatgtctgcctgcatgcagctatgcttcctgccatgactttctagaaattccacctactctgagatttccattctttttcctggcccttggggcctctctcctgtctctccctgtatctgattctgccctccccatttccccctcctctctgccacccactttctgtcctcctcttgcctctatgactattctattcccttctctaagtgtgatccaagcatccttacttaggccttccttcttgtttacttctttgattctatagagtgtatcatgggtattctgtactttatggctaatatccagttactagtaagtacataccatgcatgtccttttggatctgagttacctcactcatgatgatatttttctagtttcatccatctgcctgtaaaattcatgatatccttatttttagtagctgaatagtattgcattgtgtaaatgaaccacattttctgtatcaattcttcagttgagggatatttgggttgtttccagttctgactattataaataaggctgctacaaatgtagtggagcatgtttacttgtggtttggtggagcatcttttgggtatatgcacaggagctggcaaagctgggtcttccagtagaactatttccaattttttttgagaaactgccagattgatttccagagtagttgaacaagttagaaaacccatcagcaattgagagtgttcccttttctccacatcctcaccagcatgtgctgttgcctgaatgtttttcttgcccattctgactggtgtaaggtggaatctaggattgttttgatttgcatttccctggtgactaaggatgttgagcatttcttcaagagcttcttggtcattcgagattcctctgttgagaattctctgtttagctctgtaccccatttttaaattggattatttggttttttggattctaacttcttgaattctttatatattttgcatattagccctctgtcaaatgtcgtgttagtgacgatctttccccaatcaataagctgccattttgccctattgacagtgtcctttgccttacagaaggtatgaggtctccatttatcaattgttgatcttagaatctgagccattggtgttctgttcaggaaattgtctcctgtaccatgcgttcagggctatttcccactttctcttctattacatttagtatatccagttttatgctgaagtccttgatccacatggacttgagttttgtgcagggtgaaaaatatggatatattttgcattcttctacatgcagacatccagtgagaccagcacaatttgttgaaaatgctttcttttttctattgtatgattttggcctctttgttaaaaatcaagtgtccatatgtgtgtgggtttatttccaggtcttcgattctattccattaaccaacctatctatttctgtaccgataccatgtagttttttgtttttttttttttatcattactgctctgtagtactacttgaggtcgtggatggtgatttctccagaagttcttttattgttcaggattgttttgactatcttgcggttgtttgtttgtttgtttgtttgtttaatataaagttgagaattcctctttcaaggtctgtaaaaaacatgtgttggaattttgatagggattacattgaatctgtagattgcttttggtaagatggctattttcactatcttaaacctactgatccataagcatgggagatctttctatctgatgatatcttcttcaatttctttcttcaaggatttgagattcctgtaatacaggtctttcatgtgcttgtttagagttacaccacgatattttatattatttgtggctaatgtgaagggtgttgtttccataatttctttctctacccatttatcacttgtataaaagagggctattgtttgtctctttgatttaattttatatccagccactttgctgaagttgtttatcaggagtttgctgatgaaattttggggactgactatgtatatcactccagaatagtgataacttgacttcttcacttccaatatgtattttcttgatcttcttttgttgtcttattgttctagttagaatttcaagtactgtactgactagatagggagagagtgggcagccttatcctgtggttttgcgtgaattttattgagtatttttatgttgatgttaagtgaatttggactgaagatctctttctttgttgagtctttgggtggtttaggtatcaagataactgtggcctcatagaatgaattaggtactgttgcttctgtttctattttgtggaatagtttgaggagtgttggtattagctcttctttgaaagtcttatacaattctgcacttgggtgatggtgagatggctcagcagttaagagtgctgactgttcttctaaaggtcctgagttcaaatcctagcaacccacatggtggctcacaaccatccgtaatgaaatctgatgccctcttctggagtgtctgaagacagctacagtgcacttacatataataaataaataaataaaagaattctgcactaaactcatctggtcctggactttatttggttgggagacttttaatgactgctccttaggatatggcccctagtacatgttctagtggctggtcctactttacctgatcttgatttaacattagtagcggtgtctgtctagaaaatgatccattttgtatagattttccagctttgtggaatacaggcttttgaagtaagacctaatggtttgttttgtttttttgttttgttttgttttgtttaatttcttcagtgtctgttgttatgtctccctttttatttctgattttgttaatctggatcctgtctctgtgccttttagttagtttggttaaggatttgtctatcttgttgatttttttttcaaagagccagctcttggttttgttgattcattatattgttctctttgtttctaattggttgcgtcagccttgggtttgactatttcctcctgtctactctccttgggtgtgtttgcttctttttgttctagagttttcaggtgtgctgttaaattgctagtatggcacctctccaattcctttctgaaggctgcaatcagcatagcacagccctagaagctcagttttccccttcagtactcgagtattctgtgttactctactaccattttaaaataatacaaattatctaaaccatattcaataaaccaaagtatactccctaaggcattcttggactttatttgagaattccattcgtgtgctcaaggaagggatagcttcttatattgggaaagattttgaccttgtcaaagaatcagaccaagaattcagtccatctactctttaatatgcacatgagacgcttgttctttacaggattagactgggtgatatgtcacaagccatgtccaggcttagttctctttaaggggcctgtctgcagagagacagagcagaatgactgtagctgaaatgcagtcacagccgtcaagggatactgctttcagaaagagcagctgaaggtggaacccgaaaatggtggagttttcatatggagtctgtttgaagtcatgaaccaggcaaggtatcccaccatgtatagggtttcttgaaactgatgctataaaatttgttgggctgacagtaagatctcttctcgagtacagccatccttcttttgtatctggggtttagctgctggctcaaagggctgtgtggtcattaagtggacaaggtaaagatcatttcctacacacaggccaagcagatccagtcttgctgcattaacttactgatgaatggaactgtcagtttcccaaggatggctgggcatccttgaccacttggaattgagatcagagaccccctcagtcaaggtcactcaagttatcattggaaacaactgcccttggttggatttgcacagctggttacaactccattctctgtcctttcattatatcctgagttggttcatagtttgagagtttaattagaaaccaatataaaacgttaaagagtgttcttaataaatatacttgggtagacacccaaaagcctgacgtaagggggattgctaaagtttgagcccagctggggccacaaagtaagttcaaggctagactgatacacatagcaatgctctgtctataaacaaactagcaaccacacacatccataatggccaaaacacaaaacaaaacgaaaacaccaactctagaagagctttcatatctaaaatggaagcctctccttgaggttcaaactaatgaacagactaaccatctgtgttaatagcttcttctttaaggttttagggtggagtttcttgacatcaccatggttaacattcagttctttgtatcgtgttagcctgaacttgaaggactgctatctccatacagctcaagaacgtagctattaagggatcatcagctagatgctttcttatcactgtgctagaaacagcagaagaaaggaatgatgtatattgctcatggtttcagagcatgaaatacctcattcagagctggtcttccaattgttggcatagaatattctcattgacacacaaagaaacacccaaacaaaaggaaagaaagtaaggctaaagtaaggctagacaatttatttttgtaaaaaatggattgctacaacccaaactaagctagcaagcagcacatatggccaaggtagcctctgtcatttatgcctaactcaaagtagatcttggctactcctcgctggccgaggttcaacctcacagtctagtcctgattggataatttggaaagcagcacaaaggagatgaagaaagaggagactgctctgagccatcaaatttggagaaggcagccaggcctttgcataaacaaaagttgggaaagatttaaagattacattgcataagagttttataaggcaggggagatttatggaatatttttccttgagctagccacttttgatacataaaaatgaacattcataattaatattccttagaaacctcttgacagacatacctagagatggatggaaaaaaaaaaactttcctgatctaaccagctgatattaactgttcacactcttcccccaaaagagaaaatatttatgtaaaacaaagttttgagagtttttttttttttttacttttacctttgaaacagattcttcttatataccccaagtttgcctcaaccatggaatttgtattccacctcagtcttggggtcacaggtgtgtgccttcatgctccatcagttatttgagggttttttgtttgttttgtatttaattttatgaaacagagtctcacactgtagctcacactgaccaagaacccactattgattttaggtagagattatactcacagaaatcctcctgtctccaccccttgagtgttaggattggttagcatgaaccaccaagcctgatgggtcattgtaattatcagttactttttaaaattattactgtgataagacaccatgactggggctggtgagatggctcagtgggtaagagcacccgactgctcttccgaaggtccagagttcaaaacccagcaaccacatggtggctcacaaccatccgtaacgagatctgactccctcttctggagtgtctgaagacagctataatgtacttccatataataaataaataaatctttaaaacaaaaaaagacaccatgaccaaggcaacttataaaagaaagcatttaatctggggttcatggttccagagggtggtaaagaccataagcatcgtggtgaggatcatggtagcagacaagtagacatggcctggagcattaggtgaaagcttacatctgacccataagcataagacagacagtcagactgacagacagacagaactaactgggaatctcataagcttttgaagtctcaaagtctacccccagtgatgcacctcctccaaaaaggctacacctcctaatctttcccaacttgggacttagcattcaaatacaagaacctatggagttgggtgggataagggattctcattcaaactacgacagtgttagaactctattggcttgctaggaagagcgaagtatggttactgatgggattctataacctgtgatagagatgttctccctcttccttcccaatctacccactggaacttgaaaacaccctaaattaaatgggcgctgactgctcctcacctataagtcaccacaactgagctgcacagggcacacaggatgtccctcatttcctttcctctctttgtttgtcttcttctttttattaaaggagggttattttttatgtaagctgttctggaactcactgtataggcaaggctggtcctagagttttggagatctgcctcctgagtgcaggcatgaaggatccagtggtgttgggtcctcttaaaaagagatgctgtttcctctggtgagactcacaagagaagacagaccatgcaaggaaaaaacttcaaagtcaagatttgacatatagttttctggtgaatgtgtatcaatttcacatgactgccaagcaaaccattcaagtcaaatcaccctggtttgggaactatctacctatatttacatgcgacccttgcacctgttttctttagctgcatttccccacagttgtttggtgtcaattccattttaagtgaatctatagtcctgaattctttattttaactctttttttctaacccacttcaatttgttttcatgacacagtattggcaaaaaaaaaaaaaaaaaaaaaaaaaaaaaaaacactgatactatttcatgagctgttgaattttaataatacctgcctatgcttttcttacaaactcagaaggaggtcacattcctagcagccgtctctgttttcaggctctcgtggaccctgttctaccacactgtagctgggtgtcactccagctgtgacctcagtctagagatgctcagagaatctcctgggcctggatttcaatttagactatactactcattaggtatatggttgtgggatttttttaaaaaaaaaactccaatgtgcctcagtgtccttaaaacaggcaaaagacagtaccatcttcatagggtcaaatcatgtggttgaacaaagtcatataaaactaatgcctttgacaggaacaatgtgatgggatcccattatattatctagcctagtgataccatagatgccgtagtttgtgtgtgtgctccctgcatggttccttggatggttaaatcacacaattatgtatttcttagaatgtgtccccgtgctgtaactcatgactgtgctaccaaagtttataccttcaccttacacttacttttagtatttttaatagattttcatcctgagacatgacatattaatagagttcctgatacatgctttatattaaaacattatataataccttcttgtatagaggattagtctaaggtgcaattttggcatagtctaaaaaaaaaaaaaaagccaaaaaatgttagctactaagcaatatggtccgttcatgcactgtgaatgcagtcagatttaggctgtcgagagtgcatgaggataaataggatggtgtttttgaagaccatggagacattcctgcctagaaggaagcggtcatggtcccagaagagtgtttgaggtaatcataagataataaactcctagttattttataagtgcatttttaggatggataagaatattaagaaccagtagccaacatcaaagcaaatagtgagaagctggaagcaatcccactaaaatcagggactagacaaggctgcccactttctccctacctagccaatatagtatttgaagtcctagccagagcaattcgacaacaaaaggagatcaaggggatacaaattcgaaaggaagaagtcaaaatatcaattttttcagatgatatgatagtacatataagtgaccctaaaaattccaccagagaactcctaaacctgattaacagcttcagtgaagtagctggatataaaattaactcaaacaagtcaatggcctttctgtacacaaaggataaacaggctgagaaagaaattagggaaacaacccccttcacaatagtctccacataaaaccagagacagtgaaacttatagaggagaaaatggggaaaagcctcgaagatatgggtacaggggaaaaattcctgaatagaacagcaatggcttgtactgtaagattgagaatcgacaaatgggatctcataaaattgcaaagcttctgtaaggcaaaagacaccgtcaataagacaaaaaggccaccaacagattgggaaaggatttttaacctatcctaaatcagataggggactaatccaatatatatatataaagaactccagaaggtggactccagaaaatcaaataaccccattaaaaaatggggctcagagctaaaaaaaaaaaaaaaaaaaaaaagaattctcaactgaggaatactgaatggctgagaagcacctgaaaaatgttcagcatccttagtcatcagagaaatgcaaatcaaagcaaccctgagattccacctcacaccagtcagaatggctaagatcaaaaactcaggtgacagcagatgctggggaggatgtggagaaagaggaacactcctccattgttggtgggattgcaagcttgtacaaccactctagaaatcagtctggcggttccttagaaaattagacatagtactaccggaggatccagcaatacctctcctgggcatatatccagaagatgttccaactggaagaaggacacatgctccactatgttcatatcagctttatttataataaccagaagctggaaagaacccagatgtccctcaacagagggatggatacagaaaatgtggtacatttacacaatggagtactacccagctattaaaaggaatgaatttatgaaattcctaggcaaatggatgaacctggaggacatcatcctgagtgaggtaacccaatcacaaaagaactcacatgatatgtactcactgataagtggatattagcccagaaacttagaataacccaagccacaagatacaatttgcaaaacacatgaaactcaagaagaacgaagaccaaaatgtggacactttgctccttcttagaattgggaataaaacacccatggaaggagttacagagacaaagtttggagctgagacgaaaggatggactatctagagacttccatacctggggatccatcccataatcagcctccaaacgctgacaccattacatacactagcaagattttgctgaaaggacccagataaggacccagaaaggagctagagaaagtacccaaggagctaaaggggtctgtaaccctataggtggaacaacaatataaactaaccggtacccccagagctcgtgtctctagctgcatatgtatcagaagatggtctagttggccatcagtggaaagagaggcccattggtcttgcaaactttatatgcctaagtagaggcgaatgccagggccaagaagtgggagtgggtgggtaggggagttggggagaaggacttttgggatagtattggaaatgtaaatgaagaaaatacctaatttaaaaaagaatattaagagcatgaagaaagcattctctagtatagattaggatcctcagggtcccccatgggtagagagaaactgtagtgcactaaggcagagtaaggatagaaatggagagaggtggctccccaggacaaaggcaggggttcagggtactttgtcttctccattgatgggaagaataggaaggatggagtggagggtaccagagtccctggggtgtgcaaggaagcaatctgctctgttactgttttgagagagagagagagagagagagagagagagagagagagagagaatgtgaactgtggcatgaccccatatctgggcaagaggtcctggcccagcctgtcatctcatctctagatacagactatataagatggactactttctgtcatgagtaagttttgaagggacacaaatttatagaaatacaagtttaactgtggtttaccaataagaattgaacttgcttgcttgcttgcttgcaaggcatttgtggggttctgtctatcaagagaggttacaagtttcctgggtcaatgtcccagacaaaaatggcacctattggaacagacttccaatctaaccaaactgtgatctcatgatgtcaaaggccaggaatgtgaattggggtggggggtgaaaaataacagcttgctttcactttccaagtgtaagccagccagtccaaggccagcactctgcagctcaaagggacatgcatgtgccagacggattaaacactaagggaatctgatatgcacactccggggagggatttttccactactctctaatccaatgaagcctggcctggcaaagacagttggattgaaagagtgactaaatatgcagagtccttggagggcagaatgcagacggtctacaaggcgaaggcattttgccttcagtctgtctggattcctaatatctcctgcagactattaatcatacaagccagactcttgaatctctttgaatcattttacattcaaaattcttcttaccaaaacaaagctacaaaacccagcctggttatctgagttaaatgactttcaaacgatggttgacagggaatatgtgacccatactgaatgtctattttaataactttcaaatggactttaaattaaaaaaaaaaaaacaacagtgctcaccatcatatcatgaaatcagaattaagaattagccaaggacgtattgttcatttcctttcaattacctattaaaacaccaggcaccccaagttttagccgtcagtaatactaatggaaacaaaagaattgtttttctataagacaatttctatcaaattttattgagtgagaatttggcccggagtttacatgtgagtgctaccattttgcattttaaatgtttggttttatgaagcagacactgatttatgaagccatgcctacctggaaccctagtggctttttgttcacccgtatgcccaggttttcccagctttctccggtttcattctcttaacaaaaccatgctgtgtgaaacccaagttttctcattttgttttcctgggatgtgtggatagaaatgttttcctctaagaactttatcctggagtgacaatcgaagccaaattgaagctgtggaacccggctggtagctagactccagagcagttctaaccacaccccacacacctccgacacacgcacacgcacacgcacagacacacacacacactccagccacatataaatgtctaggtttgcttccgacagaaaatttgagaagtgaacaacgtctgagttttccccagaaaggaaaagctgagtgtctacacctcagggcagggagggacttgagacccgtaaactctgcattgcacaagctcaaaggctgggctggtgtgagagatcagatatttagccaggtaggtagaatgggaccaccaatctgtcaccctggtaactgccaacatttccaggacgccaaaaagtcagcttttaaagcagaacctctctggtgctggttttgttttgctttgttttgctctgtttcaagatttcttaatttgcctctgagcctccaaggcaatttgagagctaagttcacatgccaagccaacagcatataaaccgtggaccaacagaccaaagggtttcactatcacagacctttctacatctgatctagacacacaatctagtacccctcactggagaatgttccataatgcttatagcttttatctcgactaattagttaaaaaaataataataaccacttggatgtcagataatgttaaggagtttgagagatgcttcaagtaaaaatttccagaaggaacaattctccaaaaatgagtaacaaatttgatgaccttgaggtgacacacaatgtacacacactgcaatgatgatggtgccgtcctctgtggattttggcactgggccagggtgggcttttccctgaatggatttgcaggtctgcagatactgcggatgttgaggtaaaagtgatgtgaatgccctaatgacaacctgagagcctgaactctctgtcacttgagctcttagcatctctgcctgttgtcatcaagaccgccatactgcccagggtatgtgtctcgagttttaattaggaaaattaaacttacaatttacctgctaaattaaacagtaaatttaagaaaattcaaaaataaaattaaatacctaccagtattactactataaaaaacatagtgacacctactaaaaggtaggtgtgcttttcaaaagtaaggttcacatttgttgttctttggatacaacgtttacctttgccttacatgatgcgtggcgaagaagggggcctcgacgagtatcaagggaataagctgaaaatgagtcagctcctgtgactggaaagacagatgggtagtgactattagtttatggaatgttatcaatttacttccattattggattttatcataaactaagactgcagaaacccaagttcaagccatgcatggcagcccacagtattcaatgccagcacttgggaggcagaggaaggtgggtctctgtgagttcgaggccaatctaggctagtgagactctgtctcaaaaactcgaaacaaaacaaaagccaaacaccagggtgcaaatcctggctatgtgggatcattgacaaagttattaaatctcccaaaggcttggtgtttgccatctgtaaaatggggataataactccctaacctttgctagtgctgtgagccttttacataaatcaaagacagtagtgaatctgaaggtagcaggtaaactaggaaacacacacaaatgtacatttatgtcataatcattagtactgctaatagcagtcttctgggactctgggacctcagccacccaaatcctgccaaaatgaaaactaccacaagccaccacaagtcacatgccacatctgcatttactcttccaaatagcttcgattttatagtaattataaaataattcatcacattttgtattttgtcaccacaatgagcaaacaaagacatgatcacaatttggaaattagagagtgctaatctcagaggaaatgcttttataacacacaaacacacacactcacatacatgtgtacacagatacacacactcatacatgcacacactcatgcattcacacacacagagacacatttgtttatacacacatacaagtgtacacagatacacactcaggtgtatacacacacccatgcacacatgtatatacagagacacactcgggaggcatacagatatatacacacatacacaccgaccaccaagtaccattttagcactgaaaatgattgtggtaggtgtgaaaacacacccttaaaaagcagaaatagttttttcttctttgactagcaaactttctgtgacttctcttctactttcttctcctcctccttctccttctcctcctcttcctcttccttctgcttcaatattgtcctcagtgagcttaccaagggggtcaaaaaagtcccattatgtaagacttgtcacttctgttcactaagtcagtcctggtcattaaatgcccaggtctgtgctggcaatcatggggcaaggaactctgattttagcatcactctcctcacccttgtccatcagtgtttatttaccaggtccttatgttcattgtctctttcagtcttgacaacaccctattaaagttcaacctcacctcacaaaggagcacaccgaggcttcaaacgacttatccattttcccaaaggcacacagtttcccacagcattgtctagatacaaaaccaaacccacctgaatctaaaaatctatgctttaagcacctctctgtactgcctgcccaggtggtttttttacaggaattttggatgtgttgggacagaaaccagccgggggatagggggtgcagagagacttgtggaaactcctcaacccaggtttggtaaattacagtgaatctactaacacataatttctaatccatttctatacatggccccattatgctaggcaggctggaatggtgtgtgtgtgtgtgtgtgtgtgtgtgtgtgtgtgtgtgtgtgtgtgatacactactggggatttagagtctttggcactgaattgtgagtatgccaacaaaattccattgcatgcatggtccactttgttaagtaattatttgtgtctggagatcttagactaaattattacacaacataccaataaaattgggctcagctcttttgtaagactgatgttaggggaaagaccaagctcaccttgaaactgccctctgtcacatcaagctctcaagccctatatgataccaaatacctcccaacatttgggaggttgaggcaggcacacacatgcacacacatgcacacacacaccaacaagacactgtaatatgtgtgtgtgtgtgtgtgtgtgtgtgttttatggtttccattgcttttgcagacaatatatatgattatgaaattgctttctttaaagactcttgggagcagccatttctgcccatcctccaggtggccactgagactgcagggtcttctagggacagtgacctgcagcaagtgtctgactaagccggcttcaggcatttgtccttccaggtgttttgctcttacaaaagagctcttccctcaaagctctgagataagatgacaccacacaagaagcccttgggctgcctgaggctcccattttgcaaggtttctcagtctgcctggggtgactggagttgggagaagaaacggaactttctccctcggtgaggactcaggctatacctgaattcaaggccaggttccgttttttttcaccctgaagtcagctcagctccttaacagccattattcaggtttgctcatgagtctttctagagccctttagttgacctcacagaaaaccacaagcagcaagcaccaagagcccacagagaggaatgagatgtacaggctatggcagctcctcctctgacataaacagcataggccatatctgagactgcagtgtaatagtgtgatgcccctccccactccggtttctgatgagctctgcctcactttgagacacagtcagctctgatgagtcctgtcaccccagggccttcaacctctggtggcatctactggccttgcttctctcccccaacctcctcccagacagaaatatccccacacagtcaccaactcattgtgacctttgtgacctgtggtccttcagaccctgcaatattcagtccagctaccgagagaacttgggtggcggaatgccctctgaaacaggtcacagaggaaaaagaaaataaaatcttcaagtgatgtgaaaattcgatgaaaaggaaaaaaaaaaaaaaaaaggaaggaaggacaaaagaagccacaaaaccacttcccttccaattcttgatacaggacaagagagcgtcagactgactaagggaagttcagagaagaactttcacaccttctccagaagaaccagctgaggcaccagggcccaaatgctctcaagaaagaaaaaaaaatgctgatgttgaagacatgtggcttgagcagtacttaacctccccttcctggcaggtgctacctcagagcatcctatagcctgatgctctgaagtctgtgagagggtatgaacattaagaaattggctgtgcatgtgcaaaaatgttggtgtgatgtcggagtctgtcttcatggtggactttgggtttccgtggtttacttagaacagggtcttagtggcttgcactcacatagccttcatagggcctctgccttctgagctctgtctcttacccaatagcctagctccatagagggttgctgtatggaactgtgagctggctgtcacagcttgctgtgagtgaggctctgtacctcaccacatgctgatatgagatgggctcaaggacacgagtctatggggctgggaacaaataacagagacagagatacaaagacagagaaagggtatcagtatggtgcctcgccatagatttatgctgtccaccaggggtgggaggctcctgtaagtttgcaccaaagatgcaatgccacctaaatagattccagtctcttgatatcagaaatctgtggtgaagcctctgttatatccaaagttgtagttaatgcctgatctaagactcactcaaccaaaatgctctggaagatgggctgagagatagttcacttggtaaagtgtttgctgagcaagcatgacaacctgaattcaataacccaaatccacacaaaaataccgggtacagcatgcacatgtaatcccaatactggatatgtatatatatattgtgtatccacatatacacccatatatatatgtatatatatatatacacacacacacatacatacatatatacacataggtatattccctggggcttactaaccagccagcccagcctaaatggcaagttctagaccaataatagaccctgatttcaaaaatacagttgaccttctgacccctataacccataagcatacagatatatgggcatcccctcatgaacacccaccccggacaaacaccagaacctgaacttcttagcaatcctttcgtgaatgtagccagcaagggcagaggagcctctgtggagttaagtgtgggcaggagaattgccacaagtaggtcaagagttgcagaacgatgctacccactactgcaagcacacttggcagaaagggggccggtggagaagatctcaacaggaacagtctagatccagaagctgatcttctccctctggctctatctccagggcttggcctgttaggaagaacacagagtagctggcttgtgagccagtctgccttctttcccctggcctgctgaggttgacatagccctgtgggggccgctgagttcaggctgttacatgttccatgccttaccaccctccagctaaacccaaaaactgtagcttgtgaaatcctgcttgttctgctgagccaagattcagggttcatgtacttactgatcagtggcccatggagctacttccattgtatgaggaggtgaaatcagcttttgcttgaccaggtaaccattgttactgttgctccccacttacttgtctctcagatatttggctcctttactataatggggatactggtggtcagtgtcagatcagcaagtgcataccttgacaggaacaaagaattgaacatccaggaaagacaaaagaattgaaagtctgggaaagataaaagaacaagctacagaaaaggggaaagtcacaggtttgtccttctgtatgagaggagccccaaggcttgaagctggattgtatgttttatgggatcctgggtcttcccatctcccttgtgtgtaaccaactctcccacagtatttgctcatttgactgtatggtcctcctatcagtgccagagtcatcaatattgtcttagagggtggggctgaatctattttagtctttttctagaatccatggaaggctgtgtgtcgctgcatgtgctctccaggaaggaggaatggactttggtggaggctgttagcacgctcccacagagaaatggcatgtcaaaaacattccctggttttccacacttaaaattttgtctttgagctatagcaaaaatattaaaatagaaagtgtttttgagcctctaacattcaggcttgagttaggcttgagttcagatctaaaagaaagccattacccctacaaacacacacacacacacacacacacagagagagagagagacagacagacagacagacagacagacagacagagatagagacagagacagagacagagacagagacagagacagagagacagagaatgtgtgagagagaagttttcttggaggtgcaggatgtttcaagcagaagaaaataaacggaaaggcatgtaccctggtgtggtttggctttcagaaaaagcagccactacaagacatcctccatccacctcctggaagaggctggcatcttgcaagcgagatgtcttgttggacatcatttaacatctcctctctcactgtcctgcaaggggacatcccagaccccctaccccttttttttagttaagaagcatgaaggtttggcctgatcagatagatttgtgtaagctcaggggttactcccttctgtgaatgagcaaatgagttgagaaaccatcccattgaaatctttcatttttactataacgtggcatggtctggaggctctagaaagaacacaccctgcttcctcacaatggagaagcttataagactcagatcattaagatgagctcaaacattctcttgtccctgcggcttccctagaagataatgtttggttcctaggcgaccgtcaggagagcgcagagaacacctggcacagcaggcttgttttattttcccaaagggaggctttcttggtgaagacataagagaaaagcaagggggggagaggggagaggagggaaggggaggggaggggaggagttgtgttcctgtcagtttgtgtctgtgtctacattttgattgaaatattaacaccttgtgcatatggttgacagtaattggtctaggggttattattaatgataataacaaaataagacatgaagtcagacaagttcggaggctccagggaagttggacagttgtttcttatatggtttgacccctagaaccaagttactcataacataaactttatcttttaaagaggtgctttcttcattcttactttctgagacattggtttcttccattcatcattttcaaaactcacatgatggtgacggttcttgcctcaagccagccctgttgggaacaggcatggctgtgccctcgcagcttctttctgatctccacagtgcttctttgaccatggaatggggtaaatcaagaaggcatgggaaaaggtcaactctgatgaccagggtctttaacgcccatttgcagtgattcatgttttagtgcctatctgtgaagaggggggtgtgctgtgcgcgctggcaatttatattcctctttaatggcacagaagagaccacccagacccgatgagagctgcggatgcagactgtggaaaggctctcggtataagcagaaatcagaaatgagttggtgtgaaatggggacacaaaccctggctccggtagtcccatgggtacatgctatccttcatttgactggcatcccctttagagctgccaaagcccctttggatttttgtgtttgtctgtattctcagctgccaatgaactggaaagttcctgacatgctcaggctagagaaagtgagaatatccatcaatagccatcatctctggcctagcttcccagacactggactgagttcctgggacaagatgactaagagagctcagtgggtacaacgggcttgccaccacctaaggacctaagtttgatacccaggccccacatggaggaaagagagaactgccagctgcaagttggtccctgtcctctacacataaacagcaggaaagatccaaactggagagacagacaggactgcaatgttcgggctaggtgatgccagctccaaacagcacgggaagaacaaaatagaatgtgggtctcacaggagtcaaataacacacaggctgagaccctggggcagacacagaagcagacagccatacttctgcatttaatgtcaaaagcaagcaggaccagagggaagcacacactcaggccaagacataaatcagtacaaagtcctcagtgtcaagccatcaagggcaattagagttcacagggtcttctccttctagacagcaaggggaaaggtcagcaaccatcagctcagcttggcctgtgctccagtttacctcatcagactgttgcccccagagtaactgagcatcagagctccgagtcagcagacgggagcccagtgagtgggagggactggagtttgattggggaatactgcaatccaatctgaactgactcctctgccattcactgcccaaatagaattatctcatgggccttattctccttctagggacaaaggggaaaaatgaaataaacatgcaaaccatataaaataggtgctgcgggatagagtagttgcataggaagattgtgattttcttctgcaatgtgattggctacgttggcactacttactcaactccccctggactccaaaggcccctgtttcttaaagctcagtgcttggacctcaacatagatatcccattaactaaagccaagggacaagagaaaggtgagtttaataaatgattttaggaccaccacaacaaactcatatttatggtctcccaaactactgtttttttcctgaaatgtcagcatgggactgactattacacagatttagatcagtctgtgttgttgaagagaatcaagatcaagataatacaatgaaatacaatatttactttttatgtgactttgcttttattggattggacttgctctgtccactgtagcttatctattaaaacaaacaaacaaacaaacccaagtgaaacagctgtttacctcagaccccattgtttccttccaacagcaaacttcaggagatgttttcacatatggaaagtccagcctccgtgcccagagaaatcaaattgtcacccgtgatttgcagttcagaattagaggtgaaagcatgaaggagttggcaggtgcatggtttcatttgcaactctaataaggaggttcattttagggccttgttaaatggacaaagaagaactgaaaccattctgggatagtgagtgtaagaaaatcgttaggccccattctagaatctcaggacagaagtcacagtccatcccctgtgtgtttatcctgtcatgatacagctgaaaatggtggcttgatgtagcgtgcagatctgggatctatggagaaaccatctcattgagtgaatggcttgtgagggaggggaaccagaaacctccctggtggtggcagctctgcccttcctgctacactgcacagacctggaacttttccctttaatgtttatgacactgatgagaagaagagatgttggaagccatcctgatgggtgggtaacacgtggtgaccccggcaaagccagcatcatagcgtgtcaaattagattaggcgttggctactgtgcttgtcacatggtcctaaggctcctctgagccagcaaatcacaacatttacttcgcagacaccatgacctacagggatgacaagcaggcaggcaggcagaccatgcacaaccagagttctttttttcttcaagtgtcaactgtttccttttcgccttcttatgtaacttctactcctagatgcctgtttgactctgtcttcaggcacacccttccaaatggacatctattcatattttaattagtgtagactgttaaaatatgagaccattgcaatataaaacaaaagtttacttgagcaggggaaaacatcatcctaggacctggcagtacttcagaccaaagaaagttgagaatatccccctcgaccaaggtggatgagtcctttcacaacctgttcatgcagactgctgccttgtctgactttcatgaacaccttggcatctcagactcctacaacacaagaagagaatcattcacagtcaaatctaaatctataagactcggtaagtgttttttttttagagatgccatccagggtttagaaaagacccatggtggagaataatgtgtgtgtctaaagtccgcagacctgtctatatttcatccaaaagcatttcagacagacatccagagtaacacttaaccaaatgtctggggcccagccacactgacatatcgattaactcaagagtatagtcactgctctgtggacagtggactgtggaaggatcctggattggaagaaatccttttgcttaaaggggagggctgaggccagtggaactcaggagagcatcacagcttaaagaccaatcagaagagagacagggatctggcacaagagactggcccaatcctcagaatgtcagggagatccaggtacaagaagttgggcctcccaggacaacaatgaggcctcagcatcccatcaaggaagttaccagaacagaggaggtagatcaaaggagttctggcaccaggaaagttcagggtcctctgtagcctggccatcagcttcaggataaacctggactgagggctgtggtgaaccaagggctcctgtagcttctgcagtgcagaacagaaagctgcagtggtcataaataggctaacagaagagaactcctgtgttgtcctgcctgttgtgccagagaaggaagcgcaatgcctgttgctattttcctagtggctgtcggtagaacaacaatttccttattagactatttttctcaaccagtttaaagatgtatgggcaagctggaaatgtagctaatggaacatcatgccaggctagcttcagtggagtccttgccgtgtgggcttgatctgggccatcaccaccttcagcatttgtgatgtagagtaattaacttctatctgatgagtcttagtggaagttgggtaaccacttagctacatctggctcaggggcatctccttggtgcgtacaaaggagtcatgctcttgtctcggctgaacctcattcctcttttctttctgaaagccctctaaagcattgctcacactggccgcaaagtctgctttccttctccgtattttattggtatggttgagctgtttcacttcattttctttgtcaagtgttagctagatacatgtgttcatgcatctgacgtatatttttaagtatacagaaagaaaaacacacacacagccagtcttacgtttgtgtttggctttgaaactgagttgaatgcaaaattgcagctgtctctaaatagaaatgagatgagttgccaagggcttggggtacagatggggagtggcccagaccagtaagcagtctcattccaaagaaaagaaagtgtcctgaaattctttgatccacctttgcagaccctgcaagaataactgaatcatatactatataaaggtggattttatgcatgtggatcatatctcaataaaatataatttactattgcctgcatcaaacagagaattgactacctttttgatcatctattgtacaaagaacttgctggccacaaggcacagatggggttaatggtggaacatagtaggtgggttggggctgatcatagcattcatcggcaaaggccgcatgaaatttcaaggggctggaactggagctgaggagtcacagagggcagatggacctgatatgaaagacaagcattccaaagaacaatccaggaggaaaaatgaggtcttggtgctctcttttgattactgttttaaattttcatgtctttttacgttgtttccagggacagatggaaagaatgctgtctttaatctgttctatattgttgtcgctgaatatctgaaacccaatggtgtgtgtgtgtgtgtgtgtgtgtgtgtgtgtgtgtgtgtgtgtgttaggttcagttcggttctgaaagtacaggtgtctattcctgctcagctgaggggaggcaggtgtgagcagggagaaaagggggcagaagttctgcaaaggctagcctagccccctttctcactccagtgagagaaaatgagtgcagaccctggtggtgccccttactagccctgtcacctttgtcactgtcactctggggacagagcctcaacacgtgctttgatgggactaggcccattccagctgccttgtttccaagtcacaaagtctccctgcagacgatgtgtaagcacacacagcctgagccccagcactgaggcaaacagagagattgttgggaaggcagcatctttttatccgccatgcctttggaggtcatcactgcaaagagctgcctgaactccgcttgaggaaaatgaaaccactttgttttaaagaactagactgagccaggctgagggggagtgtttcctgggcagccatcttggtttctgtgggtgtgaagtgaaaacccttacttcctgcagaaaacagaaaccgaaggagcacactgagcccagtgacctttaagaatggcttcttcagctggacccttgcaggtcagaaaggctttggccaaactgtgcttcagaggccttgactgttcagtgcagtgtcttgaggtggttaacaaacagccgtgctgagtgatgtggctaaacttaacgctagaagaactaaaaagaagctcagtcctgctggggaacagagctcaggggtagagcactgctcagcttctgcaaagcccaaagttcaaagtacctgaaaatgaatatgtgttacgacatgtgtgagtttgtgtgtgtgtatgtgtatatataatatacttgtatgtatattataaatgcaagtgaatatatgtgtctatattatatatgtgtatgtgttatatgtgcatatacaatatatgtatatattataaatgcaagtgaatatatattatgtgtctatattatatgtttgtgtgtgtatatatatgtaggtctgtgtgtgtgtgtgtgtgtgtgtgtgtgtgtgtgtgtataaaatttctttattgaaaggctaaggttgtggctcagtggttgagttgtctagcatacagaaaggccagaattcagtccctagcatcacaaaatagataaatacatttcattcctggagcctgagtggagtctgcctttgcctctctctctggaactgtaggtccctgtggaacaagtcttggagcatggacatgcaaatagccttgaggtcccatcaacctgagccatgctctgcgctgacttcctgagccacagatgccaacagtacctgtaagatcttctgacggtcattccatttacctcaatgctctgagtgtataggaaggaagtctgggctggtgtatgcctttatcctttggtgttgatgttattatttggtccacagtgtagctttgtgtaacacgtatctaaatatccacccctgccccacccaaagagaggaaaaaaatatattatcttccctgaaaagaagtgatttctcatagtgaaagtttttaaacatccactttccagatggatcactttgttaaatgtgaaaaaaaaaaggaaaataaagttgaaccatgtgaaatggtctctgaattctgctgcttactagactatttcattccatcttacggaattttatgataaaatatcagcaagctcataaagaaggctgttttaaggtccgtaatctttctaaccataacaaaaggggtggtaactatattgtacaaggctgcgatggaaaaatgtgctaaagtatttccataaatcaaatgtagcactttggcattagctagaaagcattaaactttagcagattagaaccagatgattttaaaatagaaacttacataacttgatggtgtgatttttttttccctctccccagcacaaagtttatcttcatgaagttaccttggctgctctgtaataggtatttaagaagtaagggcagtgtctgggtattattcatctttgtggctcccacggtgcctactgttatgtcgagcagttgggattggtggaggggagaaatatgaaatctcagaggctattaacaaggacaaaataatcggcaaggaaatgtgatactgatggctaaatggctttgcaggtgcacaagccgctgccccccagaacccagctgacacagtgtcttgctttccctttcattgttaaaagtttcctctccataaaccaacaaatctctgtcaccatgttctaacgtgctgtcaccctgcaatttcctaatgcctgactctcctttctgtttcagccacctcagtggtcacttctccctctccttattacacagtgttaggatcctatacctccaggccaggcccaggagtctagcacaacacactgactgggtgtctttgattgtaagacttctgtggaaaggacgcacaaagtgcacatgagtggggagaggcccttgctctctggtagagggtgagtgcaatgaaaagaagccaggtaaagattgggttaagggagaatactttctttgtctgtcttagttagggctctgtgataaaacaccatgaaccaaagcaacttagggaagaaagtgtttatttcagcttaaagtttcccatcaaagtccatcactgagggaagtcaaagcaagaactcaaggcaggaacctggaggcagcaattgatgcagaagtcatggaagagtgttgctaactggcttgctccttctaccttgctcagccgggtttcttatacaaatcaggacatcctaagcaggggtgggccctcccatatcaatcattaatgaagaaaatgccccacagctgtgcccacaggtaaatcttatggatgaattttctcaaaatccctcttcccagacatgtctaggtctgtagcatgttgacagaacccaaccagcatgttgctgtatgagttagatgatcttggagcagacttcaggcatggctgattcaggagacgcagacaaggtcaggactttccattcatttgttcttagtctctgcttcgttttgcttggagtatgatcctctctccctataaacatgttacgaagagaaaagggtatttactgttaagcatagtatatgatccaaagatggagaagccttcttttcatggtacatatacaaaatctcgaagacgacctcagattgattttctgactcatgtgcttagttctcagataaatcactgtggacgagggggtcaagcctctgcttggccagacctgtgtggtgattagattaagtggatggatgagaactggacactaattgcatatgggaagttcaatccgagtgagggtttggctctaggtgcctaagacaatggtcatgtcaaaagaagagtagctttaggtgaactacatccattcaagggggttttagatttgtgttattgtgaggagcaaaacagctgctggtgatggtggtggtgatgttgcctgtgttggtcagcttccactgtaacaacacctgaggtgattaagttgaaaacaaatgtttgctggggctcagcgttttgaagttttccatctatagtcagttagcctcattgctttagagcctgtgacaaggtagcacattatggtgggagtattcggtccaggcaattattcaccactggactgagtaccaaacttagaaggaagagattggtacaccataatctctttccagtgatccaactcctatctgctatggtccacttcctatagattcctctacctcgcaataggcaaatggttctcaacctccctaatgctgtgaccctttaataccgttcctcatgtgatggtgaccctcaacagtaaaattaattcactgatacttcataactataatattgctactattatggattataatgcaaatatcttatatgcagggtatctcatatgtgtccaacccacaggttgagatcctctggtctaaagcataattgtttggaagaggagatggatagagacagagacaggcaaacagacagaaagacagagacagatgggggattctaactgtgttttaaggaatggcacacagaacaaaatatgcagcataaactggcacactaaagactcaagaaagagctgccacactgacgaagcagctgaacctgaggtcaatggaggtagaatttatcttccttggaaggcctcaacctgttttctgttgaccttcaaatgcttagatgaggtccactcgtgtgatgaagggtcatattctttatttattgtctactgatgttaatgttaacctaatctataaaattatccttatattagcatctagtatgcaaatttgttttttaaaaaaaatatctggagacacggcctagccaggttgacatatagagctaatcacaacgtttgaacacgtagtgcttaaaagatgtcgctgggatatctgggcatggtaggaaatgagtttgtgactcagaacctatgttgtgaagtgtggttgttattggaacagaagcaagaggataaattgcaggagaggatgccctagagaagagggggcagaaggcaaacacgctgaggaaatgcctgcctgaagagaaagcaggtgggaggggataaagggatctgctgtccatctggaaaccggaaggtgcatctagctcaagccagaggaagtgagaaggcaccaggtgcagagagaggtaaagcaaacggagaagaccctccagccttagcatcagagacgttggtggctctcagtggaacatggcccttccagtgggccatgcaggactcacattgggccacgtgctagacagagccactgtgatccaagggcagaaattaagaatgtcctcattctgaattctctgaaactctgagagccatcctacaggagccattttatacgggctgaaatgattcttccctactgtcctggttataagcttgtgtttcgcaaacctttctcatcttcttgttctagtaacataaacattctcactgccctaaatgttgctgcttagaaagactgcaaatggtagggacagaagcagaggtgctgggctagagttaggagctagcatgtgagaccattcactctggctacagagactggtgggcactaaggaaaggttggatgccatagggagactctggagactagaggatgtattcagactgccacaaatagaatatacaaaattctagaactttgacttggctcacttggccacaaacccccattggattggcacaaggttgtgtctccttcatttcctctacaaatcctctgaaagacgaataaatctactcatgagattggcctctgaccccatgggagcaattgcaatctgggataataaggagcttctctcaggggtggggatacctgaattgatctggggcatgaatgactcgggaacttgaaaggaaagaattcaagagctgtctggaagaaggactcttattctgacaacaggagatatataggtgatggcttttgagtcattccttcatatggcaggttccacgttcgttctccattcaatcagctgtggaactgaaaattgtgtgtgtgtaaggggggaaaggatgcatgtctgttaaacatataccgatgtttttacttgtgattatcccctatataatgtatttacatagcatttacattgcattgggtataacgtatgagctatctagagaggatttagagcatacaggaagatctgcatggactctctgctaatgctagtgcattctcatacaagatatttgagcatccgcataatctgttaaccatatgaggtcttataaccaataccccccacctccagatactgaaggaaggacaactatataaggtgatttggggctggcaatttgggagttgtggcttttgccaccaaaggtcagcagaggcctaggacttgcttctagtcactcccttctgcccttcctaagaccagaagctcaagtttagaacatgagtcacaggaaccgcaaggcctcaaagttcaaggaagcccctgtacctcctacttgtctgcatcttcagtgatgaaaccacagagcaccaagacttcagcaaattaaaggatcccatactctgtaaacctcagtggtgcacaggagtaagtccgagcagctggtgcctggtcattagcacagcctcccttcagttttgcatataaagaagggagctgccccttattactcagcttctgtgggcagaaaggaatgtgtcacccatactccactgggcaagtagcaggtggaggctgttgcccctgccatcgcctatgccctgggccgacacctgaccagcatctttccatcagatgaaataacacatggcctcttcaagtgaatcaaactcttcagaagctaggctgaaactgggctgtgctgtgctgtgctgtgctgtgctgtgctgtgctgtgctgtgctgtgctgtgctgtgctgtgctgtgctgtgctgtgttgggctgggctgggctgggctgggctgggctgggctgtgctgtgctgtgctgtgctgtgctgtgctgtgctgtgtgtgctgtgtgtgctgtgctgtgctgtgctgtgctgtgctgtgctgtgctgtgctgtgctgtgctgtgcttccatcccacattcttcccctcctgccccctccactgggccctgcgtggctgggattcctttttctggctcagcagcagctgctgacagtgaattaagctaggcaaacaggcctgaggcctttggatctgtggatgtttgatgctcatgtggggatataaggagggccttctctgaggattagagcaggtcagtttttttggtttctttgggactgctggggagagagatatgcctcaaacccataaagaaatagctaagtccagcaaagtggtcatttgggagttcagctccccgcgcccccattcacacatacccttcccagtattgtcccaacaccacccatgcctggagttgctctggatgttagatgctgaaagtgactggcaacagcctctgagctctggaaatggcaaaactcttgagtacattggaaacagacagtcccaccctggagccagggccctgagtccatagtttgttcacagacattgggcagatgaaacaggagaatctctggggctcgctggccaggcagcctagtccaaaacagtaagactcatgtcctattaagagaatctgtcaggctgggcagtggtagtgcatgccttcaatctcagcagttggaaggcagaggcaggtggatttctgagttcgaggccagcctggtctacagagtgagttccaggacaggacaggacagccaaggctacccagagaaaccctgtctcgaagagagagagaaagagaggggggggagagggagagggagagggaaagggagagagagagagagaatgaatctgtctcaaataataagatagggactagagagctagcatagcagttaagactgcatgttgctctttaaaagagtatagttcccagtaccattttgggtgactcacaactacctgtaactctagcttccagctgtggggcatgggaaggatccagtgccctcttcggtcctctgtgagcatccacacatgtagcatatatatatacacataaattaaaattttttaaaaaattgaaaaactaaggtagatgacccctggagatgacacacaggatcgccctctgacctctgaacatacactaaatgaggcacataaacccacacacatagacagataagtcaattcaattaaaaataggagaaagtgggaacaaaacacccatagaaggagttacagagacaaaatttggagctgtgacgaaaggatggaccatctagtgactgccatatgcagggatccatcccataatcagcttccaaatgctgacaccattgcatacactagcaagatttcgctgaaaggacccagttatagctctctcttgtgagactatgccggggcctagcaaacacagaagtggatgctcacagtcagctattggatggatcacagggaccctaatggaggagctagagaaattacccaaggagctatagggaactgcaaccctataggtggaacaacattatgaactaaccagtacccaggagctcttgtctctagctgcatatgtatcaaaagatggcctagtcggccatcactgcaaagagaggcccattggacttgcacactttatatgccccagtacaggggaccgccagggccaaaaagggggagtgggtgggtaggggattcagggggtgggtatgggggacctttgggatagcattgaaaatgtaaatgaggaaaatacctaataaaaaaaattactgtcatgtaaaaataaaaaaaaaatttttttaaaggagaaagagtgtttaaaggaattgccttgcaagtgtaaccctctatgaagggttagcaagcggtagaaacacatggattgcctttatcgtttaaaaggtgtcctgtaacattgttgttatgtgggggccttcagagaaaacagctcagtcctgtcatgggcttcccatttatttggtactggaagatcaccttgacctttgtaaaagtccacaatctaaagtttccacctaccctcgggagggattgccacagcagtttcatataacaagctggacaaagtaaaactcgcaagagcagaacacctcaaagctagagaaaacaggcgtgcacctttgcctggcagcctgcacatttttgcttttaagccccttggtccatataaactatagtaatgtgaacctttgcatattttttggaagacaataaatgtaaatctttattgcatgcttctatatttttcttacgacttcacccctcagttaattccctcaccgtttcaaagaagggaaacactaagatcagagtggaaccctgcaattgcttgtcatattccaccagagttgagtgacttcacttagtgtgtaatttaagctgtcagccgtccttagttcttagggtagagaaagggtgtaattaagtattcccaggttaacagcgttgaacatcagaacttcacagttgtggggctttacaccgtaagtctagatgtcgcccatgagtcactccacttaccacggcgtgcccatgtttacggaaaattggctggaactaaagtattcaactctaccactgcattctggggacagaagttagaagtgagggaggtggtgggttttttagaatactctgcagtgtcatgtggtgaaaggttggctgaacgtaagacctcataaagtcatcccagtgggcagctcatttctaccatagcacgcacactgtaagaggacgcatttccaattcagagccccatctggtctcaggtggcttagcattgagttaggaagaaacgaagtctaaagtaacccagggatcatgacccaacaagtctttttaatatataccaccctcatctgcagagacaaattttcaagaaatatctccttaccaacctcttcaggaaatgtaatttattcctagttctctgttgttaatagagtgtgctggtggggtgggttgagtaacctatgacccacaacgaatattttaagtacattgaattggttggcactggtgacagtggcctgttgggtccaacctatagagaaaagaaggtcaaatggtcatgattgcttcttaaaagaagtagaatttggtaactcatgaccttagccatagctaaggaggagacacagagaaagatgggagcctggaattggagagtataggcagcaatggattttctagaaaatgtttcctgaagagatggactgcaagctggggcaagatgagatgcaggtaaacaggatgaaaagaatgaggaataatgaaaggagctgtgtgtgtgtgtgtgtgtgtgtgcacatgtgtgtgcatgtgtgtatgtgtgtatgtgtatatgtacatgtgtgtgcatgtgtgtatgtgtgtgtgtttgtatgtgtgtgtgtatgtatatgcatgtatgtgtgtggtatatgcatgtgcatctttgtatgtgtgtgtaggtatgtttgtgtatgtgtatttgtatgtgtgtatgatgtgtgcatgcgtttgtgtgcatgcatgtgtgtgtgtttgtatgtgtgtgtgtttgtgtatgtgtgtgtgtgtttgtatgtgtgtgcatgtgtgtatgtttacactatttgacagcatcaccatatgcctagtcctccactgagctgtagacttacccttaaagaaacaatcagcagggctcagataattgtgctgagaagaagcctgatgggcactgtcgctcttttgtgagggctacaccaacccaggaaggagcccgcctgggtttctattgtaaacctgtcactcatctgtcctgtaacttcgtgtgaactgcaaacctttccggaagtttccatgctgtaatacataagctaagaacaatccacctcctggattcggcccacaagacaaatgctaagggagacaatgtctgtaaacaactactgtaaaaagctctggggaaagtcattgtactgaaagagaagtctcagtggcttgtctttggggggttttatagacgtgacatagaatggaaaagcatcatgggcattatttttttgagatgatttcgtatgtacagatttttaaataagtgacatcaaactagaagtagtattgcatagtcctagcatgcctctttgttcagcctgctttctctggtctggtcttcagccagcttctgggttgtttcagctgtagaaggatctgaactcaaaaccagaaaagtcttgtagcattttagaacataagcggcacattttctgtggagaggcagatgatagtattttatttgtcatacctgtttgatttttgtgagatttgttgttttgggagggaagagagggtggtctcagctcacccattctgatcttgaagttaccaagtgcttctgggtgagctggtattatagacatgtgctaccatgcgtggctatagtattatcttataataaatacgttctttagctttgcgctgtttaccaactcagggtcaaccactcagccccagctttgcaactcaacagattgtacataaatatgccaacacaactttctcgtatagacaacacagaaatttgaattacgcctaatttttacatctctcaagatgttattcttttgcctcctcccaagccacttagcaatgtgaatgctgttcctggctcacagagacaggactgacagcagcctggcattggctctgaaaaggcgcatcctgtgtctatgctaacaaatgagacctggagggtgttctcagacataaggattttcttctatttctttcctgggcactaggccgaacttggaggtaaacatgtgttctctgaattacttcctgatccacagggcaatgacttaagtacatacagggtataaagagacagagagatcaactagccatcaccttgttcttccagaacccacccaaagctgtagaaacagacgtcaacgcaccatcagcatccaaacacggaaaaggcacttttaagagatctgtgttccaagtacaatgggagcacagtcaggggaaggagagatttgttctgaaagggcgaggtgggcagggcgggggctgtggaccagcacacacaaaggcattagtgtgttgagctaggcctgatagcggacaagcagccagagcattctctgtagaaagacccatctgtgcaatgccagtaaggtataaataagcctggggtgtggaggaaaaaaactgaaacgaggattggcgaagttctcattatagtccacaccaaggtgtctgcttcctaagatgttagcatatcgataagagactgttcaattccatctaaacgccatcccctctgtcctctgggaagggaactggtagtaacgctgaagatagagagatttcgaggaaggaaactaaagagaaatctctaaatagagtggagagtcgggagagtggcttaccatacatatgactagtaggatcacacccagagggctcaaggtctctgcgtgtcagctttgagttctctttgctgattccccagggggctctcctccttgctcatgggctctagttccttcacccagacaaaatagccactgggttctgcctgagccacaagcagttccagtatttgcttgatttccatgtgtgctctgaccaacgtccaatggctactaataaaatccctcagaaagcaccgggtgccatttccctgactcctggatgcagtagggtctaactgggcatggctttctccaaagaggcacctactcgtaggatgctggtgagcgtgggttgggactgagcccagggtccttggcggttctggaaaggtaccaaccaacccactggtttcctgaataatttaattatataatcagtttttcatatttttcacattcagcgtctcaggcaatcaatacagaaagggctattcctttatttactgaatttgtgtttctccaaaaggtttagagggagcataaccaataaaaacaaaatgacttgtgttacttaggctgcactgagatcacagcatgataataagggcaaaaacagggaaattgtttttttctcaaaattcttagatggcttcctatcacactcaaggaaaaccctagctctcttccctagcaggtacacattattatgtcctcattttataaggctagcattgcaaagttaaggaatgtgtatcgatttgcctgataggaatcaagccatctaccctgagaagacaatttcacaaacgcctagcacaggctttggcaatgttgaggttgaatgggttagccttgctttaatccactcatctaagcatgattcagcctggctgctgaagaagtcaaaggaatgctatctctgtctcctggggaaccaggacaaatctagagagaaagatttgacttgtcctacaaacataggtccctagtgtgaatcttcagggctgccaggatgatcctgctaccgcaatctgcttcgtgcctaatctgtgtacaaaagaccttgcgaatcacacaggttcaattcggctttgagatcaggaagtaaaagccatgacctggaaggggcctgaaccgggatgtcaacttcacgaaggtggccagggacatcttgtagagcaaactccaagctgcagccaaatgtggattcaattgtcaatgtaaaccctaccccacccccacccccacccccacccccagaaaccacttttatgcggcatctgctctcctatgcttttggcttaaatcatttattttcaaaagttttaatccattggaaatttagaaggggattggggaggcaaaactgattctggactaccttagtcaggaaagaagtaagagctgattttttttttccacccgagtcgtgcagtctggctggaatgcatcccaactgggggatagtcctgaatactccaagtcctgaggcccgaggaaaagaaaagcctgtcttctcctgagtgattctctttctctatagaaatctcagaatggaaccgctctacaaatcatgtcccgcgctctgcctgaaagaggctgttcttttttttttttttttttttttttttaaaccaggcttatcaaacagaagcgttctccctgaataataagtgtgagtgggctaatgggtcatttgggggagagaggtcaaaaggaaaaggcctcggtgttcaaaagcggaatctggcaatgccagcggtcaaagaggagagtgctggctggacaggcgtgatgtatcgggtgtgttctatagaacctgcatgggttcccacctatcctttatcctcggaggtcctagtgagaagaaccgggaaggcctggtgcttatgagtgagttccttttcattgagaaagaaatgttttccagctcctagcagactgacttagcaaagtactttgaacacttgggggtgaggggagcagccacagaaaagggaaggggaagagaaaagacagggaaagagagctatcagcaggggtggttagtaaaaaaaaaaggggggggtactggagacagaaaaccctttgttcctccagctcgtttcatgtagagattgtaaggtgaatggctttgaaatgaaatgggtttatgaactagttgctaggtcacaggaagcgcgatcgtcagactgctttgtgaattcggattctttaaaacttaggttactctcaaaaggaacgtacctcctttgtctggttcctatgtctttcctctttatatttttatttctccgggtggctggggccgcctccccactttctgttttctcctccgcccttttgataacgtgaaaagaaatgatcgtattacacgctctttgtcggagggtttcagaagttagaggtgggcggggtggaggcgttaccttcaccgccaccagcagccaatggcggcgcggtatgcaaacgaggcccgcgccgtgctggtctggatctgggctgtgagctcagagactccgcagtgcgcgggaggcgaaggcttctcatttccatccagcccagcgctcaatggaggggcggactctgcagtgcctcactcactgtgtgattcgataggaccagggctcatcagatcaccgccgagatgaagtacaaggtaagagtgccttgtacgccgtctcctgagaagctagaggcagctgtgccggccggcgcctttcccaccttgacaactgggcagggatcccttgtgtgtctggttttgccgagctgcgtctgatctcgcttccaggcttcccccgggtgtaccgccagcagacatgcgctttcagatccactagttcttggtgcatggttctgaaagttgttgtgggtggcggaaggcggtggagtagagttagcataggagccgccgccagagatcagagggtgtctaactcgcctcgcagcaggcaagtcgcaggtctctgcctgaccaaagccagcttggggagccataataaggagagtcagaactgctgagtctctgacaggttctaaaagcaccttttcagatttttgccttaagcacttgatctgggaagctgtctgctcgaggtcctttcggtagaagcagattaaaaacccagacactatcataggcgcgatgatggagaattcccacatccttatgaataaatggctgttagtcatttctggataactctttattggggttgaacgggtctgaaagtatgaaggctccggctggcttattttccctgacgcttacagaatgtcctgctcataattttggcagctctattttccactgcattttgcaccacggtttctggggttactcttggcaaaatgattatgccttgctcagcacatcccgtctaatgaggcagtttccaagggacttggcccagtagcagttcatggcaatgacttggcggtacttacttacgatccttttttttaaaaaaaaattttttttttaattttaatggtgaagagacatgagtcctcgacttttaaaggactgtgtcatttcaaaaattcgttttggtaaggtgacttaacagagccagttaactgacttagctaggggctaacttggcttccctctgcggtatgtagcctctggcccttcctttgggatagaaggctgtagctaacagccactggttccctgtctataaatcttgttcaaaagctgtgagccaaagcatgagtgatagttgttggggaagttccagcagtctaaagacccagatatctattgtcatctcctatcagctttccatttcgtacatctatggggaggggcagaagaaaggaaagctctaggagtcagtcagaaatgatgcagctttctacctggcaggaacagaatctttttggaagtgatggggatacatggtatcaagcctgcaatgttgtttttttttttttccttcccattctccctgttgttgaatcaagacagtgttatagagaaaagagaaaggattaactctgtccatcattgggacattaaatagctggtgtgaactctgagtgctgtagtctagaaggtgaggacatgtgacgacatctaaagtcactttggttcagtgacctcatcatgtttcgctttgctctttatggaaagaaaatatcatggggactgatgatttacactgcaggtgagaaactgcaactggggaatgctttccacttggctgagtctgcccagagttgaacactttgccgagcaatagaaatacatggttatttatcatcatcatcaccatcaccatcatcaccatcatctcattattattgtagacaacttcaccagcaaaaacgctatgctccccaagtaaacaactcacacatgggcaccctgagttgaccatagcagaagcgagccacttttccctctgtcataaagtctatttagctaatgaaagataactgtctttcaggagagaattagtcattctgtgtaggagatgctgaagcagaggcatgatgggtaaagcgatacaagtccgtcacacttaactctccccattagctccgaggcacacttattttcccaaagtagcaactgtggcacacagaagttaaatgatgggttttttccgacacaccaactgaggagcatgggattaaaagtgatcttgatctaatactggtgatttaaacactaccaggaaagggaaagcaaaccctaaaacagaaatcatctgtaactccctaaaacatccctcagaccagtatgttctggcctcagaaagttcagaactattccctcccaagtattctcccaggatagtcagtcttctattttgtttcagtggtaactctgcaaactgaaatacgaagttggcatttatttgtttaattggagctacttaagtagtaaaaccagataattattagattgtaaaacccaggagtctggaattatctcttaaacactatgttgcacataaactataaatttagcttgggcttaaaaatggatcattgtaagatttataagtcaggcttaaaaggcttctctttctttttctttctttctcttttctttttcctttcttttttgtctgttgttaaccagatggtcttgtttagctacttcagggttcataaccagggtgcaatcaacttccactcagtttgtcctcaaaatacacagctcgaggcagccagcaattacaactatgagggctgtggaatgcaagctattgctttaggtaaatctttccacttagtacacatctagtctgcttttagtttacttacatttttgtttgttcgtggaaagactgtcatgggtgtttaaggttccatttctctgagaagagtctgtctgaatgacagtgaattgtacaaacttcctttgttaagattctacataatgaagccaggcatggtggaacacacctttaatcacggctcttgtggagtcagaggcagggggatccctatgagttccaggccagccaaggctacatcgtgagacctcgtctcagacacaacaacaacaaaatgttctatataaaattcctttaatgtagagcctatgttccttatgcctctatggccttggcttgcctgtccaatagaagatgggaggatatgaaggttgccagaggatattgccctttcttctgcaggtgagggactagttccagtccctcatctttaactggagccctgaaagccctgcccacatagtgtgggcctggaatgaggcccaacctacttcatgcccaggcctggaaggtgttcactaagtgcagcacgtgactgagttcttgcggctgaggcacttttgaggctttgccaagtttcagaacccttaagtgtctgcagtcaaagtttaatctattttctagtcaatataaagaaagggaaaaaatcactcttcaatggtttgactttaaaaacaaggtatagtagaatatggcaatacagtttttaaaacacctatagtctggaattcagattcctgtagtccaattgaatgagagcaaagaaactcaaggaaaagagaaagctacagtcaaaggcttctggagaggaacttagaaaatatttttattttccaaagctgtcttaaaggagaagttatagcagacctttggtttagctgataatgaccatttatacccctttttggtttgatgtataagctttaatttttttttctaaattgcttgttgtgttcaatggaaacttaggtccccttccaaccccaccagctttcaaaatggtgtgtgctgcctgtaaatttaaaagcagacagaaggcgttttgaaaagcatagcttcattatttatggttttatatttacctaggaaacccagtttaaagctaaaggactttacatgtccagagatgaggctttgtcaaaattgcaggtgtcttgataataacatgtttagcacgctgtacaacacaggctgaagccctcagcaaccccttcttcttagaccacacattgtccctgtgcccggaaccttgcaagtgccttcccgtaccctcctccttaccccgagtctcagacaaaataaaacaaagccagacaaaatcctgcctcgacacctttcaaagccttggtagattctgtctctcctttgtgtcggtacaccagggccgcatcttaccttttcaaatgagccctcctatgagtctctaataacagatgcttgtgtggctcactggcaccctgctacccacatgggcatgacaccctagtgcccactccctctccctcttgccttggctgccccttggactcttctgtgggggttcccactcctttcatgggcatgtgatttcaagccagtgtgatttgagtaactactaagtcccactcgtaaagcctccgtatctatccactccataaagcaatcaaagcctaaacctttgtctcctctaacccctgaagcagacctgacttttttttcacccctgccttattcctttagcactgccttacttattaacccctttcagtcaaaccactaatctaaatgatacctgcagtgcagccagttttaaggaagccacattgaatacaaaaggcccatcctttaccgataagtaggggcagagcaacagacaagcccttgttaaaagtgtaatgtagactccgtcagccttgaataggcagggacttggctttatatagtcttgtaatagaaacaagatggagagtggaggaagacatttccatttcttgtgatttaaggccccatgatcttgggcaaattaaactctcagagcctcaggtttacctgtgaatttgagacaatattaactgctttataccattattctaaagtctgggctaatgtgtaaagttcttatctgggatcctagcacagagggagtagacaatgaatcctagctagcctcaactctgagtgtgtcctcagtggatactgaaatgttggtgttggtttcatggcagattatatctaaattccaattactaaattaagcaggttgagtattatggagtttaccacaggtaacggtgcacgtgatggaaataggctcacaggtagaaggagccagcagtgtgcttatagcacacagcccccacttgccagcatcctgtgcttggtttcctcattgttattgaccaacctcgaaattcctgaaattacagagcctttctcctagtgggcactcagcaaatatatccagtgctgaattacaggaaacatctgtgccaacagctttttacaagggttccactggtccacagcacattagaaaaagaatgtttatttcaaatcccacttttgcttctttctcacaatataattttcagttactactttagaccattatcttactaaatagtcgcaagaatattgtaaatgaaagtcattgcttcttagcatatactggcatttgataactgacagctatgtattgcatgatatataatttggatggatggatggatggatggatggatggatggatggatggataaatagacatacatacatacatacagacagacagacagacagacagacaaagatccatgtatactaatgaaatagcatagtagtttgtcacaactaagatacaatcagggccattggtcacagagaaatctgcatacctagacagatatacacaaacatagatacattaacattatacagtaaaagttttaaaaggaatcatcctctacaatagtttcctcttggtaggggagatggctcagtggatagaagcactctctttgcaagcctgaggacctgagttcgaatccccaacactatagaaaaagccctgtggctggtcacacctctaatcccagtgctatgtgggcagggagtatggctacaagagcttgcctgtgctcaatgccaagtagaccagctttgaaaacggtgagctccaagttcgatgtgagacccttcctcagggaatgaggcagacagtgacagagcagaacacctcccagtgccttctttcatccacacgtcacatgtttacagcacatatgcatgcgtgtgtgtgagcgtgctcacacacagacacacataccacatatgtatcacactggcatgagggagactatttacccatacgaaaaggctagcaaggaaaagaaaagatcacgtatttaaataggtgcaacacgtggatagtgggttgggggttatgtgggaagttcacgagcagctttcttcctttgctgcagacccaatgacgtggatataagaagtacctatttttagatcattttagggttagaaagcagtggacaaactgatttggaatgctaactcttaggaccatggcactatcctcagaaacgtatagacttaattaccaagcctctctgccaagacaaaggcaacagggcccttgggaacaaatacaatatttccaacttaaaatgccagagccgctggtttcctaagcaacagcagattacaaagagcaagggtatggaaagaagacaaaaatccccaaagccctgtttagactctgtcaacaacagtccctccatcttgtttactttgaacattccaggcatctccctgcggtagttcttactggctaatgagggctctgcatgccaggggagcggcagtctgctgccagggctcttcctgaagggtttccattgtacgattggtcttattggagatcttttccactctgagctggaaaagctggattttttttttttttaaagagggttcttttaatctgagtaacttgagggttggcatatcatctagtggccatgcaattggtactccaaaaagtatggtgactgatggtgtgtgatagtaactggtcatggctgaggtggggccttggggcagctgatcttgaagatgttgaaattgtcagatgggctggggacacggctcaatctctagcacccatgtgcgctgcctatgaaacctgtgctacagagatgggcacaagaggatccccgcagctttaggagtctggcaagctgggtgaataggtgaactccaggttcagagagatcctgcctcaaaacctaactggcgcacatttgtgcaagcacacaaaaacaactacacacgtacacacaaaaattgccactggactattttcctttatatgcctgggctttaccatatctgctaaattctatatatgcctcgaggcaggggccagtaagttgagagatgtcatatttcttggtggatcttggtgttgtaaattttaatatctcttgacatttctaacatgtcaagttaataaaaggtaataataggtctaagatgttacaaaaaaaaaaaaagagaagtttcttgtgggaaatgctgacgttcctttatgctcaccagaaataaggatggaacaaccagggatgtgtaaaagtgcaagctttgccaaccacagagatgcttgatggctctttttgaaatcaattttaattctttatttattcttatggggagcgatggagggacagggttcaatctgtgaagctcagtggaaagttgcagtcatcaaaaacccatgagccactcagattggagccatgtctcctcctcttctgttgagatgctgtgcctttcgaccgtgtggcatgtccttcatacctgtccttctcttttcctcagatagaagttctctggtggtttctgtattttaatggtcagctcactggtagtagctgatggtttgttgtgcttaatttagtttagtacctcacaggccctttggctgaagcttgtgttggctttctcagccctcatggctctgctccctccaagtaaagatggagctgggcttctctgcctgccaaggaccaccacctcctagaattagcagtgacatgcaaagccatcacactggaatgggcagatgtgtgcacacttggccctcttgaagatcattatctttagcattggtcatctgctgatcaatactgctctttctgtccctggtcacttgtaccactgcttagagcctgacaggaaagtgccccagggacgaacataaacagcacaatccaaaggcctcagctccttgggctagaacttcagtttagaaatatgattctcaggctcagtccacatcaagctcaacgtgatatgtgaatgggacatgggggtagaaacaacaggaagaccaagaagaacgtctcccttctggtcccattcactgggaggtagatttctagaccatatcccagaggcgcagaggccccagaagcatatcctactcccttattagaggtcatgttgtgactcagagaacatttgtctgtctagtcagggcctcttgccatgacccatttttctcttgaatccttagttcaaccaaaattgagatcccttagcaaaaaatatattttcaaggctatcccttttttgtaaaatatatcccaaaataagatatgtcctaaaacaaaggacattatatatacatcatacatatacatacatatatacatatatatatacacatatacgtacatatatacatatgtatatatacatatacgtacatatatacatatacacatacacacacacacacacacacacacacacatatatatagtttccaaggatttatccacatttcacaaaccaaagaaccaaagaacaggacatatggtctgacactgggaaggatatttgagactgatgactgtcatggaaagttcagaaacacatggccactctacagatggccaacatgggctgccccagagatcaatgaactgaacaaggctctatcccattccccttatgtcagcattctgcaggaacatatataagagcattttttaaaaatgggatttggctgggttcttcatagagagtcctaagcaacctctagtcataaataagaaggtcctcctttataccttcgtgcaggcataggcatctttggaaaggaaagcagggctggttttgaagtgtgggcttgtttggcacacctgagtggaggattgagtttcaattgttcttgcttttaaacctggtcaggtagctccttgcctcatagcctgcagcatctctaacctccctcccacccttcttattaagatgttaattacagatacaactcagttcatggctcaaggggaagaatttcctcctctgaaccgtgcctgcttttggtgtggcaggtatcatcacgatgagatcatttctactgtgtagcctttaagtgcaggagtttgtcttgtgcagggaggaggaatgtggttaagacacgattctctgagctcagcccagtgcacgggtagccactcgcatctcatagagcctcttttctcctgaaggaattggaggtttttatggatgtaatttcaggagctctcataattcttgcaagaacttctgtattattccgactgtgcaaatggggaaacaggcattggtcattagtcctaagtacaaggatggagcctagactttcctaatggaatttaatggccatttacctagccagtcgagggctggtctgtgcaccagcagcatcccagatctagattctagtaacagacatgtatacccacactgttataaccaagattgatctttgagcattgaaagtccactggctgggcaagacatcttctactctgagctgctattccagcgctcccgcttgaaatacagaactcccctcccggaagtgtttgccataatttaatcatgcctggggttgagcttaacgtaacagatcttaaccccaaactaacttcctcctataggattagcatgggactaccacaaaatcatagaagcgtaagatctcccctcaggccaagtgtgaagcagcctccaagccatctccatgacaaccacttctcccaagtccagatccatccctgagtctcttcagagtgttggagtatgcatctagacttcagtactaaagcaagatgtttgttctcagaaacgaactttctgaccgctgcccagaagtaatgcttacggtgtacaaatgtatacgcctcttagcccagggtgtggatctatgttttaaaactctttgaggagctcacaggataagtggataataacagcaaagaagtaaactcagatcaagtgactttgggggaagggtttcatgttcccgtgggtgtggttatgtgtggaggaggttagaggtcaatgtcaggggttcctgctcctttaggcaccatcaaccttgcttttttaagtcagagtctttcatagcctagagcttaccagtcaggctagactgattggccagcaagctccaagggtctacctgtctttagttcttcagtatcagggttacaagtaagccacgcccagcatttcttcacatgcattctggggtttgaactcgggtcctcatgcttgcaaggtaaacaatatacaaactgagctatctccctgccccttttcaagtaacttctgaaagagtccctgcaaagggtgattcaggtactaagagaagagaaataaaattttaaacaggagcaggagattccaatccactccgttatatagtgtgcattttggtttttgagacatggtatcatttttagaaatacactatatcaccgagtggattgggatctcctgctcctgtttaaatttttatttctcttctcttagtacctgaatgttagcggatttgtctagacaggccgtcatcgtcatagatgtgatccagtgccagcattgtaatgctggctgaaatccaaaacgttgttttattgttaataaaacctatcttttgggtgagtgggtgtcaagacttcatcattatatggcgcctgtcagatttatctagggacagaaccctaaaaaagagtttgtgcttgcccccacgttttttgatcctttgccaatacactatattggagatcatcaaaaccaggcaacttgggatggatacttataaatcccaaggcttaagagtagcatttctaaatttttaaatggagcagtctcaggaggggcatcctgctgtggggagattttttagagggagatgatagcctagggtctctgactctgctgttgatctaatctatgaccttctggctgtaaaacaaagatacctactgtagtcagttctggccaagctatggatgacaaggttgaaaacgtgtagaggaacctatgtgtgttcgtcttctgcaagtccttggtgccacttaagtatagctttaaggctatgggcaaattgaaaattaaactcttaagattggtagagagctatgatatggtgtaagatgatagacgtagagttaacaatattatcacccttattaaaaaaaaaacaagtcctttttcttgaaagttgtcagcagtcaaatttatcttctatcatgaattgggacattctgaagtcacccatatactaccatatctacctatctacccatctctgatgtttcttattcaaagaaaagatttcttctctgctgtaggcttgctttgaaaacaagtctcatcataaaaccgttctgtcctcaatgtcatttattaaacttctatatcctagtttttctttagtgtgcgtgcctgtgtagaatatgtttgtgaaggtcagaggagaggtttcaggagttgactctctgcttccactataacttctaaggatggagctctggtcgtcagtcttgcttggcaggtgctttgacccctgagctgttttggggcctccatcagtcccatatatatgagaatttatgatagccattgcaatacagggaagaagtgaagccaacattataagaaacatgccagtatcttagatctgctgtctagatcatgtggcacaaacctaaggagcctgaaatttccttctaggatccatatattgaacattaaagtcttagatatcctcacctccttcaaggagaaccattaatttggcttctaaattaccaaaagaacactgggtcacaggtcactcatcaaacaggaataggccagtgtatagattcataggcctgggagctttgtggacacacacagtgctacacaccgggagtattaatgtcatcccctgccttgtcaaacaatacctattggaacctagtatttaatatcatatatattaaagcatttctcagtaggaaagggataaaacagaatgtgattatcagtccgggtcacaacactggcagcaaagtgagagtgtgaagattcatgaaaggtctaagatttgcagaagctttcctgtttaataaaagcactttccagaaaataaaaaccattggtggacaggtggtctaaaggtgttcttcagaggggaatgttgaacacgcctccccagtgggtagaagcttaatgatcagtccgaggcataggagcctggtactgcctttctgtggactgttctcagtcatctagtggaggtgagcagaaagcactgaaccacgattacttggaaaatgtctatatcacaagatactatgtcttctaactcctgcacccaaagctatcatgtctgctacttaatcatatctagtggtttcaaatttaaaaaaaatagtattctatatctatatacatgcaagaacagaagtgtgagccatgctttcaaggatcaagctcttgatatttataaacatctgtcctctcggaccgtggctgctttccttaaggaagacacacacacacacaccacatcaaaagtgcctatgagaggtaggagaggaaatgtaaccaaaatggtagaactattctctgatgagagctgatttttgtcagcagaaactaaggcacaagagctctttttttcttttcgccaagtgtgccccaagtctgaccttggccacgttcgtctctcggcagcttccttcaagcactgatttccttgatgatggccatttcctctagtgggtctgtttctcaggatctggtctcttgagtgcctgtttgtgcatgcatgcgtgcatgtgtgcgtgcgtgcgtgtgctggagtccaccagagacctgtggctaacactagggggttgggcacaggaaagtcttgtcatcaagaatgaggcagccctgaggctttggcaggttctcctgcataaatatagaatgaagtaaaaataataagaggaagccaagccattgatgatgctatcggtcacagtgagtgacacgccagccattgtgtctcatttctcttcaaagaacagcatgaatggtcatggaaactccacgtcacacctctctatattgggagaagcagataatttccctggcagtggaagtaataagctttcttgacattttgatagcagtggggacagtagggtggggggaggggggaggggacaaattgtcatgggaccatggcttgcccgtacagccaggtttgttttgttttcttaattccccactcctgagccatagcttgacgacccaaaacagcagaagcaaactttctggcaaagcctgtgaatgtcactcttgtcacctagcagactcatagtgagggaggctgtttaaagagaccattgtattccatgttgctgggatggacacagttcctcttggccttccnnnnnnnnnnnnnnnnnnnnaggagttgcgaacacacaaatctggtggggtggggggtggctctgccatctgcgtcattgtcctggttaaatagggagggactggcactttcctgctggccgtctctctcattctcaggctgtcgggactgaatgaccaggacacatggttagggttctcattggatgttctttctgcacctccatctgaattaagttttaactaaacgcctcgctaacttctcaagaaaaacaattctacactccatgctgagaaccagtgatgcagaatccagaacccacctcaattcaccagactatgagtgtgcatgttgtttctgacactgggctcacattatggaaatggaaagggggtcaggcagagcatctctgaactaaagttcacagcctgggatggggtcatgcaaaccctgctaaaggaaacagaaaaactgtggagagggctcagcaggtaaagatgttggtctccaagcctaccaacccaggtgtgaccccttaagatccacatggtaaaaggagagaaccaactcctgaaaattatcctctgacctccacctacatgtgcacgaatgtactgcatgccacagtcacaaagacacagcatgatgggcaacagagtaggaatcgatcagatggattttgtaaagacggttattctgtttacatggaaggtgggttctaagcggagaagaggcttaatggattgggaaatgccattccaggaatacgaaataaacaaagaaccagttattgctaaactccacacctgggggggcaggatatggagtcttgacaattccagccaggttgtgaccagtatacgaacctcaggctccctattggggcagctaactgcgtactgtgtgggcaagagagctaaaggaacgggaaaggttctcttgtttggtgggcttgagagcaagatgtcccattagccagagacgtggtctaagaggtagggtgcagaagtgtctactctgcactgcggatccgggcagcgcctgcattcatatgtcattacctgggtgacatttcacttagagagcaatgggataggagataagacaggttgaggaagagaggtccctgtaaccatgactactgaagaggcgaaggggaaatggtctattgatggaaaaggagattgagaggtctagaggagaggaagaaccagggagccgggtcttggaagcatggaagccaaatgaagtggatttctgggaaacgtgaggtgggaatgacaaacagggtcccttttggatgggatttataaaccctgatatccaatctccattagagtcactattactagagtttttagggcagaagccctgagccccgacagcctgagcaagctagggtcagccacctgtcttccctccaccaattcaagagctaagtaattgctcaattctcaagaaaaacatttccactcttcctgcagagaaccagagataaggaggtcaaaagtcccttcaacttatcagagaatgggtgtgagttttatttcagacactgggctcacagtttggaaatagaaaaaggaggcaggtagagttagtgaaacgtggagagaggagatttattcaacatggccacactggagaaaagaacaacagaagggtccagtgagccccaaggccctcttctagagcactggcatggagctgaaatgtaaacagagtctaccctgttggggccctttctatcaactgcaccatcatggtctgtccccagtctctcctgcatgacagtctgacaacttggtaaccttgtgaaatctctacccgggaggcaagttcctcctctgactggcaccagggggtgtacttccctcccctcagcatgagattcctgggggaaataccaatttcttagggtccactatctcaatagtcctttagccaaaatgaggatcacaagtgtggcctcggaatattgtccctcctcccaggagcctggaaactggannnnnnnnnnnnnnnnnnnntgactttacaaatcattaactttttgaacctcccttctcttagttgtcaagtggaagaggtggactcttaactccttgaagatccttctggctttcaagttgtgcaccctgcaccaacccgactttctgcctttgtaactgccaatctgcagcagcttggcatccagctgggtgtagagttacccagcttgctcacttatctctccttgatttgtttctgtgttggctttccctccccctagagataaatatccaaggggctgggggttgagaaagagtagatcttgaatagacaacttctagcctctccctgtgttttcttagatgttcagataagagcttctgactttggggcctcagggaatcacagctttcctataaaggagagaccacctcccaatcccccaccacccccaccaccttccaatcccctcccccagcacacacacacttttgcagcaggaattaactcttgattggcctcctcatgacttactgtcctttggagatagagccctatgttctgtcttttatcttttttactggacccttgacctctcaccaggtaaacatacagaagccacacctcttatctgagactttctaaatttacttttattttccatgtgtaatggaagttctgtctgcacgtatatctttgcactgccttcatacctagtgtcatcagaagccaaaagagggcattggatcccctggaactggagttacagatggctatgagctgccatgtgggaactgggaatcaaacccaggtcttctggaagaggaacaagggttcttaactactgagtgagttctctagccctgggattgtttcttgattgagcaccaagaagggagagataggtaggaagtctgaagtcaaggaccacccaaaaaaattaaataaaagcccacaatggcttgctaagtgtctggcagtctgtatatctttacttggattcacgtatttttattcttgtgacaaactcacagttgtaccgagccacaactctgttcttaccctagggatgaggaaggtaggatatccaaaaggagagccctaagaacacacttgggactgcaaaccccaaaggatgcatttattccataaaatggggtgaaggtaaggttaccctcagaaccttctgatatgctggaatggagcccagcccaggcactgatctgaaagctaagctagcatcccagagagggaagtcaacccagtaaacccaagttctccttccagctctgatacccagatgtggcccttgaagaaacaatggcttgagctcaccagatctgggtcctcatcttcaaagcagaactacaggttcacgagctcacaggctttctacaggggctgtataggagagtgactaactatatgcacatcagctgtctttagataacatagagattaaagaactcaatctcacttagtcaaggctgatgtgtaccggggtatgaatggatgtcagcctggcctgggggtgggggtggagcagtgtgaggtccttgctccccaaccgctgggtcaagttctttctaaatcccattttctctgtctgttgtgagaagaccggagagatgttgtgggcaaggaggcaggagaattcaccagatgtgcccacttttgaatggttgaggggactctggggctatcctaggaacttcccttaggctcctgtgcaggcatgagcctgcagctaaacaggcggtgggaaggtcactgggacagaagacaaaacatatctagcagactcacccggggatttgtatctgtgtctaatcaagcatggcgcaacactccactcagtacctcacggtgttccagaccctggaagaggcccaacagcgaacgcctccagctgattgcggtcgattgagctgcagtcctttgcccgtctgctgtcttctcttgcttctctttcttttctttgaagcctgtttgattgcatagctatcagtcttctggtcccatagggttgcccccaacttgatcacttctgattctgtgtagggacttcctttgctaccatcccctgttcttgaatgggcccagaccagagtcagctcttccatctaagctctgaaatcggaatcctacggagtcccttccctgaggtcatttgatacaaaaaggaccagagtcttgtcctctttaaacctatgacccctttttacagtgatagaacactcaaaggatggggagaaacagagatctaagcatcctggcacattctttaatggctctaaaaactaagcaagcatgtggcctgactttatcgttgtatttgtgagtttttcagcgttagaaggaatccagtgtttcctagtatacaactgctaagtaaaaccttcacctaacacaaaagctccgaattcccttctagctaatctcaaacagatcgcatctaccagtgatttcagctttatcctaagttccctgggggacggctatttgtggctctaatctctcttcctaaaattaggtattcatgataaaagatgattggctagctgcagaggtatgtacctgtagtcccagcacttaggaggctgaggcaggaggatttcttatgtccagcctgccggggcagtatagcaagtgtgtgtgtgtgtgtgtgtgtgtgtgtgtgtatacatatatatgtttaaagtgtatgtctttaaagtatgtatgcttaaagaaaaagaagacttgggagtagttgaccaaggcaagacacaatgaaaacatataccatggttttgttgttgcttcggggggggggggttgcaggaggggggggatgaggaaggaaagttaattgggtagtgtgatatgagaaggatctaagaaaacttggaaaaatatgagcaaaatatatagtatgaaagaaatttaaaataatttaaaatgtaatgaaaacaaaataaattttgtattatcacttcaaaaaacacaaagcagtgagtggaactggacttcctccagcctcgcgaccagaagcagacccctcctctcatacacagcccctccccagaagagtgcgcctcacactgcgaggcctgtggtttcaggcagagtccaggggcaggagatgattaatgcatgtccgtcttaaagaaatgaaaagcatgagattggaagatgaagtccacatttctggagaggaaagcggaggcaagagtccaaagaaaagcagccccgaagtccacaaatatgcgatggtgtgaaataaagtcccaagcatactccggccaagcggcagtccttcgctccgcaaatgactcctcgccacagtgacattaagtgcatccagacgctcgagtgacacatgagaggggtcacatttagtttttccgatgcttgcgctgggttccctatgttccccccacttgtctgcactctgggaaaggggcaggcgtgcgggactggctgccagtatgccgagaatcttcagagcctttgaaagccttccaggaatgtcagcgcagactgcctgcccactctctgctcaatgcctactttagctgtctgccgaggactaaatgtgccagacaggccttcatacaaagacagagagtgttctgagtccatgaaaggaaggcacagcctttcagatgtgaatggcgagatttaagtaggtgactacgtggtggcctactgggaaaggaagggccctcagagaggtgcaagagagacccagcctatgaaccaatgtattcctgccgagtacctctccacggtgggatctgtctagacagactgctatcacactgtgtccctgcttgattactgtagcctatccctatgctttcgcacgtagattcttcctgcatccaaggcctccttaatcataaaagatatggtaggctctgccaaggcacaattatgtgtatgtacttctagttacattgcaatgatgaataaaatttctgtttgtagtatgtgtcatttagaattttctttgactcatttgggggcggggtctagaatatatagaagcattgtggcgtatgagcagctttttcttttcttttttcttttttagtattgagggcagctcactgtggcgcctgaacagcttggaacattcttcccgtccagctgactttgaaaagttagaaaaatgctttgcccagtgaccccttcctaactcgttagcaatgccagcccagctccttggcaaagcacccagcactggagggaaatctcttctgttttgtgctttttggaggagtccatctgatgtcactggtggaagacacagtgtggctgtggctatcttttgtctgaaccctctaagttccttctgacaggctagtgttcatatttcttctctatttccaggaactgtgcctgtccctaaaagtgtgggttgtataagtgctaaaaagacagacctaacactctaaccctgttcctctcttcttcccttcccagaatcttatggcaagggccttgtatgacaacgtccctgagtgtgctgaggagctggccttccgcaagggagacatcttaactgtcatagagcagaacacaggagggcttgagggatggtggctgtgttccctccacggtcgccaaggcattgtcccagggaaccgggtgaagcttctgattggtccagtgcaagagacccccggtcatgagcagcctactcctggacctatgcatcagacctttggccaacagaaactctatcaagtgccaaattcccaggcagcatctcgggataccatctaccaagtgccaccctcctaccagaatcagggaatttaccaagtacccactggccatggcactccagaacaagatgtatatcaagtaccaccatcagttcagaggaacattggcggcactaatggaccccttctaagcaaaaaggtaagtgatgaactagaatgttgttctttcttttatgccactcattgtagttagaataatagaggcaaccccccaaaaaaatacttagaaattgccccaaagcaaacatactaaatggcttaccccagacatctttattacatcaaatttccattaatccgtcaacagcaatttttattatgagacagagtctcactgtgtatatcccaggctgtgtttgaacttgagatccttttacctcagactcccgagtgctgggattacaggcatgcgttatcataccagcaacacaacttcgttgaatgaccatgtgcctacataccattgactaacagccagtctaagtggtatttcattctggatccagtttgagcatacaatcgtgtctcttcagtcaggtgatgagtctgctagacctggatcctgtgtgtaaatggtttgtagtcttatcgacctcttccttgagtagtgtagcccccgtcattactgtggatccttctccctgggccaaaagctaagtcatgaatcagtcatctggctgggcaaagaatcaaaggaaagtagaggaaattaaaaggttgaaaatacatcctatctaccagcttgttcttagagctttgggcttaaagattgatttattcaaaatacacagatactagtaggtttagaattgattcatttcttgtagtaatgtccaagtagacacagcagagtttagatacttaggaaaatgccaagtttaaaaaaaaaaaagaaagaaacatatgatgtattcatcagctttttatcaccattactgaatccttgagacagctaccttcataaagagacaatatttattgcttaatctctcagttttgatagtcccagagcctgcctctggcattagatcagttgtggcaaaggccagctgtcatcacctcttttggtaggcactctcccgatcacctcagacctgccattagcagggggtgtggaatactcagaccatccccaaaccacatggctagggagcaccacaggactagggagcaccacaggactagggagtaccacatgttagagtctcaacccagaacaatttgagttgagtagaaatgcattccttaatcggtgaatattgagcatcttttgtagttttgatacttgtgtgatacagtggtaaactaaagactaaatagagctctcagagcagttacgatgcagtgagggaacagtacaataccaggtaaggtgtgtgtgtgtgtgtgtgtgtgtgtgtgtgtgtgtgtgccaggaagagaatcttgacacttacttacagggcaatggctaagccaacaatgatgggtttttgtgcccattaaaagggaaggctttcctctttcatttgtcagaaagtcccaatggttccttcaaggcttgctagtaagaatagactaattttatacaatgagaaaatatctccagattatccagattataagagtaagggtaaagttggacaccagaaagagcttgagactctatggacacaaaatatagatgaatttacaaatctatgttgtgtcaaatagtatttgctagcatgatacttttttctaagtacgtcttttttaaaagagttatcatttttgttttatgtttatgagtgtattgcctgtgtatatgtatgtgcaccgcatatatgcctggtacccaaggaagccagaagagggagttgggttccccggaactggagttaaggacagtggtaagccacctgtgtggcttctgtaagaagtctcttaccaatgagccatctctccagtccttggaacctctatttattttcccaaggggccaggggaagaaagatttattcttgaattcctcaacaatgaattcattttctaatcatctattatacatatgtgtgtttttaacaaaaacacatctcaagggcacacaatccaagttctgtctgataggagaaattctctgagaagtggtgaagggctttcccacttaagttcactccccaggacagggatcctggctacaggccatcgacagagcatgtgaccttgcaaagcccttctcgccccagtgatttcagctcctgagggagtgccaagcctggcctctgtcccccagagaggaaaagaacagttggaaggtgtaactataaataagtaactctcattcttagtctcggtggcttgagcaacttaaaaatagttctccctcgtctgagctggttcgaggcagacagaggaggccagtacgggaagtgcttggctgaaaggtagagggaccttactcttgtcatagtttattttggcaggaaggtgacatgttttcctttgactcaaccttttcagttccatgtctgggaagcctgatgcttcagacccctcgttccccccttgcttgtgttatagctgatggcgttcttccccttggctctctcctggtctccactgatgtcaggggctgaggccctcaggtggctcgggtccctccgcatactgtttccttctgtgacttctgcacctcagagccttctgtgtttagcaaagggcaggccagccctgaagtaataagccaacctttaacaagccctgccagcccttatgcagtgcagaccaaacaagacactcccatcacctgaagcttgcacagctggcaggggctgcctagtacggactaaagctagaaaggacagggaaggtgaccctagcccttccctgccatgcaccagggtcctctgtaacaaaccctgtgagtgagtcttcgcgccattgagagttcaggtttcctgcttccagtcccttcttccttttctttccctccctcgttcaccgctcttcttccttctcctttgtccactcctcctctcccttcctctcctcatctctccttccttttatcccctcgcttccccataccctcctctccttcttgttcacccactttcctccctctccttcccacttcccttcctgattttctccatttcctcctctctctctcttcccctctcctctctccctcctttctttcttgttaaattttctttcctgatggaggtggtggcaagggtcacctcttacatgactgtaacctcccaggcagtaataactgctttaagaatttggccactggggctgaagagatggctcagtggttaagagcacagattgctcttccagaggtcctgagttcaattcccagcagtcacatggtggctcacaactgtctgcaccgagatgtgatgccctcttctgaagatagcaacagtgtattcatatataaaaataaatttaaaaatttttttaaaaatttaatttgaccaccaaatcccttgctgtagtatagtaactcccagtggacaggaatcctaatgacttaagtcagaccccaatctcagtggccaagagaacagatgtgggttttgtcagtagttattgtttcttatcttagaagttttgccggcttgctaaataactaactcattttctcttctaacttcctgtctgtaaacagtgacaaactaaggcctggatgagtgtccccagtagctctagctatggtttctaaaagctgtctaaggaaaatgaggactcagtggtaacttgttctgagcttgaagaattgaatgagctagtcacccagaaagggagggacatcaagtcagctgtgggttcccaggtccacctcacagcccttcctttcgtgggtctaagagaggaggcccaggagcctaccactctttgcttagttcatcagaagttggcccaggaccatacttagagaatcactaaagagagacaatggccggcttggatgtgttccagtctgactgtgatcgggactttccatagttcagaactcgcccgagttgttacagtgtggacttcagacatttcatcccatacaccactgtgtcccaatgaattacttaaaaaaaaaaattacagcatgaattctgccttctgccttccctttctgctctcctggaaactccagcttccacccaccctcctgcaccccggatccatattaaccgacagccagaattagctgcctgcagaatgcggatagggatcacacgtgcaccctctgtgaagcaaggagaccaggagccctgtggacagagcaaggcttcagttagtctgcctcctaccacagttttgtggctccctgggctcagcaaattacaggtgtcctctcagaccctgcccctttgcttgtgaagtgggaataagcccatttaccacaaagggctgtcgggaaaactaaatggactcggaggcagaaagctcctgcattgcacttaccatcgtgggatgatcctctctcttgcctttctcctttctcaagagttttgtttgggtttgggttttgtttgttttggacaaagcctcaagtgaccccagctgccttcaaactccctaagtagctgataatgaccttgattttctgatcctcccggcgctgggataacaggtgtcttaagcacacacgcccagttttcaaagttcatgcggagtctatggaccttgtgcgtttctcagtatatgctgagtatgtgcgtacttcattctcagccaatgtgctgaaccctctgagtgcacaggtctcttctggaaagagtggtaaagaatcaaggttatctggaaatcttgcagacgggcaccttttcctagtttcatttgtcttcactctgagtcttatatgtagggctgtttcacacatcgggcattgcaggcagagtgcctagggcctgggcaaaagtttgaaagctgaatcaaaacaaaagaaaactccgagccgcagagtatgaagcataagtgcaggatagaaattaatcaacacatagacaaatgcttaggaaggagactcacgcgaggctcatcagttatatgtgggattcaagacagttccattccatttggaaaacagtttgtgagttagagctttctcactctgcagagacttgtaaatatgtgttgagatcgccaagagctctcagacaattctaaattaagtatgttactcatagtcaaataatttgaaaagctgaattttttttaaagttttcagtctttaaaaagggaaaattctacttaaaatatgagagttggatttgagttggagagcccaaaagcctgcaagtcaaaagcctacaaaggtctgaaaccagactacttctctacttcagtgatctcagacttccaagggacacacccaagctgcatggggagcaattttgattattcttttcttttcttaaatgtatttatttattcactttacaacccaatatcagcccttcctctcctcccagctaattattctttaaaaaaaactatttatttaatttggtttcttttaaaaaaaaaacatatatttattttctctgtgtgtgtgtgtgtgtgtgtgtgtgtgtgtgatagcaatgtaccatggatgtcagagaacagctcaagcggagtggctctctcctgccaggagggtccctgagattaaactaaggtctttaggcttgatggcaagcaccttcacccacagagccagcttgtcagccttgatggttgttctttagcgttagcttggaccctaaccaacaggattttatgtgccctgactccttctgaagattaatttggagctaccttctgactctaggaagccaggagccacggtacccacttctgccgtagatcaatcttgcagctaagaacccacacacagatcagcatggtgaaggaatgaacaaagtgggagcaaggaacaaaggggtaatgctcagttcacctcaaactaccaatggtgattccgagctgctcactcagccagtctcctcctgcccacaccttccccaacagctcctgatagacaacagaacagagcttcctaccacgagggtcctgcaagggcaccacttattaactgtccttaaatagtaactggataccaaagcaaataatgattgatgtgaatttcggctttccggatcggggtatgactctgtaaaagagcacttgtctagcacacatgagaccctagatttcatttaagccaggcacggtggcatgtgcgtgtaatcccagctctcagggaacagaggtacgtattgggagttgcctgacttctcccccccccccccccgccccagtatagactgcaaaactggtaaactctttcattgtctcctagagggaaaacatatacttggtatagtggttctcagagcagcctctgtgggttctatgagacctacaatcccttccctcctatattgtgttttcaaaccatccgtctcttaaaactcatctccagtctaaagctttctcttggcaacccagtattctcttcccattttctggtcccatcgtatgtgcatacctcactgatgccatggagctcatgggtccattggaaatgggataagctgctgtcatggccttggctggggtgcgcaccgtttggtggtggctacttagaatacttaagtattgttgagctcggccaagccctgtggcatcatctctaaggtgggcaattccaaaacagggcatagacaaatgctggcaggaagtgactcaaaggcttttaggcaggtcttccaggctggttcctgaaaggtagcagaagatcctgaaacttatgctgcctctgccttcttagacactgaatcatcacagcgcacatgtacatgcacatacacacagacacccatggctgctgccatgggaaccagagacttcccttgttggcatgtgaagccttttgaaatcagttgaccataacaacctcagataccagccacctaactgctatagatattaagcaatattatttttgtctactaacaaggaaaaaaatagatttagaggaaattagagttgccggaaatgacaaactctgacttttcacctcccttttctttgttccctgttgtctgtgtgtctctttgtttttctctgcctttctgttctctatgctctccccatctctatctcccatatatacaacttaaaaagttaattccagggcagaggacaccccccccccagttttttcttatgtaaactcaatgaagtacaattacgtcccaaaattgtagatttctatatgaaaataaacctaataaatatatctaactgtctagtttgtaaaactgtccaaagaactgagatgtcacctaaatgtcccccctgaaaagtcaaggtacattttatatcttccacagccttggaggtccccaagcagtgaagggagggacttgctaagcttaccctgacctgaaaggcactgttcccagacagtcacccacgccaagggaatgagcaaaccctcacacctccttaactgaacaaaggtcctctttgtttggtcaacaccaacgtcttcagatttcagccacagtctgtcataaagctcatagataatgcatatttctgagggggcgtttgtaacttgtcactcacccttaccaaggcaacagaggttagttagccttcccctcccactgattgcaaagtaagtgactgcttatcacagtgagtgagaggcagcctgccacaggacaccccactgcatggataatactttctgaaggagggagggcaggaacactgcttgtcttatttaatgataaaacttgttggatcatcttatgtgaatccgtctcaaagacacaagagaaagggagaagaccaactcgccagagtgcattctacaaaattcggggctggaaaatgtcagaggccaaaaacactctgttctaagtagcagtaccttagtcattgtgtcagggttacagccagcaggcatgcccgacctttgatgttgtgaaacgtcagtgccatctacaagtgtcttgggccacactcgtggctatcctgggatacactcagctcgcagattgcagtttgcacatggctggtactagaggtgtccccatctgtgtgagaagtccaggtggttcacacgtaagacagtggattcctctgcagtctctgttaacttctggagagatctcttcaaaagaacctctgagtctgaaacagggtggtgatgttgctccatcttattctgcagtgatgcttcaaatctgaagcatagaaatgaccttaaaatgcctctgagcctctgctccattttgagggcattataatgactgtgtcacctgaccctcctggcagaaagcgacgtgcatactatagctttccttcccctcacaaaggaaaggaggactgaggcctgagattaatctaccagagtgaactcactgcctctcacaagagacaggcctgctattgagctcatatctgtctgactccaacgctaatggcttctacatcccagctcataggtgccattgccagccctaacctaagagggcacattgactttgttagcaatcccagctcaccacaatcctgggtgctaaggagcatggtgttagccaggaagaattcatgttgctgcggaaggctcccccatctcacatccacatagtacccaaagagctgagagagcctagccacagatattccagccactcggaaatacttccaaagcactcatctgggagatgccagacctgtggtactgcaggcaatatggccatgtggacttcttcttaaatgatattgctgttctaaaagttcatgtaatctccaagactagactagaaagaaagggacccaccaaagcacaagatacctaatttgcaagctacatctattgtatatggaagttgctttctttgagagtatttccttctaaatgtctaaaaagaactgcatggcacgtgtcactgattcaggaaataggcctctgaaagaagaattgtaagtgccaactgtagctcccactcgctcctctgatgacgtaccttcccatactccagctccctcgactgtgaaatggccactgaaactggattccctctaatggtctttgccaacattttacgatccagatatccttatcagattctttcccacaatagcttgaaagatttcattaaatgacctaccttcaaccctcgtcttaaaaactccaacttgacccctaaacatggacagtttgtcccctacccttctttagagcccagcttgcctttgccatccacagccgctgtgtacaagaagaacatctagaagctggcaagggcagatgaaggcacagatattgttcccaagagaagtcctaggaaattcttcatttggagaattcccctctgtgctctatcatcaagacaggcaagctcttctgccttgccatttttctaccatctttccctgtaaaaagcctcatggtctaggcagagagatgggcctggtgcctcgaggcatggcagccaccctcagaactggcaccaatgtttgccattcgtgccatttgccccatcagccattatattcgtcctcccactgagctgtgagagatcacctactcaaagagaagcaatacccacaggcattcgggtcccagactacttctctgtcacctcccatccacagctcagcagggcagtcttaggcgtctttctaaatctagagtagatgcaatgggcatggtcccattgaatttattcagatactaaaagagcccagaggcctgttcctttatggtttcattcaaaggaacatttcagtcaactgaaagagatatttaaaagaaaaatggctttcaatacctaattgtcacagcctgcattcagctttgtcccatgaaagaccttggtcacttggggaacccagatgtcatttcccaccaaggtttgatgttctgtgcgtcttgctgctctttggtgcttggtcagtccatagctaaatattgctttagtgctcactatacaaagagcttcctgatagcagcaggggagacatgttaggggcttaacaattggggtactgtttccattgagtggtttgccacacaaagctgtgtcatatgaatgtgacccaagggagcagtttcactcctgaaccttccctttgcctttgcctcaagtggagggagagatgggctgtgatctggacagcttgcaaaaaaaagtttagctccagcataaaaatcaactatcaaatgtccttgaaggaaagtaagtcgtgtccccaaaatagagtgaaaaaatgtctccattgaatgcaagagaagcatcaggatgggttgagcctagagatagcttggaagggagtttttttttaaagccagactgagttttcattatattgttgctatgcaagtaaacaagtgagctcactgctgcacccaagctggacagagagagaatttatagagaattaataaatccagggtagacaatgtgtagcttttcctcttctcatagaagtgcaagacatgatcttggatttcaaataggcagcccactgtagctctcagttgctgaaaactgagtccccgtcctagtgggctggcaatggtagtggtgatatttctattcctagggttttcttgtaaaaagggaagagggtaaattgctcatttaagacaaagggttattatgaaacccagtgaaggcagtggtgtctctgctagagctttttcgtttttattatttcatttgaatgaaatggtttctatctaataagcagttttagaaatcaaaacagtcttgttaatgtaggaaacccaaagaaaggtagtataaataaatcaagggaggggggggtggttagaggggcagggagcagtctaactgtatttcccaccagagccaaagcaaagcaatagacgctcgtcatgtgacacgcttgctcattagaccatctcaggccttgttaagggcaaggctgtctgtgggtctgttgctgtagtgacatgtcctaacctctcgttagcgcctgttgtgctctctgagccgagtatttcctgagttgcctagttctggtgaaagccttagggtaggacagcaaaacagcaaagcctggttattcaccttcctgctctgttgcatcgtggtcaggagtttaggcaatatctaatctctctctctctctctctctctctctctctctctctctctctgtgtgtgtgtgtgtgtgtgtgtgtgtgtgtgtgtgtgtgtgtgtgtgagtatgcacacgtacatttgtggtatgtatatgaacatcaaagtacaccttgcaggagccgattctctcctagcatctgggtcccagggattgaacttaagttgtcaggtttagcagcaagcccctttacttactgagccatctgacctgcccacatctgaatggcagaggcaaatggttacacaatgtgtgccatttctgaagctgttttgcagtgattctggaagaaaatgatgggatacaaaattatctgcaaaatcaaaagtcatggcaatcactatcatgattttgtgggtgctatgatactcatagaagaaaaggcttctgggtggaattctttatttttttattttttttttagtttttcttaaaattgtattttgtgatttttgtaaagatttttgacagtgctaagaacagaacacagagccttgcgtaagctagacacataccctaccactgagctacatccccaactctagctttttgttgtataccagaaaaggataatatatagatggtaaataggtagatgatagacccgaaaacaactagaatggaagcaatacttccagcccatctccatgtctctcctccactctacccaagtcttcttactcaaatatttttctgtgctgtgtgtgtgtgtgtatgtatgtatgtgtaaaacttatattattgtgtatgtgtatgtatcaaatttatattattttaaaaataatacatagtgattgtgcatatttacaggatatttctgtacatgatcagataagggtaggttgttcatcggctcaaacatttatcattttctaatgttggggatatttgaaatcctctctactatttaggaatatacaattaatgcttgtcaactgcagttacatttctgtgacatagaactttcaaatttcctttcttctatccaactggatgcctgtatccatcctgcatgctctctgcccagccctctcctcacccatgccccaggtaatcaccgttccattccttgtcggcttctatgagaacaacttttcagcttgcactattttgtccctcacagctgccagtagtgtgaggaagtaggggaggggtgagatgttgcattgaaggaagagtagagagagacatgggagaacctgaggatttgggggaggccgggggtggggataaggggaacttgtcttggagaatggtagatggctacttcctccctgcttcacttggggctccagtgagcaggcagctgacagggcaaaggtttcctaaccccagctttgtattaggaaggtgaggcagacagatactcgaggtaagacatggcccaaatagatttgctgaggccttggccccagtgacatcccaagagaagttatctgtaagccaatgctttgcatattatagacattgccgagagcaagctccatgtcctagttcttggttcctagaccctcttgacaagcattagtttgtgctctcccactgataagaatttcatcccataccctgagcctaggatctcatcacccttccctttggaaaagtccttcatctctaaaccctatgaaagcactcttccccgcagggctctcccctggagtatcttgatttccattgaggataatcatgatattggcagcactgataaaataataacctaagtaagtctactggtggctgtgaagaagcggagtcccctgtcatttgtggctttgatttgaagtccctcgtgcctcctgggcctctctttcaatccttcacatatgtgtaaagatgactctcttctcatctaacttaaacataccaagctagtgattttttgttttatcttcatgtttaatcatgaaacactttgaaggcaaacagcctcgaaatcgctggactaaaatatgaactaactacatcctgaccagcatcaccatggctgatatgagttgtgcctttcagcctggggtatgatactcacttcagagctgcccaacctggaaatctgacttattctatgtaggcagacatcatttcccttccttctagcatcatctttcctaaaatctgctttatccaaggcacggttataagccctgctgcaacaggaggttcaccgagagagtcaaacaataagtcacatgcactgtcagacatgaatataaatatgtaaattacttggagtgttacaaagacagaggtagtttatccatctagggaaggctttctgggagacaggaatttgacttgactctgaaatcatgatattatctgaagataaggggagaggaaagagttgaatggacaaagcaggtgcagatgtgtgggttttcagggcatttgaggaaaccagagtctttcagtcttgatagagatggtattggtcagaacttggaggtttcaaggtctcaatgaaggagagagaatacatacacacaaaaaataacatactggagaaatcaaaccaggcagcataggggcccgaggtgtgatttagtcagccaacacactgcttcaaattttgaaaaccagatttacacttctggcatctgaaaacgtgcaagatctgataacacattcccagtagttgactgaacgcaagcatggtcgcctccctttcaataggatgtgcgcctgctcctaagtacagaagtatggctgtttctcctctgtacctgtttgctgggctttcaagcagctgaatgaagggtctttgctctgtcaaagaataaacctaggcaagctggttgcagaaacatcaacaaagagccccaaagagtctcttctccaatccacagtctctagcttgctgctgtccaaatgggcctttcctttaaagccagtgtgcccagctttccaaattatgaatcatgaaagtagattacctctctggaaattcactccaggaactccaaagaccttacagaaaatgacataatgcctatataacctgcacacatctgcacatagacgttgaatcatctctaggcacctttcaaaacctgatgcaattagacgctgtgcacgtacttgttagaccgtattatttaagaaagaatgacgaagagaaatggaaatcggcatatgtgtggtgcgggtgggaactgttttcatgcactccctacccctgagcttggttgaacctgtgggttcagaacctgaagctacaaaatacaggctgtgtcagaaagatcttcaaaagcagttcctgcagtggggatctaaggctcaatgcagggagaattaaatgctgctaaagtgcaaggcagaacagctgaggttgctcccttgttcttatgtaaacaccttaattagagggctagcatatcctaggtctttggtctttcattcttcctggcagggaccagccctagagattgattccatgcgttcgtttgtaagtgcttatagttctcagtgcgaattatgtgtatgtgtgagactacaaaactgaacccctttaatgcatacaatgaatagctactaagatgacttagtatgtaaagtccctgccgtgtgagcatgaggacttaaattgggagctctggcacccgtgtaagaaccaactatgggtatgtatataggtatgtatgtatgtatgaatgtacatacgtgtgtgtgtatatgtctacaatcccagcactgggaaggtgaaaacaggtacacttcaaggtcattggccagccagcattcccagattgatgggctctaggttcagtgggaaattctatctcaaagaataagatgaggggcctggagagatggctcagcggttaagagcgccgattgttcttccaaaggtactgagttcaaatcccagcaaccacatggtggctcacaaccatccataatgagatctgactccctcttctggtgtatctgaagacagctatagtgtacttacatataatactaaataaatctttgggccggagcaagtacatgatggcttacaaccatctgtacagatacagcgtactcatatacataaaataaatctagaagaagaagaagaaggaggaggaggaggaggaggaggaggaggagaagagaaggagaagaggagaaggagaaggaagaaggagaaggaagaagaagaagaagaagaagaagaagaagaagaagaagaagaagaagaagaagaagaagaagaagaagaagaagaagattagattgcaaagatgactcagcagttaagatcactggccatcctggctgaggcggcttcagttcccagcatctacatggtggctcacaactatccaccggcccaactggagaccggccactttcttctagcctctgcggctactgaatgcccatggtacacatacataaaaaacactaagtgtttttaaatctttttatatggaattttaatgtgaaacattatttagcagcagagatttgaccttcagagctaagagtttaacctgttcttcaatctcttaaataaaactgacatatacttggcagcggaggaagtttaatttattgaaagaaaaatgtttctttttctttcttttttttattattatttgttattgttgttgtttgagacactcttgctatgcgccctaagttagcttcaaactcacaatcctcctgcctcagcctcttgagtgctggggttaccagtgtgtagcaccacacctggtaatagtagtgcctgaacacataatacaagcatattatgggcatctattcttaaattaaaaaaaaaaaaaagggtagaaagaggttgagaagtcacctgatgtcagtctctggccctcacacacactcacatactcacaagcacacacacatacaccaccactccacacacacacacaccctacacaacacacaagtacacaaacatacacataccacacacacatatgtgcacatacacaaacacccgcattcatgcatatgcacatacacacacatactcatgcatgcgtgtgcacacataccccttcatgttcccatacacatatgcacacatacacatactctctcacgcacacacacaaaacactcacacaacaagcaatcagaggttttgaaaaatatatataaaggaggaaaaaaaacccttaatggttacaatctcttctctgctttgtagctcttctgggggttttccgggtagttgacaacaggattcatcatcaggaacagcaacagagccacaaatgaccatgcagacccttcgagggatgatcataatcagggggcagctgtagttctggaccttcagggtcccagcctaccacactgcttagctccctgggaagcagtaatgaattaaaaggtcaacttggtaattcccttgggctaagcctttgcaactaaaaataaatacatagaataaaaggactgcagaagaagaaaaacaaaccaagagaaaagggacatgattaaaaaaagaaaaaaaaaaaaaaacagacttgattttattgagaaactagtgtaaaaatgcccttgtgtggtgattccatttaaacccaggagaattcttccaaactcaaggtcatggtcagctgttggtctgcctcctgggctgaaggtcagtggttctaagaggatgagtgtggggatggtgtgcttttcgtgtgctccgtcaagcaggaagaaagagcctgaaggtcaggctagccaagcactttgccttgaggagggaacacgcaattggcctggagagggtcctaggaaggatataggcaaagctagctctgaagaaagctccatcagttttacctaagatgccacatgtatcactaaatgccctggacttgttctaccagaggcaaagctctggcctcacttcaacagcattgctgggtctgtgtgagctggatcataccatcgggaatgctgggatgggaaggctctattttattggctttttccctttcgtggttttgaccatctgtgtttctaactgcgtaaacaaggaaaaatgactggtttggaatgcaaagttttaaacaccagatgaccacaggcatcctctaaatgagaaagagagagcaagttggggttctgtgacatttgtcaggaagtggaatggtaaataccaagaagcctgtgtgtgccctgccagggaagggccacaaaggcaagggannnnnnnnnnnnnnnnnnnntggtgtttgtatggtgtttatataacattgtagtactataaaaacattggggaaagggtttgaagtgtgtccaatgatatatggaggttacatacaaaacacatatatggaggttacttgcaaaacacagcaccttggccttgaccatccaaggatgttggaacagggtctcctagagacactgtgggaaactgtatttcccttgtctcataaagtaaagtgaacatccccaggcaattataagaacaggactgttcatcagcggctctatgaaaggattagggtgacccatggaattttcagttataatcacaataataatttcagataaagaggcatactgggttaggtatgagaggaattttaagtggccaaactatttgtttatgttctttacaaaagccttggagcctcgttaaaaaaaaaaaaaaaaaaaaaaaaaaaaaaaaactgtactgttgtactttagccactccgaaaggatcagctaaaactttcataatttatttttattttatatgtatgtatacaagtgttttataatatattcatacacacacacatacacacacacacacacacacacacacacatgcttgatgctgttgggggccaaaaaaggctatcagtgcctctgggaccagagatgaagatggttgtaagctgccatgtgagtactgggaaccaatcccaggtcctctgtaagaatagcaagtgccagccgggcatggtggcgcacacctttaatcccagcactcgggaggcagaggcaggcagatttctgagttcgaggccaccctggtctacaaagtgagttccaggacagccagggctatacagagaaaccctgtctcaaaaaaaaaaaaaagaatagcaagtgcccatagcaagtgcccttaactgctgatccctgcagtccaactttcataatttaaacatatctccttgaatatagggaattgagagtccattgatgaattttgatcagatttttggaaaattcttaagaaaagaaataaacatatttcagtcacttctttcatattctgaccttgtatcttcctttcctctcaccctcccatactttttctcctttccttccttctttttctctcctttctctcctttctctggtggattgattagggatatgtttctcaacacaggctgataagtatgctgaggactcagggctgacgtttgacatctttgtgtattcttacccacaggtgatcaccccagtgaggacgggccatggctatgtgtacgagtacccatccagataccaaaaggatgtctacgatgtccctccttcccacagcactcaaggggtaggcaatgggaacatcaccaggggagctggtgtagggggcagcagctctttaggaacgtacaggagaagagggacatcagccacaaccttaccttgtggaggttgcctgtccagaggccatttcagtcggtgttgcttacattgtatttcttaggtttgccttatcagaaagtctagtcttttatctgagaaatttctcatctgctttatcggtttgtcattttatttctggaagtgtgtaatttaaatgatctaaattatagagcagatagttcacgtaagattgttttcatagttaacctaaatcaaagaatccaagagtcataaagaaaacatccagaagcccctgatgacatgaaacactactaacgaccaagtctatgtatgacctgatgaatgaatccttacagaaacaatagcaagggacttgaacagcagattccattgcattctgggtaacttgagtgtttcttttcaggtatatgacatccctccttcctcagtaaaaggccctgtgttttcagttccagtgggagagataaaacctcaaggggtatatgacattccccccacccaaggggtaagtgaactggaaaaacacagtatgtggatgagtacctcaatgtgtggtggggggggggagtggaatgtgtcatagtttattgggataaaacaagaatggcagttctaaaaggggaaaggagagaaagaagaaagagaaagagggaaggaagcaaaggagagaagaaagccattattattacaaattttgagtccccgaaaatatgaagacatcaatcatgagagtccattggaagaggagatagtatgttcagtttggcagtatctaacacatcacatatttctagaagggtctacagcttcctttgtctctacataagaagtagctcatttgatttttctgtcatcttctgggcctgcttgcactgcaagtgcagttagctttgctgaacagataggggactgtgcctttgaatacaaagaagacccaggcagcttcacacacacacacaggcagcctgatgaccaagaatggaacacaggtccctctgcccagtgtatcaatgtcttctgtctctcagcatagatcagtttgtgtaggacagtcagtgaatggttagaaacatgagactgcaacccagtgatgagcaatttagctaggagggagggctctatacccaagctagcaacaagaatggttaagaatgctcaggtaataggacaaaggcatacatcctctaaggagtatgctgcatgctgggaaacatctgaggtagtaaatgatgagaggagaggaagaagatggaacgaacagtgctgtgaactctggaccacgctattcactttctgcctccatcaaagtctcaactgaacaaataaaatggctttttacttacgtttttaggtctatgccattccaccatcggcttgccgagatgaggcagggctcagggaaaaggaatatgatttccctcctccaatgaagcaagatggaaaaccagacaccagacctgagggggtttatgacatccctccaaccagcaccaagacagcaggcaaggaccttcacatcaaattcccctgtgatgctccaggaggtgtcgaaccaatggcacgaagacaccagagcttttccctgcaccatgcaccctctcagctgggacagtctggggacactcagagtgatgcctatgatgtcccccggggagttcagtttctggaggtaccaacagaaaccagtgaaaaggcaaatccggaggaaagagacggtgtctacgatgtccctctgcacaacccagcagatgccaaaggctctcgggacgtggtagatgggatcaacagactgtctttctccagcactggcagtaccaggagtaacatgtccacctcttccacctcctcaaaggagtcttcactgtcagcctccccgtctcaagacaaaaggctccgactggacccagacacagccatagagaagctctatcggctccagcagaccctggagatgggtgtgtgcagcctcatgtcactggtcaccacagactggaggtgctacggatacatggaaaggcacatcaatgagatccgcaccgcggtggacaaagtagagctgttcttacgagaatacctccattttgccaagggagctttagccaatgcctcctgcctcccagaactggtcctccacaacaaaatgaagcgggaactccaaagagtagaagattcccaccagattctaagccaaaccagccatgacttgaatgaatgcagctggtccctgaatattttagctatcaataagccccaaaataagtgtgatgacctagaccggtttgtgatggtcgccaagacagtgccagacgacgccaaacaactgaccaccaccatcagcacctacgcggagaccctctttagagcagatcctgccaattcccatctgaagaatgggcccaacagcatcatgaactcaagcgagtacacacatccgggctcccagatgcagccactgcatcctggtgactacaaagcccaggtccacagtaagccgttgcctcctagtctaagcaaggaccagccaccagactgcggtagcagtgacggttctgagcggagttggatggatgattatgattatgttcacctacaggtaagacctataaaccacccagactcggggctgatgcccgtaaggctgtgagctggaccgataggaggctgatgtccataaggctgtgagctggaccgatagcaaaacatgttaatctaactgttgtgaaaactgagggtgaggttgtccaaaaaaatgtacagccactttgtctaacttccctggaccttaattttattttgagaattaatttagctcacatggttgtatgacatctcattgatacacctcaggaaagctggaggagactcatcaatgttgttgactggtgagtccatcagccatagaatcacttctccctcggcttgtgtttttatggcacaggttcatggaacagctcatcataacagaaataagtttaaatatatatcactgttaattttttagaaattattggaaatatatgtacatagagagtttctaaggtactctttcagcctacagtgtgtgcatatgtgtatgtgtgtctgtgtgtctgtgtatgtgtgtatgtttagctgcttacaaagacacagagctccatcagatccagaggaccctgtgatcccttgccaagtggccaacagcttgacctacttatgttaaaatccacaaactgcttcctatgagtataaactgtgctagctcccaaatggacctggaaccctgaaggcttccctgtctgctttgaagaattccaacactctaccataatccatgcctttgtgtttggcttagtgctttaggcggccattcttttccattggactgagagccatgagttaggctgaaaacgattaaaataccagcagcccccagacgcaagagagtagaaaggatcaactgaaccacatctcatgctgaggattggccgaggttagaggaaagcatttaacattccactggtcttctgatgctgtagactggagaatactaaggatgggtagagagatgcagaatagtcaaaggaatcagaagtgaactatgcacccattttttttaacctttgtttggaagcacatggttcacatccaatctattttaaaagagccatggaaaaagaatgcttgggaatcttcagaagctcttcaactggagctagcagtgaccgtggtggcccacacggacacaggctttactcttcagcctatctccatggcaattccagaagtcgctaatctctggtttacaatgtctaactggacatgagggaagtggccagtggataataaaggtctgagtatacttgtcagtgaaactgtccccataagtgtctcacagcaaggaggtaatactgtctttgttttgaacacaccagggcaaggaggagtttgagcgacagcagaaggagctcttggaaaaggagaacatcatgaagcagagtaaggcgcagctggagcatcaccaggtaggtttgaacacagcagacagcacaccgtttggtagggaacggagagctcccaaagcctggggtcctcccggcacactggcaggaagaaggaagtcccaggcatgtaataggacaagagaacaaagtgaaggtgtgtggcctatgactacagctgagtgtgcctggattgcatccaaatggcagtgtttgttcagactgtgcctgcacatctatcacccgttaggagtacttggtttaaagctttcagtctcaagacacaagacccaagtcaggcaagcccaagctaactggttttccattgaggccaaataagggaattccagggaatgagatgcaaccaaaaccaaagaaagcaaggactgtattcttgatgttctcttccagtatctgccttcttctctactctccaacattttctccaatcacttcactcggttcacatataactttgactcataaatggccactcaaagcccttcctatagggctttgtggtattctgtaatgctttgagataagttttcacaatgcagtccaggctggtttcaaagttggtattctcctgcctcaaccttttgactattggccttgcaggtgtgtgcattgagcccaacttcaaaacctctgtagatgtcacttcatctaggattccttagataatggtcaactcccttttgtgcttatcaaactcctaagagagtttgagtctaactctcccctagaccccacccctctccctgtcttttgtatggtccagtctaagggtcagagggaaggagccaatgtctatcagacatatataagtccatttaccaagagttctgagcagggggtgttcactcaaaggtttagtttgtatagcaggtaaggctaggtattgtgaagccaaggatacgaaaacaaagagaaatggactaaagatttatatgcactttaagatgaaatgaaatggcatatcacaacatgaagtgacaagatgtctctagcaaatcagagttttccagccaacagctgtgtagacttgaacatcactgtaatgggccagttccctctcgataaaatggaaaagtactaccctctacagacacatgatttgaaatcaaattcataattatcaaataatattaagacaccaccctgtatctgctatgcttatattggcagtcggcccaataggacagcagagtttgggaaagctagcggacactaaggtaattcctaggaagcaagtagtttccatggaatagaaaatcgactatgcacttcttagcaaggaagcaagatgagggtgtccctgagctgactcggctctgagtcaggatgaaagattaactgactcccaaaatcagtattcttagtaacatagctagaaattatcatttctattcgaaagaacagtccagttagggatgctaatgatagcatcaagaaatctggtcctaggactgttgagatggttctgtgtaagggcacttattgccaccctgatgaccggagttggagtcttagaaaccacacaggagaagagaaccagcacccatgaagagtcctctgacctacacatgcatgctataaaatacggcaaattagaaatgctgagatttctttgttgtgtcattttccctacgccatttctaagagttctcggcagtaacagaccacaatgtgtccatcttaacagtgcaaataggagagagaatcttcatgaactttccatcttgaagaaaggccttacccaggaagtaacaaacagaaaggtcactacatctgcttttcccttgctgcctcccaacattattttaaaaaaaattaaatagagcctacaactcaccaaacaccggtacaaacactttgcgaataataatgataatattcactttgtgaataatagtattttattgagccctcataatggccttagaaggtaaggctgttgccttccagttagagtgcaaaaaaagacaaatggtgtcataacagaagatctatgctggaggatcccctagggatcctcttcccagtgtccacgttgcacaatttaggaagcaaggcatcctggataaggtctcacagctcctaggtacctggcatctactaaagatgaagctgatatcttttgaccccacacccatatttctttccctttacaatgtatgccttgcccttaatgaaacctgttctcttccttttagctgagtcagttccagctgttggaacaagagatcaccaagcctgtggagaatgacatctctaaatggaagccctctcagagcctcccaaccaccaacaacagtgtgggtgctcaggataggcagttgctttgcttctactatgaccagtgcgagacccatttcatttccctactcaacgccatcgacgccctcttcagctgcgtcagctcagcccaacccccacggatctttgtggcgcacagcaagtttgtcattcttagtgcgcacaaactggtgttcattggagacactctgacaaggcaggtggctgcccaggacattcgcaacaaagtcaggaactccagcaaccagctctgcgaacagctcaagacgatagtgatggcgaccaaaatggccgccctccactaccccagtaccaccgnnnnnnnnnnnnnnnnnnnncgccctccactaccccaggaccaccgccttgcaggaaatggtgcaccaggtgacagacctgtccagaaatgctcagctgtttaagcgttccttgctggagatggccaccttttgagaagacaaagaagtggaaggaactgggtgaataattactaaggaaaactggaaatactatctagtttttgtaaatgctatctatttttgtagatattttatatgaaattgaaatatttcgatgtttttgtgagttagtcgattttcatcaattcagggagctgaagcttggatttattttgtttcccctgtgtggttctgatataaacatataagtatctaagacataagttgtacagaactgtgtccacgtttgtgtatgcctacatatccatatttgtttatctgtgtgtctgatacagcccattaaaaacatgaattgagaagcaccttagtgagcaccttctaatgctgcattgtttgggttttgtagaaaattataccacttagttgtaatattgctcttcatgtagtagtagtcgtctgagcccagcacacccaactttcttgtctgaaacctctttcaaacttgacttgtctttaacacggtggtaaatctgaccaacttctggttgaaggggggcagggaaagaaagaaagattcaaaaaatatattaacctaaggtttcaggtgctagagagaggcaaaacatgtgtgctgtactaagaggccatgtctacagtagttattgtgttatttcaattctgaaaggaactacaataaagagagaacacttgtttccctggggctacatttgtgagtgattcagtcatggttttctgaaggatgtttttagagttgaatttttttttaaaaaaaattgcaacaggaattcatgaagatacatcagaactgtgattgtgggcaaaaagaagggctgtttccaacaggcagtagttaaatcaagacctctctaccctcattctctaatggaaatggccagttccttagtcactgaactgtggaaccaccgggccctgtcctgctctcgcattgcttgatggatcctacaccagtctaaaaacttacataagcagaccaacactcaaaacagctgccaagagctgaccttcacgtcccactgtggctatggaccttgtggatgtcagctagtcacagccatgatcgtgtggtctgtcccttcacaccggctgtgtggatacagcccaggcaccagattcatcgtgggcagataaactacttccctcttcctttatgaccaactcaagaaatatagtagtctctgatctatttcattccagcctacttggaaatgtgtttttatttgttatggatgtcttgactgagttaatgttatttgttttaaacaaccaaattacaaaggcaaggaggggcttaagaaggacatgtgatctcaatgtgatttttttttaataaatggaagatatcaaaggaaaggtgcttttcaaaacaaactataattgtaattctcaaagttctacatcgccagaagatgaacagctgagctattggagagcaattcactgtgtctggcgtgtggaagaagagggtcctgaagcatcagtaccattgcaggaagtcaggaagggtatgcttgtagatcttactacacaatgtgtatatgttatgtgatggctgccttgtcctaacctgattgatgacattccacattgtaaaaaccaaactattcaatttctactgtttattgccatcttgtatatttaagccattaaatgtttggatatttctctttatagccactgggtttcttttccttgtgtctctcttatcacagaattaaatattgacccatctgagtataaaaagtgaaattatgatttttttaatgtgtgctatagatctgattgttttttaaggaatagtatgtgtaggctaccccagtaccttggtattgaagaaaattctagagcatgtggatggcatctaactaagtatctgaaattgtttttgtttttgtttttcagtatcaaatgcccacagacaggagttaactacatagttagtcatagctggcctggaactctctatgtagaccagactggcagaaattggcctgtctctgcctccaggttgattgtaataaagatgtgaaccaccacatctggctacagcacccacacatttaatgtgggtaggacagtttctatttctactctgtggctatggctattcaagtagagtggacttttttcaattactctggaataggcataaagaaatggttcaacacaaattatattagaagaaaaagattcctaaccatgagaatttactatgggccatactgtgggccatactccttttagtgtccctccctttaattcagataaccctctgcgatttagaaagcactttgagtgctggagagatggctcagtggttaagagcacggactgctcttccagagaacctgagttcaattcccagcagccacattggtggctcacaaccatctataatgagatctgaagatagctagagtgtacccatatacataaaaatattgttattgccatgaagtatcttagaagcaacagaggagagatttcttctgacttgcactttagaggggacagtctgtccatcctggaaggtctggatattgactttgttcctggcagtgggagcttgcagcatggcttgctagcatcttgttagatcaagaagcagatagagggaggtctcagccaggctgcaagtggggctagtttaatactcatgaggcccacatccactctaggatctctgactatagagcatccataacctaccaaaataatgatgatagctgagactacaatgttcaaacaagtgcacttgtgggtgagatttcaaagtcaaaccacaacacctatgtcattctatatacataaaggaggtaaattatttttgacaaaaataagatatgccagtggatgaaaaagaatgtcttttgggtggtagactgggcaggaatgtgctaaatcaaaaaaaaaattctatgaaggaaaataaatatttactttatatcatgaacaaaaattaaaaattaacttacatggaccagagacttaaaactctcaaatatctagggaaaaaaaaatgtaggagaaaaatcttatgatcttaagcaggttatagtttcataaatagttaaaaataattcataaacatcatcaaacttaaaaatttttacttttgagaccagagcaaggactcaacagttaagatcactgactgcttttccagaggacaggggttcggttcccagcatccacattgtggtttacaactgtctataactgcagttccagaggatctaccaccctcctttgacctctgtatgtactgtttactgcactttcttggtgcacagacatacatgcaggaaaaaaacactcatacacataaaacagaaataaataaatatttttaatgttactcttctaaagagattgttaaggaggcaaaattaatttctggacatgacatggtcttgttcttatgagctcactatagctatgttggtctacacaagagcaaggtaagattagatggccatcacatgaggcaatgctaattggacctgatgaaccaaacaaacaaaataggagatgacatgaagtgtgtagtgaggcttgttagaaatacctgtgacagggaagttgggtatgatcaaaatacattgttctcaaataataaataaaagatgttctgcttcaaagaaagattgatcaactggctggctggttggttggttggttggttggttggttggttggttgaactggttgtttgactggttggttggctggctggttgactgctttggtcggttggttggttggttggttggttgattggttggggccagcaacatggttcagtaggtgaaagctcttgccccataaacctggtgatctgagttttgtcaacagaccccacagtaaaaggagaggactgagtcctaaaaactgacccctgacctccacacatgaatctacactttctcacactcacatatacactcacgcattcacatcacacacgcccacgaggataataagtgaatttaaaaaaaaaaaaagtcaagcctcattgcagtcaaagagcttgtgctacagacagcagccgggggttgcatggggtgaagggacaagtattttaatgaggcaagaattccaggaagaaacttcaaaagataagacataagaatgggaaataattaaactaaataaaaaccacaccaagtgcaatgatgggagagacaaacagctgcaaaacctggtgaggaaaggaagaaaatatcaccctcataagccctgggaagaacgtgaactggcagaaatgcactggaaaatggactgccaatcaaaaccaaagctttgcctgctgcattatctattaatcctcttctaacttaaccaagagaaattaaatgcatatatacaaagacttatgtaataacttattacagttctatacatagcaaaaaaaaaaaaaaaaagcaacaagcaaaggtccatctttgtgaaggcaccaagctattcccatccaccaacacagaggagcaggcctgtcttgggttggctgtattgaccatgacccaggctagagccatctgagaagagaaaaatcacagttgagaaaatcctccataagattgaactgaagccaatactatgggcccttttcttagtgattgatacaggaagacctagagcattgtaggtaataccacccctgggcagatggttctggagtgtgtaagaaagcaggctgagcaagctatgatgagaacggcagacagcacttctccatggcttctgcttcagttcccgcctccaggttcctgccttggattcctgccctgactgcccttcatgatggattacaactataagcttcaaagaaccctttcctcaccaagttagttttgatcatagtgctttatcaaacacacacacacacacacacacacacacacacacacacactaatagccaaaataaaaactcaacatggacaaatttcaaaatcactatgatgaaaaaagaccaaatgaccaaaaactccatagtaagtgctatagttccaggcctacaagattttagagactgaacacaccagactatgttgtattgcatgcctataacaccaacacataggagatgaacacaggagtttgtagtcagcctcaactggagttggatttgaagaaattacaagctgatatataacgacagaataccaatagctgcctggggagggaagggtgggaggtactgatttgcccaggagaaggcaaatgatgagaaatgttcattctctagatgttatggatggtttcacacatgtgaagactcatcaaataatacactactgtatgtacaattcagccttcattgacaatctcttcttcagttagtaatcacagtacttccaataaagaatgactggaagtgtagcactccacggttgctgcttctggggggggggtgcaggtagagaaggactcagttttctttaggggacaggccttggggaatttgcccatgttcccgtaagtacatggacaattcagattagacttgttttgtctgtctgtctgtctgtgtttgaggggtgggtcacaaaggtcatggagtagacatggaagcaatgagaagtgatgggaaagttccaataagaatattattttggaaaaaaaaagagaatcttagattacatttttttttaaaaaaaagcaaggctatttaaagacaccccgtttcagtgaaaattcccagataacagcaaaggaatgggaaggaatatgcaatgcacattctagctatagataagaaaagccaagacagctgtgttataacaagtagaattcagcacctagccaaaaggcacatgtcgtgatgtgcatcagcatacaaaaaaggcaaagccttcgtaaatatccacaaagccaatcacaaaaacctcaaaacacgagaagcaaaaattaacagcgctgaatgcaaaacgtgcaactgtgtgatggtaagtggagatctgagcatttctctatcagtaacaaatagaataagtagacaaaaaagtcagtaataattgataagaacagaactcgagcatgccactagaggggatataaaacggcacggccactacagaagatgcttgacatacaacctagcagttctaacgctaaatacttatgagatgctaaaacagacctctaattattttgtcatttttaaaaatgttatgtgtagggcgtttggcctgcatgtgtgtgtgtgtaccatgtggatgccaggggcccaaggaggcgaggggagggcatctgattccctgtaattgaagttgccaatggttctgagactcctcgtggattctgggaactgaagccaagtcctctggaagagcagccagtgctcttaactactgaaccctctctccagctttgctttgctttgctttgctctgctctgctcttctcttctcttctcttctcttctcttctcttctcttctcttctcttctcttctcttctcttctcctctcctctcctctcctctcttctcttctcttcttttctttttaaattataaaaaattttaaaacaattgctctgggaccagtgagatagtccatcaggtaaaaatgcttgttgccaaacccaacaacctgaatttgatcccagaccccacatgggggaaggggaggatcaacttctgtaagttgtggcatgtgtgaatgtgtgtacgtacaacacacaaaatcggtaaatgtaaaaaaaaaaaaaaaagtcttattaacttctttttaaattataatcatatcaaagtggaaacagcccagatgtcttcaacaggtgactgcataaataaactgtggtgcagtacaattcagaaataaaaatctgtgaatctgtgaactaattgtttaagtattatctatacataacagtgttattggattaacctgagggaaaaaaatcccaaaccaaaatcatgcacttgcaattaatgacaaaagaggccatgtgtttgaagaagagggaggatctggagggaggaaagggaccagagaaacatgctaattaaattacaatctcaaaaataaaaagaaatttaaaagaagaaatgacagatgcctgtaaaccacagcctgaagcattctgggaggctggatacggagaatagattggctgtgagattggccaattgctattacgtgaagtgagcccgctgttctctatcctggatctgaaagagatgtcccccagaggctgcgtaacaaattactctaagaccgtgcatgaagctgcaccaggttccctgtaaatgtggtgtgtgttccatggcatgcatgtggtgttgtgtgtgatgaatgtctataacatacatctcaaggtctactttccagtacatgtatatcctcccataattcctccaacccctggctaccctggaaagctctgccgcccccgcaccacccccccacaaaaccctgccttctgctgagtcctgaactgctcctccactagcagaagcggccaccctcttgtctttcccaataaatctgttgtctgaggtttgttgtacggtgtgatttttgtggtactccttggctcctgaatgccagaatacccttcagagctgtaacacttagaggaaggaaggttggttagttaaatattatatacatatacatatatatatatgtgtgtgtgtgtgtgtacatacatacatacatatatgtatatatatatacccacatatatacatacacacacactcacccatatacatatattacaacctcgaaaggattttagtgcatagaggtaaaaacacgggggataaaatgggacaactgaaaaatcagcaaatactcatacctacgttgcaaaaaattcctttgcaatatgaaggatagaaaaaaaaaatcacttcagagcctcagaacatgatttaagtcatctcccaaactactataattaagaaaaactgagctaacagagagagtatcttatgttatcttctcacagactgttttccagggagaccagagtcagcaaagaatgccgttgaatgaaaacactcccttaatttctactggcctgcctacccagcagcccgggtacaggcagacaccagacccctgcccacatcctagcggccatccttcagaaggcactttatgagtcgcttttatgatctagctgcctaaaaggtgtgtgtggatggggcaggattgagaacatccaagctctttgggaattcaatccctatgcaaaatgacatcgggtggccaatgggacactttaggattggttagaagggcacagagagttagctcagagtcttgcacaaggttgaagtatcaaagcaaaggactgggggaggggagcaggggtgtttttaggatgaaacaaacaaaaaaaaaaaaaagtgaaacctgtctagacacccagtccacacaggcaagggcctagggtttgacaaaagagggtttgggtttagtgctagtcctgtttgcaaaaggcaaccaacaaggaagggaacaaaagatctacgagaaacactagggcttgtagagacctgtacctagaaacacaagctagaaacaaagtagcatgcactctgccgctggcgaccgaggtaaacctgggggtgttggcccatttcagacagcgcaccctgttgggaaggggctcccaagagttccttatcctccaggggcagagaactagcacccctttgcttctgtaacaattctttggtgcattttgctcatctaaagtcgtgttctctgagagccctctcggggatactatatatggtgccccctcgtggtccagtgtggaaaactagagaggcatctcagagatgctgcacacagggcccccttgtggtctggtgagaaaatagagaagctgaggtggggtgggttataaccaattcttccaccaaccatcctgtgaaatagcgatgctaacgaacgcttgtctcagtgctagaaaaacaaggtttggggataatttgaaatgcccctgaaacacataaaacagtattttatttacacacacacacacacacacacacacacatacacacacacacacacacacacacacacacacacacatatatatatatatatatatatatatataatgatgtatatatcatatctaaggcatcttggaccatgagtttatctctgccttctgatgtggttcacacaggaactcattccatgtttgttgactggctaacaaatgaatgatctcacctctgtatgtgtctccccccaccccctgaacccctacacacacacacacacacacacacacacacacacacacacacacattggaagagactttttgaaaatcaaataggactttgcagaatctttaaatatatttattttcttttatttctgtgtatacatctgtgtcacacaatccagaatcaagagtctgaccccctggaattagaattacaggtgttcgtgagtcacccagcatgagtgccaggaagaagatccttaaatataataaataaaaacaaaaatctcttcaaagggcaggatgcccataagctattgctgtattgtttccctttgtggaagcacatttccatgacgtgttagttatttttgcatcaagcagaaacaacttgagagaagaaagcttagttgaagaccatggtttcagagagctgcaatccatcacactaaagacggtatggagagaagactatggcagacgaccaggaaatagaatagacccaagggacaaggtcaaaggctcgctctgacagccaggctctgtagccttccaaacagggaccgtgctgctactgagcttccaagagatgagtctgcagaggactttcagactgacagctgacagcagagatgcctctcctgtagctggataactgtagtctccatgtggtgtgtgcgagagctaaagttaacctgtaagccccaaggacgggtcacctcttgaacaagggtggttgcctcaccggcacaggacgtgcttggtcacatatatgcaggaggcacatacctcctagtatgtcagggtgtatgcttgcccctgattgaatgaagatgggatgtccctaccttgtgagttctgccttgatgagcacccga

SEQ ID NO: 396 - DNA, 2886 bp, Mus musculus
cttagatgcaaggaggggatctgcagagagagaagcataaggacacagagggacgagttcccatccctgcctgcctacctagaagagatcagggtgtccagggtcacaagatggtctgtccactgcggttctgcgttcaggctagtgaagtgtgagtctccagcaccagacgctggcggagaagcacggcagagttgttcatggggagatatgacaaggaggaaacaggccagcagactgcagccctgggactgtcctggagatccagagtgccaacgctcctcaagagaaaatgtgggcgaggaatcttatggcaagggccttgtatgacaacgtccctgagtgtgctgaggagctggccttccgcaagggagacatcttaactgtcatagagcagaacacaggagggcttgagggatggtggctgtgttccctccacggtcgccaaggcattgtcccagggaaccgggtgaagcttctgattggtccagtgcaagagacccccggtcatgagcagcctactcctggacctatgcatcagacctttggccaacagaaactctatcaagtgccaaattcccaggcagcatctcgggataccatctaccaagtgccaccctcctaccagaatcagggaatttaccaagtacccactggccatggcactccagaacaagatgtatatcaagtaccaccatcagttcagaggaacattggcggcactaatggaccccttctaagcaaaaaggtgatcaccccagtgaggacgggccatggctatgtgtacgagtacccatccagataccaaaaggatgtctacgatgtccctccttcccacagcactcaaggggtatatgacatccctccttcctcagtaaaaggccctgtgttttcagttccagtgggagagataaaacctcaaggggtatatgacattccccccacccaaggggtctatgccattccaccatcggcttgccgagatgaggcagggctcagggaaaaggaatatgatttccctcctccaatgaagcaagatggaaaaccagacaccagacctgagggggtttatgacatccctccaaccagcaccaagacagcaggcaaggaccttcacatcaaattcccctgtgatgctccaggaggtgtcgaaccaatggcacgaagacaccagagcttttccctgcaccatgcaccctctcagctgggacagtctggggacactcagagtgatgcctatgatgtcccccggggagttcagtttctggaggtaccaacagaaaccagtgaaaaggcaaatccggaggaaagagacggtgtctacgatgtccctctgcacaacccagcagatgccaaaggctctcgggacgtggtagatgggatcaacagactgtctttctccagcactggcagtaccaggagtaacatgtccacctcttccacctcctcaaaggagtcttcactgtcagcctccccgtctcaagacaaaaggctccgactggacccagacacagccatagagaagctctatcggctccagcagaccctggagatgggtgtgtgcagcctcatgtcactggtcaccacagactggaggtgctacggatacatggaaaggcacatcaatgagatccgcaccgcggtggacaaagtagagctgttcttacgagaatacctccattttgccaagggagctttagccaatgcctcctgcctcccagaactggtcctccacaacaaaatgaagcgggaactccaaagagtagaagattcccaccagattctaagccaaaccagccatgacttgaatgaatgcagctggtccctgaatattttagctatcaataagccccaaaataagtgtgatgacctagaccggtttgtgatggtcgccaagacagtgccagacgacgccaaacaactgaccaccaccatcagcacctacgcggagaccctctttagagcagatcctgccaattcccatctgaagaatgggcccaacagcatcatgaactcaagcgagtacacacatccgggctcccagatgcagccactgcatcctggtgactacaaagcccaggtccacagtaagccgttgcctcctagtctaagcaaggaccagccaccagactgcggtagcagtgacggttctgagcggagttggatggatgattatgattatgttcacctacagggcaaggaggagtttgagcgacagcagaaggagctcttggaaaaggagaacatcatgaagcagagtaaggcgcagctggagcatcaccagctgagtcagttccagctgttggaacaagagatcaccaagcctgtggagaatgacatctctaaatggaagccctctcagagcctcccaaccaccaacaacagtgtgggtgctcaggataggcagttgctttgcttctactatgaccagtgcgagacccatttcatttccctactcaacgccatcgacgccctcttcagctgcgtcagctcagcccaacccccacggatctttgtggcgcacagcaagtttgtcattcttagtgcgcacaaactggtgttcattggagacactctgacaaggcaggtggctgcccaggacattcgcaacaaagtcaggaactccagcaaccagctctgcgaacagctcaagacgatagtgatggcgaccaaaatggccgccctccactaccccagtaccaccgccttgcaggaaatggtgcaccaggtgacagacctgtccagaaatgctcagctgtttaagcgttccttgctggagatggccaccttttgagaagacaaagaagtggaaggaactgggtgaataattactaaggaaaactggaaatactatctagtttttgtaaatgctatctatttttgtag

SEQ ID NO: 397 - protein, 851 aa, Mus musculus
QGGNRPADCSPGTVLEIQSANAPQEKMWARNLMARALYDNVPECAEELAFRKGDILTVIEQNTGGLEGWWLCSLHGRQGIVPGNRVKLLIGPVQETPGHEQPTPGPMHQTFGQQKLYQVPNSQAASRDTIYQVPPSYQNQGIYQVPTGHGTPEQDVYQVPPSVQRNIGGTNGPLLSKKVITPVRTGHGYVYEYPSRYQKDVYDVPPSHSTQGVYDIPPSSVKGPVFSVPVGEIKPQGVYDIPPTQGVYAIPPSACRDEAGLREKEYDFPPPMKQDGKPDWEGVYDIPPTSTKTAGKDLHIKFPCDAPGGVEPMARRHQSFSLHHAPSQLGQSGDTQSDAYDVPRGVQFLEVPTETSEKANPEERDGVYDVPLHNPADAKGSRDVVDGINRLSFSSTGSTRSNMSTSSTSSKESSLSDSQDKRLRLDPDTAIEKLYRLQQTLEMGVCSLMSLVTTDWRCYGYMERHINEIRTAVDKVELFLREYLHFAKGANASCLPELVLHNKMKRELQRVEDSHQILSQTSHDLNECSWSLNILAINKPQNKCDDLDRFVMVAKTVPDDAKQLTTTISTYAETLFRADPANSHLKNGPNSIMNSSEYTHPGSQMQPLHPGDYKAQVHSKPLPPSLSKDQPPDCGSSDGSSWMDDYDYVHLQGKEEFERQQKELLEKENIMKQSKAQLEHHQLSQFQLLEQEITKPVENDISKWKPSQSLPTTNNSVGAQDRQLLCFYYDQCETHFISLLNAIDALFSCVSSAQPPRIFVAHSKFVILSAHKLVFIGDTLTRQVAAQDIRNKVRNSSNQLCEQLKTIVMATKMAALHYPSTTALQEMVHQVTDLSRNAQLFKRSLLEMATF

SEQ ID NO: 398 - DNA, 228835 bp, Homo sapiens
tagaagctggaaaaaggcaaggaagcagattcttcccaacctaaagaggaggaacacagcctgccaaacaccccagctttagccctgttaaacctgtgttaaacttttaacctatagaactgtaatataacagatttgtgttgttttaagctgttaagtttgcagtaacttgttacagcagcaatagaaaactaatacattctgatggctaacactacatatgcatgggaaaatgtctaaaagaatgtattctccaatgtaacattggttttgtcatcttttcaaattatttcttttttctggtttcaataacgactgtgtgttatttgtgtaataaagaaatgatggaaatgttaaagaataagtaatatgtactaaataaagttagatgacctctaaggctccacctaactgtggcattatctgagcaatccagctggtggcttaattgccaatccatatcctgtttcttcttggatgccatagacaggtcttaactcctccacaaaggaaccagaaagagcaatttcaaatcactcctggtgtctttattttccatatctcagatacaaatatgtattcacctgtatatgatatcagtgtgtttctacatttttatgtgtccttttatttattttttttacaaattataatcagatataattatagggtgcacagtgatgttatggtgtatgtatacaacgaggaatgttggaatcaagctaattaacatatccatccccttaaatacttatcatttattcctcttgtctaactttctacccctttaccaccacctccccattccctgacctccagcctctggtatttttacattatttggagcaaaaatcattttaccatcattttgctctctattagttaaattattctagattccacatatgagtgagagcaggcagtatttgtctttctgtgcctggcttatttcacttagcataatgtcttccatatccatccctgttgttgcaaattataggatttctttctttttaaggctaaattgtattccattgtgtgtatataccacattttctttatccattcgttcactgatggacacaggaaaatttcctattttagctattataaacagtgctgcagtaaacatgggagtacagatatctcttcaacataatttcaagtccttaggatatatatatcccgaagtggaactgcggcatctatatggaatttttaaaagatttcattggccgggcgtgatggctcaagcctgtagtcccagcactttgggaagccaagccgggtggatcacgaggtcaggagttcaagaccatcctggctaatatggtgaaaccccatctctactaaaaaatacaaaaaaattagccgggcatggtggcttgcacctgtaatcccagctactcgggagtctgaggcaggagaatcacttgaactgggaggcggaggttgcagtgagcagagatcatgccactgcactccagcctggcaacagagcaagattctgcaagattctgtctcaaaaaaaaaaaaaagaaagaaaaaaaaaaaaagaaaagatttcattggctggtaagtaatgatacataatacatacatatttggtaaataacaaatacaacaaatatgtgttgtcgtgtagtcttgaggtcattcagatgatgtatgttttgtaaagtcttcgtgggttctggtatggtgcattatgacagatctcaaaattgtgttgctagagctcaagattaaaaaggacattttagagagtttgtggccaaaacaaggcttgcctatcattacagtctcccagcagtctcatctaaagtctaaaaaagctcattcacaatccactcagtgtcaacaggtgagggctactagctgatactagagttatcaataccgatgataggcacagcaaatggaaccgtgcagctcattagaagatacttacgaaccacttaaacttaagaacttggctttagtgagttaaaaatgcagagtatgccctgcaaaaccagtttccacttgagcaagaatttgttagttcttatcacagccaaccatcttccggaatttgaatggccctaaacctaatttggcgttttggacaggacaataggtacttgcgtgacatggttggggaataacgcacagctgtttcccatttaggtcactttgatctatgactgagccaaatacctgggcctgtccccagccaaactacaccccagaggaatgaaggaaatagagcagaattttaggagcagggatctcagtacttttttaatcaagtttttattcatcaaatatttgttggatgctgtagaagtgttctcaaacattcatgtccgtaagatttgcctaggacagtcccacgaccaagacaaacagaatttggcagttgagtcacagagcctgggaatctacatttaaccagcctcataggtgattctgataagagacctccatggactactttgtaaaatgtttagtttggtctccagaatgaataaacaacagttccctgccctctggagcctcaaagtccagggaatggagatacactattgtgacattatgtgattaatagagggcctggtgacagtgaaggaggagaggaagactctgtccaggggataccaaggggttgccagaaagacaaggagaaagggcattctaggcaggggaacagcctttacatgccataaccatgagaaattatggaataggaggggaccgagagcagcctcaatgtttaataaattagcagcctcaggtatttctttatagcaacacaaatggactgagacaaatggaagtatgggacgagaaggctggcccctggtttaaatgggatgaacttatccagagaaagcaggagcatgaacatgtgtggggcccaagggtgaatcacagtttgatgtgatgggaaggtgaagggcactgcagaggtggacaaggcaggagagaatgtaaagagaagagtggactgccattcaccagcacagtcatttcaattctattttgtaggcaacaggaagttggcaaaagtctttaagcagaaagtgaacatgagaagatatgaagtttgtctatggaagtatctaatattttgaagatgttcattcaattaatatctcctgaggacctggtgtattggcccattcaggctgctataccaaataactaggactgagtaacttacaaacaacagaaagtgattgctcccagtagtggaggctggaagtctaagatcaaggcgccagcagattcagtgtctgctgaggtccctcttcctcatagatagtgccttccagctgggtctgcatgtggtgagaggagcaaaagactccttcaggcctcttttataaggggactaattccattcatcaggacactgtcctcatctcctaatcacctctcaaatgccccacttcctaataataacaccttaagaattaggttccaacatatgaattttgggggggacacaaaaatctgaactatagcacctaccgtgttcctaacagtgttctatagaggctagaagaggacctcacagcttggaattgttgtaacagtctgagcaattaacgtctaaactaagaaagtggcaagggacacacagagagggaactgaatgcgtcaacaagattggatttgagatttaatttaaaaagacaacaacacagaatatggtgactggttggattgaagatgcagtggggaaaagatctgcagtgttttggggcagagggactgagaatacggtaatgacatgggtaatgactgggagaacagacaggcaaaagacaatagtttggatgtttgtccctccaaatctcatgctgaaatttaacccccaatgttgaaagtggggctggattgaaggtgtttgggtcatgggtgcagacccttcattagtgcagattagattagtgtcttcccttgacagggtggtgagtgggtttttaatctattagttcccacaagagctggttgttaaaaagagcctggcacttccgccctttcttgcttcctctctcatcacctgatctctgcacatgcaagcttcccttcctcttccaacatgactggaagctccctgaggccctcctgtccctcccccaagcaatggcaccatgcgacttgtacagcccagcagaacaatgagccaaataaagctcttttctttataaatgaccagcctcaagtattcctttatagcaatgcaaatgaactaggacaaatggaagtgtgggaagagaaggtccctcttttaaatgggatgaacctacccatacagaaagcagaagagtgaaaatgtgtgatgcccaagggtgaatcaccgtagcagtaagtggtggagtgtactgaaccagaaagaggggaaccaaggcaagaggtgtcctccaaagaagtagagaggggtctgagaggaaagaattgctcaaccacttccaatgcagcagagaaaaagactttgtagtgtctaccggtttatcatccaggttcctgagggtgaccttagcaaagatgatttcagcggagagctggaggcatggaccagatgtcaggatggaaggaatgcagtgaggaaggaaggaatggaaagtgtggaagtggaggtatgaagtgtagacaaatttcttaggaaaactgagtatgaaagaaagaagagaggccgggcgcggtggctcacgcctgtaatcccagcactttgggaggccaaggtgggcggatcacctgaggtcgggagttcgagaccagcctgaccaacatggagaaaccccgtctctactaaaaaatacaaaaaattagccgggcatggtggcgcatgcctgtaatcccagcttcttgggaggctgaggcaggagaatcacttgaacccgggaggcggaggttgcggtgagccgagatcgcgccattgcactccagcctgggcgacaagaacaaaactctgtctcaaaaaaaaaagaaagaaagaaagaagagaaagaggcaaagaagaagatggaaccaaggaactgagttaggactgccaggaaaatatggacataggtgtttgtttataagaaaagttgtggtgaaaatagaggaagggtaagttggatttccagtttaaatttctattgtcttagagaaaaaatcattgtataaaaactaaagggaacaaacagggagtgctgcagttttaactactagggatcagtaaaaaatatttctcaatttagaaagtagttaacccacagtatggcactgtgaaatggaggctgctatgagagtcaggataagggaaacgcccaaggaaggagagaggtaaacagtcagtcattgtagagaaaaaagtggatgtaaataatcccagcacttggcatccctccccgtgtctggggtcattgtcaggggcagcttatgtatatatcaggggagggttgtgatttgactttttagctaggtgattgtgaaggcaaaaaggaacaatcccaaaaatcactttatcaaatggcaaatagatctttagtatttgatccaggaatctctacccagaggtaaatcagctggatgtgaatccacatttctatgtatttagaaaacaaatggacaagattcagataaactgaggagcctcacctgttcaaccatctaaagcagcaatgcagttttgttttttacattctcgtgaataagatgttgtttccaagttgctgtttcatgtgaaaccagaacggcagtttatacagttccctcagaaaccgaggatagtacagtatgatggtttcagtatcaggttctgtttgtgtgcacatgcaatgctcaagggcaagggtagtacacatgtgcacaactgcaaattggcagtggtgacatatatttatatgaatgcctgaaaatgtcttagtagaatgtacctcaaaccgatagcaaaggttctctgtgggcaaagcaagagagaaaattaaaactagggctgatgggcaaagacactttggagaacctcatctgcaatgttagttctttacaagataaatttattacttgtagattttaaaattttattttaaagttatagagaaattagcactaattaagttttaccaagtattttttgagaagtcaaagatggttattatgtagtggaagggtaggcaaacagggtgtaaaccatggagaaatacgtgtttgcaagatgcctaaatgcaatgaatgcttccaataagtcagaatctttacaatttggcatcacttctgtctttaaaagtgttcagtctttcttccttttgctcttccaggtgcccgtgttttctcaaacagctgttctatgactagaagaatggtttcatctttgccaatgttgtttgcctcctgctaatataaatttaaaatgatagctcttactatcattattaattgggtggtgatgcttgaagctgtaattcaaaggactgaagaatggacagagaatggggaacagtatggaagaaatggtgaaactgcagggatcttgaggcatcctgaaagagttcccatcatgagaccttaccccaggcataacaggaggcaacagctaggcttagagcttttagaacatgagaaaggtctagaagggataccacaggggacctgacagacagcaggagatgagaaggaaaattcttgagcagcagaagggcctcagttaagattattggggagaatttgcaaggaaacaagttgccttattaactttccccagtaagtctggatagctctggtgcatgacatgggtggaaaatggaagaacaagagcaaggaaatctacattatacacattgctgaaataggtcatggagttctggcaatgtaggagggctagagagcccaggacttggctgagggactgggagaatagacaggcaaaagacaaaggtgtcctgttaggggagagagaaaaggaggtttataagggcaagagagcagaagaggaaggtgaataaggctcattcttccatgccttccagactatcatctctcttaggggagaaactgattctcatttcttttttatttattttagcccatgttaaataatgcttttaagatcatgaattaactaatgaacagaaacagctatcttgctggcttatctcccactgagctacaggtttctggagggtgtcctgtggagcgaggtatcgagaatgcccaggaaagctcaggagacttcgcaggtatgcgatagttaatgaatgggaaaaaatgaacgggatctttttgagctctgatttcctcatctaaaaatgaaaaccacaagacaaactcccattcccaagaagggaggaggcatccattataattctagacaactttgttcttaaaatttgccagaccagcccttgagcattttcatttaaattcctcagtgggcagttgattccccatggctcatactgtcttccatcgtggaggggaatgagtcaagcaaatggaatcataaatagacacatgtgcatgcgtgcacacatgcacacacacatgtgcacacactttggccatagatttctcaacctttgagtcttctcaaattctccttacttttccttcccccatcctcatcctccactccatacaacagctgctccttggaccagacctccataacaaattcaaaacagttgcctggggtttggctactgcttcacaggtagttataaagcattttgtggtgcaagctaagattccagctaactgagatggcatgaaggagctaattaaagcagtcaagaagctggtttaaatgaagatgaaaatgtaagccctgtcctcaatggatagagtgattagaaattaaagttgtttgttttttgtcagaatcatctgtggtttgccaaaatgttgacatgcagcataacctgctactaatcaaaaagaaaataaaccaaagaagaagaagaaaatctaacactgtaagtaggaaaacagacatagaaaaccggcatctttgcaaatgggaaaaatatttaacttgtttttctaaaataagtctgatctgtttttggacaaagtctcagttcctgagtttgccttgaaggacatgctcgctcgctctctgttctgaaaaactcagcagtgggaggtccaggcagctggaagtgggaaatgaagccataggatgaagatgaaaaaacagagttcaggataataaggttgtcagtctcaagtattttatgtaaaaggagcccaagcttagcatttttaatatctctagagtgtaactgacttatgcagacaatttgatggcattaatattcaagtcatactacaaaattattaattatgttttctaaagtttgtacatttaaagttatactaattaaatgcctgatgaagaaaataattccttacctgatacggtataaggggaaaaacataaaaggacgttttgataaaacatgtactatccagacttctctacctccatcaatttattataaacactctgtattataaaataaaaacttcagagtagaataattctagctcaaatctggaacgatgtggatacatagcatgtactcaagaatggttttgtaaggagaaagaaagagaggaaagaagaataaaagcataccttgctgaatattgttaattgcacttaacaggtacaatatatgtatacaatatatacaatatatgatgattaatatcgatgttcttgtcattgatttcttcataagacccagtgtacatggcactgagctgagtgtttattgctttaagtgtggcacctttgtatgagcagaatattctttagcaagatttgaaccagctcaaacatttaaaaataaatgaatttcagagaagtcttacagaaaattaaaacaaaacaaaacaaaacaaacaacaacaacaacaacaaaagagatgccacaagagtgcaacatacatgagctgagtctgatgggtgggaccaagggcagccctttctttgtcttcatgatggagcaggaaggagttggagcagaaacatcaagcaccacaggatcatttggggaacatccattatcaaacctcctctctctctttcctctcaaccctctatgtccccaagtcgtttgctaggcatgagcaaggagtggaaaatgaggaagggtaggaaaatagcaaagatctcagctgataataatacaaagttgccacgaatgatcacggcaaacacttatattgcgcttactctatttgtgccaggcattcttggagtgctttacatgtactaattcacttaattctcacaacaatcctgtgactgttcccattttacagatgaggaggccgtggcacagaaaggccagaagtgtttaaagagcagagccataattcaaacccaggaggcttgtctcagagccacttgtctgctacttgaaagcacagaatgaagaagacaaagggtttgggctttcgaattcccttctacatacacagatctaggcttccataccacattgtaagtaggaaactctctgagcacctagcctctagcatggtgtctattccagtgtacaagctcaataagtacttgtcataggaaagaatgtttcatgtcaattaatagtggaaccctttgcaacatactgagtccataaaaccataaaatcccaattcagttggcttggaaatagcctaacttttgcttcagtgcggcctaggagggagcttatgccacttagaagaatacattttgacaaatttccttgcaatacgaatttaaagatcacctacctttctaaaaatagcaaagaggccagatgagaacaagctttcttacctgtccctaaactacaaagtgtcctcagcgaatcagaaagtatgacagagaaaaaaaagaagaagcacagagaggaaatgaaccaagacaacatcacctcacagcaaccggaaggaaaaacacacacatacatatgccactcacatccgacgtgtgtggttgctcagtagggaaatgcttacagctgcctctagaagcaagtccgctcgctgcatggagagggaaacatgagcatgcagcaggactagctgtcacctcccgcccgcctgcccagagagggccagagcgtcggggaggcaagatgatccaccagcggttccatcctacacttgggtgagttctcagccacttgctgtggcctgtgggagaggagggactcattcaggctcctacttcctgagttggtgccagacatctggtggtgtttccccactgtgaacactcctcaactggggcagggaggacctccacatgccccagaagaggaatgagtgactcccggtctccaagttgacctggaggtgctggttttagtgcaacattcaaaccagcatgatttctacttatgaaattgttctgggtagatgcttcctggtgtgtaagtacatggcccctcccctcttcctactgtcgtcagagagcttacctgacagcaactaagcttttatttttcctgaattatttcagtacttcaaagtgtgggccgtcacttattctttatggtggattagaatcatttacgtccttttcagcctctttggacatgagtcctgactggcgagaaatggtgactgaggattggattctgtgcgtgtcctatccctgtagtcattaggatcatctccaaggggctgaggacaagtgacagcacactgtgttctccctgtccatagtgagccgcccaagagctccacccttacttttctctatgtttattctttcacttagcccattcattcatttcttccttcattcattcattcaattgcctttcttccaccaagggacttgaggcaaattttttatcttgctgaaattttttcaaaatgaagaccatctgtaatcataaaggggacaatcgttctgaaagggttatacataattctaagctatgcagagatcggccaccaatcttttccctttgcttgtgttgagaagtgagagtaggcgctctagtcatttaaactcctgcatggggagtccctccttcccctgcccagaagctggtttcccacccagcatggggtgtgaagagcaattgtccatgacagaatactgggaatctgccaaatagttttcttctttgtttctgttttcttccaagcttggttactttcgaggacattcctggttctaagaatgcggaaagtggagttggtggaaaagaaaggatgtgaaatcagtgtttagctagcgctccaccatttcttgttaatcggttagtttatttaacagctatttagtggctgtcactttgtacgtcaccacttaaacaagatagctgggcacggtggtgtatgcctatagtcccggctatgcaggaggctaaggcgggaggattgctggagcccaggaggtcgaggctgcagtgagctatgactgcaccactgcactgcagcttgggtgacagagtgagatcctgtctcaagaagaagaagaagaagaagaagaagacgatgactaggaagatataaaagcagaggtgtaggagaggacaggctgtaagggtcacatgatgtaattcccggtgcctcttcctctacatgtaaataaggggaaagagctatcttgaatggctgtggtaaggattagattgaatagcaaacatttaagcatctggcagagaaggggtatccgaagtagtcagtgtcctgcctccctcctccaggcctcactgtgactgagctggctgctgacaacctgagtctttatctcatgacctgagagctttctccaagccacacagggacaactgtaattgcccaaagggcagacgaaaattcccagaaatgaactcctcaaaggctgtaaatattccagctccctcagtcttgagtggaataatctacacggaatcaagctccagttgcccacagtggcggggcccttcatggcttctctccttccctggatactccttcactccccatcaatgcttcctgggatcatttcttaaactacatgtcctcgaactctgcattggggtctacttctgggggaacccaagctaagaccaccggccacctactactgtaggtacttaaagagtttagtcgtctgttttccaatgatcagctccatctccatttgaccttagactctgagttttgatttcccacatatccattcaagggttgtagtgggggaagatcctcctcctcctcttctggatttggcttggagaaagggcacaggcacagcatggagagcaccttaggcttgacatgtctccatgcaaacccgcacagcacgaagatgcgtcctactgcaaatgaccttcactttgtcctgcttatctgtcaccttcacaactcatttgatgaaaatttctgaagtgtggaacacaaataggagaattttatatagcacaagatacatagatagagcatgaaatcacattgaacctgatcttaaagctactctaactcttggctccttactgttttaacaagagaaagtcgatctgaggctaggagccatcaacaggcactggtagctagctacaaattaatagcatggctttattttcctgtatttgctttttatggttaccttatattaaaccacaacggcctgttttttttttaatttgtaggaatggtataaacatttcttttaaaatataaatctttaagttttaaaaaagtgaatttattattactattattatttttgagacaaagtctcactctgtcacccaggctagagtgcagtgtggctcactgcaacttctgcctcccaggttcaagtgattctcttgcctcagcctcccaagtagctgggattgcaggtgcccaccatcacacctggctaatttttgtgtttttagtagagatggggtttcaccatgttggccaagctggtctcgaactcctgacctcaggtgacccgcccaccttagcctcccaaagtgctgggattacaggcatgagccactgcgcccggcccaaaagtgagttaatttaaagaaaaaacgttgctgacagtcctgacagcacacagaatatggcaaaccctggaaaatggggtttgattaagagaagactaggaaagccccactagaacgcaggctcctcaagggcatggctgcatctcccagtgccttccacccagggcctgcctggcctgtgccactgggctggaattgtatggattttggatatcccaggaagcaggggtccaagctgcccttgttagctacaggcttttttggtcttcaaaatatacaacttcactttgcccacagtggctcccaaacgtcccagcagtgatgcagggtagtatagacacctaaaaatgggtacaacacaagctccattgtatggtagttccaccctaggtaagaatccatgaggctccgatgtaactcagcaatgtgagctgaggggacgggtggaggtatttcttcatctgcattccttttcacttttgcttcagattagaagctctggttcgtgaaggtctgtaattcacttaactagaggtcaatgaatgagaaatttttttgaacagctacaaaaccctctactttccaaggaaagtgatacatgagggtgaataatttagataaatttagcttgaaaaaatttttaaatattgtaacattttatactacaaaaaagtatatataaggtatccatatattctaaataatcataggaataaaaacataaatacacatccacctgttaccccactacccaaccctgaaagcctgctgtgtgcccctaaacaattgtatccttctctcccaatgcccactgggttggtctatgtttgtgtggctataaatacctgaggctgggtaatctgcaaagaaaaaaggtttaattggctcatggttctgcaggctgtataggaagcatggtgctggcatctgcttctggtgaggcctctggaagcttacagtcatggtgaaagatgaagggggagccagcatcacatggcaagagtgggagcaagaaagctgggaggtgccacactcttttaaacaatcagatcttttttttgagacagaatctcactctgtcacccaggctggagtgcagtggtgcaatcttggcttgccgcaacctccacttcctgggttcaagtgattctcctgcctcagcctcctgagtagctgggattacacgtgcatgccaccacacccagcaaaattttgtatttttagcagagatggagttttgtcatgttggccaggctggtcttgagctcctgacctcaggtgatccacccacctcagcctcccaaagtgctggggttacaggcatgagccactgcgcctggcctaaacaaccagatctcatgtaaactaattgaagaagaactcactcatcaccaaatagatggtgttaattcattcataagggatccacccgcatgctccaatacctcccactagatcccacctccaaaattggggatcacatttcaacatgagacttggaggggacaaatgtttaaaccatatcattctgcccctggcttcccaaatctgatgtccttctcacattgcaaaatacaatcatcttctcccagtagtctcccgaagtctgaattgattccagcatcaagtacaaagtcgtgtctcatctaagactcaaatctgtccacctatgagactctaaagtcaaaacaagttagttacttccaaggtacaatgatggtacagatattgggcaaacattaccattccaaaagggagaaattggccaaaagaaagggtataggggccccacacaaatctgaaacctagcagggtagtcattaaatcttaaaggtccaaaatacaatctcctttgactccaagtcctacatttagggcacactgttataacagtggactcctaaggccttgagcagctctggccctgtggctttgcaggatgcagcccacatggctgctctcatgggtttaagttgagtgcttgttgcttttccagttaaagggtgcaagctgccagtgaatctgctattctgggttctagagggtggcagccccctttccgcagctccactaggtagtgccctggtggggactctgtgtaggagctccaaccccacatttcccctggcattttcctagtagagtttttctgtggggcctctgcctctgcagtaggcttctgcctgagcacccaggctttcccatacatcctctggaatctaggtggaagccaccaagccttcttcacacttgcgttctgagcatctgcagacttaaccccatgtggcaatcaccaaggcttatggcttgtgtcctccagaactgtggccagagctgtacctgggcccctttgagctgaggctgaagccagagtctgaagctcagcagggcagtagggccctgggcctggcccctgaaaccattcttttctcctaagcctctgggcctttgatgggaggggctgtcctcaagatttttgaaatgcctttggagggtttttgccttgtcttggatattggcttccttttagttatgctcatctctctagcaagtgaatgtttcacaacctgcttggattctttctctaccacagagccaggctgcaaattttacaaacttttacactctgtttcccttttaaatataaatttcaatgttaagtcacttctttgctcccatatctgatttaggttgctggaagtagccaagtcacctcttgaatgctttgctgcttagaaatttcctctactaggtagcctgggtcatcactcttaagttcaaacttccacagatccctagagcatacagtgcaaccaagttctttgttagggcataataagaatgaccccattccatttcccaaaaactttctcatttccatctgagacctcatcagccagaacttcactgtccatatctgtatcagtattttggtcacaaccatttaaccagtctctaagaagttccaaactttccctcatcttcctgtctttttctgagtcctttaaactcttccagcctctcccttaccccgttccaaagtcacttccacattttcagttatctttatagcaatgctccacttctcagtaccaattttcaattttctgtgttagtccgttttgcatcactataaagaaatacccaaggctgggtaatttataaagaaaaaaagtggggaccgggcacggtggctcacgccagtaatcccagcactttgggaggccgagacgggcggatcacgaggtcaggagatcgagaccaccctggctaacacagtgaaagcccgtctctactaaaaatacaaaaaattagctgggtgtggtgacgggcgcctgtagtcccagctactcaggaggctgaggcaggagaatggcatgaacccgggaggcggagcttgcagtgagccgagatcacgccactgcactccagcctgagtgataaagtgagactccgtctcaaaaaaaagaaagaaaaaagaaaaaagggttgattgacttatggttctgcagggtatacagaaagcatggtgctggcatctgcttcgggtgaggcctcaggaaggttacaatcatggcggaaggaggagccagcatatgacatggcaagagagagagaaaaggacagaagggagaggtcccagagtcctttaaacaaccagatcttgggtgcgttaactgagtgaaaactcactcaccatcaaagggacagcactaagccactcatgagggatctgcccccataatccaatacctcctactaggccccacctctaacactgtggatcacatttcagcgtgagatttggaggagacaaacatccaaattatatcacctaccacaaaaggaactattgtcttaaaattttgttagtcattcccttactttactttttgattggcctcctaggtctaagtgtatgcatagacatatatgcataggtatatatacaatttgcatatagtcaatttctgcctgtttgggaactgtaagtaaatataatcatacataagcattcttccaagacttgctctagggtcaacatgatatttctgagtgttatccatgttgatgccaagagatgttgataattcattttcacagctgtatagtatcctattgcatgaatgtatgacagtctatcatttctatcagttggcagtgctaagtcattgacaaaaatgatggttcagagttaggatttcaagaaggcacaattgccaccaaatttatccctgtttcatgcacaaactacttgagcagagaagtgaaaattttgcctcaagttagaagcaggttttagctaggggacatcaaaggagggaaggggtcttaaatgggagaggaagaaagggctaaagtgactccccaagattaaaaaataaaaacaaaaagaaaaaaaagaatcttcctggacagacaatttgtgactgggctagcccatgctgattgtgggcaaattaaggctttcactctcactgtcacttcccctccagataagcccttggggaaaagttctatatgaatacttaatttacaaaagtattgttccccagaccagcagattgggttccatgaaggtccatcactttgcttgatcctgaagagaaccaaatttcatatagtgctcatctataagcttcctattgatgtattttttatattcacctttttctatagcatatgcgactatgcagctaccacacagttatcaaatagtagtgtccatgaacctttagtaacctttgactagtttccatgactctgaaattccccacccacagcttcacttgtaaagagtggaaatatttagaggaagtgagactatcagcagctcagcctcaccatgggaagcattttctcctcaaagcacagtagtatgctggtgccttctgtcacactatcaggacatggctttagcaagtacagtgtcctctcagcacctgttcctcatgcaggtgctttgcatcatataatcgtcgaaacattaaggaagtaatgctctttgtcactccaccggagtggagaagttaaagtcaagagtgtacttcaggggttgtatcactggtttggctttagtagttgtgaggtcttgatgggtgagagtgatccctggcaaatgacatatattgattgattcattgagtgagcaaaggagtaaggtgggtgtattagggttctccagacaaacagaaccaatggaatgtgtgtgtgtatatatatacatatatatatagagagagagagagagagagagatttattttatgaagttggttcacacaattatggagactggcaagtccaaaatcagcaaggcaggctggcaagctggagatcagggaagaactgacattgctacttgagtccgaaggcactctgctagctgaattccttcttgctctgtggatgtcgctcttttttctattaaggccttcaactgattggaggcccacctacattatggaaggtcatttgttttgctcaaagcctactcatttaaatgttaatcttttaaagaagatagctttgcagtgacatccagaagaatgtttgatcaatatctaggtaccttggcttagccaagttaacacgtaaaattaaccatctcagatactgtatccatttcagaaaataatttagtagatattaatatttattgaacatctgttaaggactctgtatgggccaggcaccatattaggtgctggggattcagcaggaaagccagccagacaaaatccctattttcaagaagcttacatatggaagggtggaggtttgagtaattaaaacactcgcagtagttttcatgccttcaagaagcactgcagatacaactcaagtcaatcaaatccattctcccatatacatatggtattggggtatagtgaaaagaggaacagaggttctgacttcctggactttgtcttctactgaggacctcaggtctaaattatatgatgaccatagacacattttaacaattatatacaacatgttattcattatgtagctttcaaaagcacatataattcagttataaaggatgatgaaaattaacaaattgcatacaattgtattaaaaataaagtgacaaaggtattttgtacatgattatttcattttcttcatgagttttttttttttaatttttatggcaaaacagttcaaggaaccacttaacgaaggtgtttgatttcaaaagaattgatttgggaagacagaactgcttgatgatgtctgtttctttgttagctttaagtaactggtttactcaattggcctcttccttcattgtgttttggagtttttttgactgaagcaaagacaagcattaaaaataaagacattggtttatgttgtttagaactgagaatccatttaaaaaaaatgaattggagtatctatgccagattgctcttacatgatatatgtggccatgggcagaggagggttgcattcttaatttatgccctgaaagaatatcaggcttatttctcaaaaggaaaaatacaaatggcaagcaggtatatgaataggtgctcaacatcactgatcctcagagaaatgcaaatcaaaactacaatgagatatcatttcaccacagttaaaatggcttatatgcaaaagtcaggcaataacaaattctactgaggatgtgaagaaaagggaaccctcatatactgttagtgggaatgtaaattagtataaccactgtggagaacagtttggaggttcctcaaaaaactaaaaatagagctgtcatatgatccagcaatcccactcacatatacccaaaagaaaggaaatcaatatattaaagacatatctgcagtcctgtgtttattgcagcactcttcacaagtgccaagatttggaagaaacctaagtgtccatcaacaaataaatggataaaggaaatgtggtacatatacacaatggagtactattcacccataaaaaagaatgagatccagtcatttgcagcaacatggatggaactagtggtcattatgttaagtgaaataaaccaggcacagaaagacaaatttcacatgttctcacttacttgtgggagctaaaaattaaaataattgaactcataaagacagacaatagagggatggttaccaggggctgggaagggtagcgttgtgggtgggggggattatggggggcaggtaggggagatagataatgagtacaagtcatagaaagaatgagtaagacctagtatttgctagcacaacaggatgaccgtagtcgaaaataatttaattgtacattaaaaaataactaaaatattgtaattggattgtttgtaacacagaggataaatgcttgaggtgatggagaccccatgtaccctgatgtgattattacacattgcatgcctgtatcaaaacatctcatataacccataaatatatacacctactatgtatccactgaatttttttaaaaagaaaaaaaacagcctttaattagaatatttgcatgtcacaggctagggctaataatccaattaaagttttaggtaagggctggaggacacagggatgtgtagcacacgttgatgtacctcaaagaggggaattcttctaagaaagcgtcatcacgatttctcacctgttatctacaaccttcaacccattgctctaaaaaatcttacatttgagttgaagaaagaacaaatacgtttgtaaaacaaaaatcacatttaaaaaatagctaaatatgttgctaagtgaaagaagccaatctgaaaaagctgtatattgtatgattctaactagaacgttctggaaaagataaaactagggtaccagtaaaaagatcaggggttcccagggactgcaaggagggagggatgaataggtgaggcatggaagatttgagggcagtgaaagtcctctgcgtgatacgatagtggtagaagcgtgtcactgtgcatttgcccaatcccatagaatgtacaccaccaggtgcgaaccctactgtcaactatagacttggggtcataatgatgtgtcaatgcaggtttattgattgtagcaaatgtgccagtctgtggagggaggtcgacagtgggagagcctgtgtgcatgtgggagcaggaggtatatgggaaatctctgtacctttttctcaattttgctgtgaacccaaaagtgctctaaaaaatagtctttttttaaaaggagctaagtggcctctttgatgttcccccagaaggccaagaaagtgcccaacaccggacgtttgcactgacagtccctctgcctggaaggaccttctgggagatccctgccaggctccgtccccttcctcattcagctctgggccacaagtcacccaatccgccagccctccctcacatgccatgcaaaatggccacggggtcacctctgtcaccctccccgttgtcacctgtcctcaacaccacccgacgccgtgcagactgacgtactggcttatggtctgtttctgcctctgaaccgttggctccgtgggtgggtgaaggacgttattttgtcccctgctgtgttcttggcacatgggaggtgctggagggacatctgctgaaggaacgagtgagtgagccagtgagtggatcatccagtgagcgtgagggacgggtgctaccaggcagggaaagaagctctctgtaagcagggaagcctgctcagaagtgaagctggtatggcccttgcaaaacgggaaggacacagaaaagcatgaggagattgtgaggggaagaaaaggcggcttgaggagagccttgtgcacctagtgggtcggtgagggaaccatttggactggaatgcaggtcttgggaggacaggggtgggagccgtcctccagccgtgtgtgcgtgctgtaggcaaaggcagacttttcctcaggaaagcaaatttggatccgctccagcatttgaataacagcctgattgaaaaacaaagctctactctacatagcagagcaaagaatggttttggtcagagcatttttcaaagacaatgttcctcacttcttgcttcagcataggaaaacgtcagcagagcttcggtgcagcgttttactctaagcaggcctgtgattcaggggctggcctccttgggttcccacaagcatgatttagcagagagatgtgtctatttcatcattaaacgaaatgttccttagggaaaagactctttatatacctcagttgacatccctaatgatattccctgaatacccagttagagaagtgttagcctcttctatgtcatactttctatctgctgagtaatttctttcttaattgcacagaagagccacttggcccaacactccctatttgagttcgacctagcagagatttctttcttttgaggctatgtgaaatgcagttgagcatgatattgaaaacatgaacacaatccaaaagtccatcagtagggtccttattacaatttggcaatccacactttggaatactgtgctactggtgaaaaagaagaaagaggatatacacaaagatatgaaaagatgtgaatcaaatacaaagcaacaaatgcaaaagaacatacagtacaagcccatttttatctatctcattgtagaataaaagtctagcaaaatatagactcccaaatatttttaaatgttttgggattgggtttataagacaggttcactttctgcagtagacattgtctgtctttagatatttaaaaatgagtttacgttgctttgtgattgaaaactggctcaaattttaaaaactctgtgtgtgtacacgtgcacaatcactcatgcatgccaggttgtgtagtacacaggagcaatggttggagaaatggggagttcctaataaaatttaacagtaggaatgtgtttttaagattattttacttaaaaataataattcttctcccctcgtcaggcttatcttttgaccatttttgttttggcttgttttcttgttttgttaatttgttaataaataattgataaaaataaatggcaaagcaaaaaaaaagttctaagcaatgtaagaaagtcatggcatactctctaaggagattctttctctgcagcatgggaacattcacaaagcaactatcaagcaacataagttggggaaatgatcatcagggttcaggaaatggacagattcaagaaggttggagtgcttaagagagaaccaactgcctgagttcaaatccaacctgtaccacccacctgccatgtgctattgagcaaattactttacttttctgtttctctgtttctcatctgcacaaaggaggtaataagagccctacctcaccggtggttttgaaggttttatgagtcaatggatgattttgaatgttacatgagtcaacacacacacagcacctaaagtggtatctgacacattaagtgctcaatacatattagctagtgggaggaagaggaggagagggaatgagttttcataaaagagaagggatgtaaagaatgagtagggtttgacagaaaaaagaattccagaagatcaagaaaaaaacaaaacccaaaggcttataggatacatgaaatgatccagttaaattcaccccaacctctgtaaagaaagccgaaatgatatttcatgactagatgataaacataagcagatatgtacaagcactcaaatgaaatagaaggagggttttttaaagttagctttcctttattattctgtagacccttctgtgtgtcagtcatcagtcaacaaattcgtatggagctacgtggtggtgtagctcccaccagcatggaactttttccaagtgggtttaaagttggaaaaccatggcgatcatttgttttattgtgtgttgattagtagcgtatccaagagttgtggtagttacttcggtgtgactcattcaggaatagaagaaagattcattgtattactcttaaaatataaacaattcttaatttttctgtgctaatgaagaaccacaggaataaatatagttgatagattaaattatgtttattttattttatctgtaaattaagcaaatcttcattgttttgcctttttgaaacttttctccatctgtttgggtttctgggtaccccccagccctggtgtcttcttcccagcttgcaaacagccatcagggcccaagggcaaggggagaagccactgagggccagactgcgcacagtagcttccaagcaggccctgggtaattgagttgcttgaccttggcaagcacagaaccagcctcatccacgaaaacacgaaaaacacatgtgactaggtgctgagactgatgcttttgatcaccagccctgaccacactgaagagcccttttaagaaccaaggtccagtctcatacaatcccgagagttcagacaaaaaggccaaaattccatagctctgccggacttatttgcaaggggtgctgtgtagaaggtgccgaaatggctagtagctaggtttaagcaattacagtcactagttggttcaaagggatgccattcactcctggaatcctgctgtcaatgattgagctagggagtttggtctccagggaagagttaaacattagacaggaaccattacaaaactttccactaaaaataagttccttgtaagagaagttgagagacttgctaattgcagcttactctaaacctaatgacagtctgtatcatttgcaaagaaagcacaggatgtgtgaatgatggtgagggaagtggggagtcttggcagatagatctgactctgatagatgcagttggtcctctagactagtgatccattttggagtaaactgcattgggagactgatcaaatttcctttctccaggattcttaccaacagtaaagactgataaaacacatttgtgctgctgtgtttttcaaaagctcggccatataataactttaacagactccctaaatttcaaacatttccttgatgtaggatgatcacaatagaaaggaatgttattctcatccagccatcggtaagcttttgtcttccttaatcccagaaactaaatcactggctacctcagaggctctgacctaaatcttaattgatgcccactgcactttcagaccactgtgtgtgattttaaccagacaaaccaaggaggaaggattaatgaagaaagcctaatattttgaccaatcatagagtccactgcagtgccctttccattttaattgagctttatacggttctcctctcgaggtaaccctcctttcttaatgttcagtacagcaaaaactaatctaggttttctttttaatgtttgatttatctcttcaatcttggtgctaggtaacaacattggatcaaaatattaacagccaagatttagatattattttacaattaacacagcacattgactcatattatttcactttcacagtggtcctggggcatgtttattgtatctcccactctacagatagtgaaactgaggagatcacggtgggaaagatgacgtaactcacatgaagttgggcaactgatcagatgacacagctaggactgaagcctgggtcccctaagtcatttgcttagagctcattcaatgacgaggcaactccttgctgtgcatcctttcagcacacgttgttggtgtgaagacgctggttttcatcagactaaaatgcatcttacttcaagataggcagtttctgttttggtttccacctctcatacattgcttttaaagtgccaacctctaatggctatcccatgagaaaatctactgtaagtatgaagtgaccctttggtactaccagtttttcatcctaaatcccttttctttcttctttcttttcctttctctctttctttcttttttctttctttcttcctttctttttcttttttctttcttcttttatttctctctctctctgtcttgctccccctttctttctttcttcatttctttctttctttctctctgtctttctcctttctttctttctctttctttctttctttccttccttccttccttccttccttctttctcagactctcactctgtcacccacgcacaatctcggctcactgcaacctctgcctcccaggttcaagtgattctcctgcttcagcctgctgagtagctggggttacaggcacatgccaccacacccggttactttttgtagttttaatagagactgggtttcaccttgttggtcaggctggtctcaaactcctgacctcatgatctgcccaccttggcctcccaaagtgctgggattacaggtgtgagccaccacgcccagcctctttctttttttgactgtgtctcttgctctgtcactcaggctggagtgcagtagcacaatctcggctcacggcaacctctgcctcctgggctcaagtgattctccagcctcagccccccgagtagttgggtctacagatgcatgccatcacatccacctaatttttgtatttttagtagagacagggtttcaccatgttggccaggctagtcttgaattcctgagctcaaagtgatccgcccacctcggcctcccaaagtgctgggattacaggcgtgagccactgcgcccggccccattttattttctttcttctttttcttggcatttgttatgatcaagccttttttttaagtactgaatatccatggactccttccagttttacctcatcaaaatgtgcttgcagggaaggatttggtcttgttgatttcaattaatgtaactccaagccaccactcttctgctattcaccttttaatctatatttcttactatacataagaagctttgcttctctacttatttcaaggagtgtagggtgaagatgaggtttttaaatcacggtatctttcttcagtcctttcctccaaattctacacgtagatgtactgtgcttcagccaacttatctctaactaggacattcagatctactaactaagctatgacttattataggcaggcggtcagcaggaagagctgtttttttttgaaagtaggacaagaataggtctatggaatgttggggtcacttggtttcctcaatggaaagaaacgggatgtttctgcattaactagaacacttgaaaggtagggaggggtgagggtgattgagaaatgatttcaacaaacagaacattaagtactctgtttgtcagacagcgtgttcccatctggggggtgagtggcagaaaacatagtcgccatcatgagaagagctcccctaaatctgcccacccacctccaactcttgctccagtcagtttttctgaatgcccagcctgctacactgaccctcaccgctcttaccccggtgccagggtgagagaggccagggatcaggtaaggaaagaggagaggaaatgcagaggctccatttggcttataaaggaactgtaccataatagttattattgtttaaaaaaatagcatgacatccattctatttctctccctcttcttcaaagatatttcagcctcagggactttctgcttgttagtgggatggcgaaaaatgcatgatagatttctagttagtaggtagaagggacgggagattacatcctaatacagtagagtaactatgttttattgagcacttaatatgtactgagtgaacacacctgctttgattcacaaccacttaatgagggaactttggagcctccttaagggttacaagcaaaagctgtggagtcagcttgcctgggttcaaatcctagttgtgccatgtacctgctgtgtggccttggtatagttacttaacctctccatgaatcagcttcctcaccttaaaatggagataattataatgtcacacacctttggggggaattcccaaggccacccccaggttcaatgactcattaggaggacccacaggattcatcatagagacatgcccacagctaagttctattacctcaaagacaaatcagaatcagcaaaggggaaagcaacagaagaaaccagacatgagctaccaagagtcctctcctaggggagtcacacaggacatacttaactcctccagcaacgagttatgacaggtatgaaatgttgtctactagggaagctcagtagatacttagtgccagagttttgatttggagctggtcacttagacaccctctgtctggcatgtacacaaattccagactcccagaaggaaagcaggtgttcagcataaaccatgttgtttgcacacacagttaagtcacagtgagccactcatatcacggaccagcaggaacccctcacatgttcccagatgccagccaagggccagccttgcaagcaggattgagatagcagtctcagacctgctatgtgaactctttactgcttgctaccttttgattgttgtgagattacataaggtaatatatatatctgttgcttacaacagtgcctaatttgtgggaagccctacagatttttttagcccttactattatgcagaaaaaaaaatactcaggtttagaatgactacacagtcaaaatggaacaaactggaatctgaattcacatatccccaaaaaaggttcatgcatctattcacatcaccctaacatgagcaaagtagcatccttcttcaaaccgtaactggggatgttgttggtgggtccctcccttttcaggttcagagaagatggagcctttcattccagttgtgttctgaagacagagcttcttggagctataagcaccattaggttgcttctttctcaggttaaaccactcagagtgcatttatggtctggtacttaatgccccacatgagcatatttcagacttcccccccattccatgaggcttgctttgttgatgtccttcatttttcaggatacgtatccacaaatccataagaattttcttccataagatctagatagtgaatcatctcgccgtaattgaaatcatcccattgtaaaccatttttaggcttaaaaaaaatctgacaaagaaatttctcccacctacttctcccaatgcaaagtagttaatcaatctctttaatcatgggattacctctatcttatctttcaccaggttttctggtctttggttatgtcagtgggcagggcagcagagtgtccaatagctagctgtgaatgctaagcaactgtagtagatgccaaatcagttgcaccaccaaagtctatgcattgaaatgaagtcattgactgcaaccaatttagatatcttttagtattttttttttcaaagacggatttcaaaatgggaacagggctagaagaatcctttcaattttaagttaaaaattatgcatcatcaatgcagattgccatatggttgtagagtaagatgaaacagagtcttagagcaatagtttatttcagcattagcattgttagttgttagacatctgtcccttccaataaatgaagattttgtaaacttcttagtcatttctgtccccatagatccaagaatagaattcacacatggtgactgtttattaaaggtctgctccattaacactcaaatgctaatgcacttccacttaataaaagagcttcatctttgggtctggcagctcatgacatatcccaagtgagtaggtgactatttcctggatgactatagtcaacgcagtgccagattttgacacctacacaaatatctccctttggtgagaaaagcaagcaagagttatagtgaaagaatagtgtgactgcagttaataccataatttgaagaacaaataatggcatctataaaaaaataagatgtgaagctcatagaatataagaatcaaagtgctcatggtagccctggttgctactagctgagtctacacatgctaataaatggcagaagacatgaaaaggcaaagcaagaggcagaacacacagaagagagagaaagagagggatgaaaatggaattatgtcagtgtactcataagtttggactgctagaaccgagtactatagactaggcggcttgtaaacatcatatgtttatttcttacagttctggagactaacattctgaaatagggtgcctgttgaggccctcctctgggttgcagattgctgccttctcattgtattctcacatggcagcaaaagaggtagagagctctctgggatctctttcataacggcactacatccattcaggaggattcaccctcatgatgtaatcacctctcaaagccctcccctcctatcaccatcacattgcgggttgggacttcaacatataaatttgggggtgatacaagcattcagttcattgcaagcagcacagcacaattcatgaagacttttttcttctatgcaatctcccaaatattccttgaatatctgtacctctgcctttgctcagactaatttcttctttttctccatatgccaggctcagctcacataccacctacttcttgaacaccccagcccatctcagcccccaatgctttctccctcctacaaactcctagagcttccattgtgatgctgaatgttgttctttagggtcgcaattagattgtataggtgttcttcttgtactcctaagtttcttaaataaaaatgacatggtttttgttctctcatcagctataagcatttcctaaccatctgctgtgaatagggatgatatagtttaggtttttgtccccacccaaaaatctcatgttgaattgtaatctccagtgctgaaggtggggcctggtaggaggtgtttggatcatggtggtgcatccctcatggcttggtgctgtatttgtgatagtgaggtcttgtgagatctggttgtgtaaaagtgtatggtacctcccccctgccccttgacactctgtctgtctctcttgctcctgctttcaccatgtgacgtacctgctcctactctaccttccgccatgattgtaagcctcctgagacctccccagaagcagaagcctctgagctttctgtaaagcctgcagaaccgtgagccaatttaacccagtctcgggcatttccttatagcagtgcaagaatgccctaatacagaagataaagaggatatgatctagagtttggctggactttaaccagagcccccatccctacaactctgaccccctgacactgctgtctgagcacacagctgtcctttagcacctttagccttgttttcttatttccagaacaagctgcatatttctggagaccattcctccactatttcactttttgaataaagcttaagtgcaccaaaagtaaatggcaataagaaaaatgtaccatacatgcctcacacacatgtacgctcacagtcatacacacaaacaagctgatacattagttttactttggctcacctctagaatctgggtggacagtctgctctatgccttttctgttctttctcttccattgtccgcagaatatgaggaccaaagtgctcattgttgtttcttgaattctgcatgtaggcaaggagtggtagccttccctgatgtattagtcagttctcacactgctataaagaaatacctgagactgggtaatttataaagaaaagaggtttaattggcccacggttctgcaggctatacaggaagcatgatgctggcagctgctcagcttctggggaggcctcaggaaactttcaatcatagcagaaggtgaaaggggagaaagctcatcttccatgactggagcaggaggaagagagagagcagggaggtgctctctcaccaaccagatctcatgagaactcactcactatcaggagaacagcaaccagggaaaaatctgcccccatgatacaatcacctcccaccaggccccacctgcaacattgggaattacattttgacatgagatttgggtggggacacagaggaaaccatgtcacctggctaagtggtgaccacacagttctcacctgtgtgtgggttattcactttctgctcttccctaagactctccttaaattcctggcagactcttgctcatgctctcctttgggagttcttcttctgctctacaatgctttctgcatttgaaccctttcctcatatgtcacaccctcttcaccctaatgggggtttattttgcttgatcactctttaatccatctgtactttcccttttgagtggcacccaagactgagcctcgttccaatagcagtgccctggaaccacagatttgggagctgaataggactgtcatctctttgctgtgtcacacactagtgatggaagcctgcagaattctcccacagatggacagtttagttatgaatcccacaccaacttctgctcatcaaacatcctcctttcatgatataggcagaaatttcagaagattatttgataatgccttgttttattgttttgacacaactgtcaaccacgccacttcaagatgtggtttgtccctcatggcatgaaacaggtctcaaacgacttgctatctggcaacaaaatggtacaccaacacattaaactccttcaacaggagaacatcttcatgacaaagacagtggttcgcaggttggacaccaatcttataggatgggtttccttggagttcagggttaacaacatgtggcaacttgtttgggatattatgaaagagaaaagtattctattctgccttaaccatggcggaagcagcccttgaggagctgctgtcatgacttccagtcatccttctaaaggaagatgtctagaagaatgtggggcaaaagtgaagtttgtacagagaatgagaggaacttacagataactttgaactggcatatctgtagttatctctattaatgtgaatttacaaaaagttaactagtgaaatagggacagataggcatttgttctctgaagccatttgggtatgtcttcataatcccaggacattgggcagaggcttcctctatcctcttactcagagaaatccaaatatggcaaatgatccctgtagcttcctgggcaaaggcccatttgcttctgattctttcaagggtaaacaggaaggctttatagaaagcttcagcttgtttctccaagagtttcctaacacagagataaatacataccttcccctgacatctctccaccctgcccacgtgaaacccttgctggctctctgtctctgtaacccctctagcctttcctttctgggggacttgccagcttgctactccacctggagaacagaacaggatggagtagaacaggaattttcaattctctcctttatatacagaagctctctcaagtctctctaagcttttcagacttaacgtgtctcctacaaaatatttgttcctgactcaccactaagaagatgaactttaagaattgcacagtttgcctctcccccatgataatatgcatagctaagccacagcaaggctacctttctcattcttgctgcctgccgatggtgtgatcttagcccctctctcagtatttgaatttcctcggtctttatgaatggtaagagttgtttaagtctctccttgcaacactccgccacccaccattcatcccataatctttcacatggaagactgcatgtattttgtaaaaccagggggaaaagtcctgattctaaatcaagaggcaattattaagagtggcacgcaggtcatttttcttccttcctccaaccaccctgtcaaccaccacccgccatgttcacaaaagcctccaaggctacctacaagaaaatacccagctttcctctagggtgacttgactcttcaaactgcttctcagtggaaaactttttaaacgctccgttttatttattctctaacagttttcctgttaactaggtttggaggtgttttctgaaacatgaatgccattaatccaacaccaaaaagattccagaactttccagggcacacatggccaagccttccagaccagtttgcactggaggagcgttctgcactggcaggcgtttctgcagcttctgacatcagggaaaaggtgttattcctacagtgctgctgacgttatgtaacagcagagccattgctttttttttttttttttttttttttttgacggagtcttgctctgtcgccaggctgggagtgcagtggcgtgatctcagctcactgcaacctccgccttccggattcaagcgattcccctgcctcagcctcccgagtagctgggactacaggcatgcagcacgcacgcccggctaattttttgtattttagtagagacggggtttcaccatgttggccaggatgatctcgatctcctgacctcgtgatccgcccgccttggcctcccaaagtgctgagattacaggcgtgagccaccatgcggccccatagcttctttagttgaatggctgcctctggaggcgggacccacagggactgcctgggtggaagaaaggcagggaaggctgctttcactcatcaccgcagactcactgccattcagctaggccgatcttgtagaactgacgtagaaaagattacttctccataagtataggttctggtcagaaccaaactctctttccaaggactgcttcctgcctgtttgtgcacacatcttgttttcttagggtcattgggactgaatactaattaatcgaggtctgcatgatcagcaccgaagcaagcgcctgaaaagagagtgaatcttttttaaaagttactttattatttgtatttattttctgggtgttgtttctgattccaagtagttacataaaagttgcaaagccagttaaacaccctctgaatgttcctgcagaacttggactgggcgctccctatttagaggttaataatggtcagtggctttctcttcctttctaactttatttggggtgtgcctagccttgagatctgggttgtggccatgaataggtctctgtagtccaagaaacatttctcagactacggaagatgtgtggaaagacagtgccaagctgcctgccgctgtggcagcaccaacggagaagaaaaacaagccaaaggatgcgggtgtgatcagggcctgcgcaggggttggagtggtcatttggggcttccagagggataatgacaagtttatccacaggagtaaagggttagagcagccagaagacgcttgtgtaatgtcccagcaaatcaatttaaagacttaaatatgacaacatgctaaagaaagcctggaaggaattggtgggtgaaaaggaaatctgccggccttcaaaagtgaaaaacgaagcaaaatggagctccaaaaaatggtggctcaacgagaccccagtgggcttggctagaggctccggaacagaaggcctcagtcacctcattgtattcagcacagtctctaaagctgagagcaggaaatcctgttgccccacccatgtcctcagctgaggtcccatgagacaatattccttagataccagcagaaacttttcttacatgcgaaggggtgtaattcacaatattctttagaaagatggttgaaaggtcacgtcattcaggccataaaacatttatccacacatttattcatcaataatttactgagtgctataccagggggaggggaaagggtggggggggtgggttatgatgatgccaacgattaaagagaccagtcaagacactcaagtgagcctgtggtctaaaatgatgctactgaaggtggcagatgcccacctgggagtatcttaggaatgcaaattccagccccgcccagccttactgaaacagaaaccctgggggtggtgcccagccatctgtgttttaacaagctttcctgatgcacggaaaatttaagatgtatgggaacatggtgtctcaaacaatgatgtgtcctggccatttgcgagatgtgtggaaagtaatatattattaatgatagttagcataccgacatttgtgaataatttatatgtatgtcacctgcaaagattttgtaaaaatacagatccctggctccacccaattccaacggagtagaaatatccaggtgtggcaggcagtatttagttttaagacttcccaggtgactcttaggatccgtcaggtgtgggaaccagtggtctataagagccatttgccccataacaaagagaaaaaatcatggaattctagagggtggtccctcggagagcaggtttccccactcccctaacaaatgttaggcagatctcaattgaaacacatacaagagaaactccaactgcagcagaaatggagtggaggttgcttcatactttcctttctgcagtggctgttgcagctcttagtaaaaatctagagctctcggccgggcatggtggctcacgcctgcaatcccaggactttgggaggccaaggtgggcagatcacgaggtcaggagatcgagaccatcctggctaacacggtgaaaccccgtctctactaaaaaatacaaaaaattagccgggcgtggtggcgggtgcctgtagtcccagctactggggaggctgaggcaggagaatggtgtgaacacaggaggcggagcttgcagtgagcggagatcgcgccactgccctccagcctgggcgacagagcgagactctgtctcaaaaaaataattaaaaaaaaaaacctaaagctctcaaaaatatggtttgaaaagcatggatgtttctatcaccacctcctcctcctgccacatacgccccattcattgatgaagaaaccaaggctcagaaaagtaaaatgacctgaaaacatgtgactgaccattcaggtctgcccaagactaaaggcatcccagaaattagagcgttcagttttaaaacagggacagtcccagaccaaccaggatgaattcgtcaccctaggtcggagacttcacgacacccacagttcttgcgttttggctgatttattattgttgttgttgttgctattataccatattactgcaagaagaattcaaattactattggtttttaatttttttttaaatttttctagccccttgagaagttcttactaaattactatggtttccttttaaaaaccatatttgtttttattccctcattccagaaggatttaagggagtaatacccttattttatgtgttttgaaatacttgtaagtattctaaaatactctggactattcctgtgtccatgtctcctctatctgacttcagacccaccataccatatgcattttctctttggcttccatatatttgtgtgatgtttgctatggcacctactgtgccctactgagatctgtgtattagtcagaactctttagcttgccagtaaaagaaaacaaaaggatggagtatgtcagcttgggtagcagaaaagagcttcaggcacaagtggatacaggggctccacctcatcaggacatggtccctctttgaacccatagcaagatggtcacatgcagctccacacacccgcatcctcccagcaacccagctgacggcatcttgtccccagtagcttttgtaaaagtccctaggatgaactctgtttgggctgacttgtgctatgacccttccctaaaccagttgcagcccccaggacaatggaatactctgattgtccagactgtggccatgcacccacccctggcaccagggtctaagaagagagaaatgcaagtctcccaaaagaaagtcaaaagatggttcctagaagcagaggaggaacagatgctgggtaggtgaaaacagcaaatgtccatggtagtcttaaacagttcaagagggctgaccaactgattggctgatgcacgggcaacagcatgcagctccatgtcttcctctatccccactctgctgagatctaggtactattttcccctgaaacactaggttgcaagactccaaggtcaccattgtcagttctaattttgaagacacgcaccacatttagctgaagctagcagcagccccagaacccatgggactccatccgaaaaatgataagccctttgctgggctcccaaatatggagctcctgagagtgaggagctggtgactcatgttctctgtgctttggttgcccccacgttttccagctgggttggtgacgtgggactcagtactttcttcaatgcgtcctgtacacaaagaataaatagccccagagctctttctttttcttcctgcctttcttcctgtaattcattctcagcccaactcagctttgttcaaaccacagtatttcacattgcctggcaagttctgacacagctgcttgctttattctttcagtcttctgttaagccagaggtaaagttataccttgtggctaatttttagtctgtaaaccttatcccttgttcaagccgaaatcttagattaatcagcatgaaaatgccagctcccccaagaccgttgaattatggcccccatcactcttcctgccctgacattcatttgagtccctttcaacttttacaagttgttttctcttatccatgagcaaggtggtggcttgggcctttttaggcaattttcttttcttcttaatcacctgcccctattccatccaatctatttcaatttctatataatcatgtaatacatctctaatttgagtcaccaggttttccacgttaaaggtgggctttaggaatgtttattttacaaactaatagaacttccagtcctatggactctaactagtagtggggccactgtgtcagcttcccagagctgctgttacaaagtaccataaactgggtggcttcagatgacagaaatagattttcttacagttctggaggccagcagtctgaaatcaaggtgctggcagggccacgctctttctgaaccttcaaggggaggatccttccttgcctctttcagcttccagcagccccgggcattcctgggcttgtggcagcatctctcacacctgtgcctccatcttcacagggccgccttctccctctgcgtctctttcacacagagttctcttccccttttacaaaaacagcagtcatattgtatcagggctcaccttcatgacctcatcttaacttgatgaaatctgcaaagatcttatttccaaataaagtcacattcgcaggtgcaaggagataggactcccacataccctttcatggggaaggaagacacaattcaacccctagcagccaggaaagagaaaaacagggacagaaaaataactctttgatcttggtcaaccaaaaaggggatcctgatgttctcagaggatgttcacccagaaagagcctgggaccccgacaggaacatctggagatggaggcgaaagcctagcagcaaaggtgatcgctcaagagggcaggagaatccactggagggcaaaagccaaggacacatttgtgcttgaagagcctactgtgtgccacatgtgcttttatcccattgaatcctcaaataactctgccaaagagttgctattattcttttttaatacatggagaaactgaggctctgattaaataatgagacccagattataagtagaaaagcgagatcatgattgctattaccgctgtcacttctgtttttaataggcattggatctcttgtgctactatacaccaaggatgttacctgtattaactgagatcttcacagctcacaaagctagatattgatggccttatagagatgaagaaacagaagctcaaagagtttcaatcacttgcctgaagtcacacaagtattacataattcagccaaaatttaaactctggtctttctgactggcaggaccattccttaccatgatgccatgttgctggtggacattagggtatctaaactagggtagtcctagcttcagagaaagaagctgtataaagaaaccaaatgattatgcttgaggcttaaccaaagcaatataaaaagtgtatgttctcaggggaatgggcaaaacagaagagaaaaaggccggccaccgagcggctgtgggtgaatgagttaaccaaagagcaaatgtctgagttggatcatgaaacagcagatcaagtgggctcagtgtctgtaaacatctacactgcccatgaggacaagatctgtatgctccatctacacccagaggctgaaggaatgcctgtggtgtagacaactcacttttctagagaaatggagaagggattagacatgttaaccctgaagaaaaggaaacttggggtagggtaggctcagaaagtcttcagaggttgggaacgtggcccatgaaagagcagggagactggaaagggaccctgcctgtggaggcagctctgggccccacttgaacacacacgggtgaaccacttgacccaccttacagtgaaagaagctggcacctgtggaccactggagaaacctcagtagccatctggtgttccccaatgactgtgttgctcacaaccctcaagagtcctttgttgcttttggaattgtagggctggcaagatgtcttcacccactgctagattcatggctgaggcccctataatgaaggacagatgaacaagagaagaacatacaaacgcatagaatataagttttacatgacacagaagcctttgaggggaaatgaagaaccagagaaacagggaaacctgtgtatttgctatgctcgattggatgaagagtggacagtcatggagaggcatgaccgagcaaagcgggtgataacctggagggaatgtcaccacatctgttggctcagattctcctctgtgtccttgtgtcttcagaaaaaggatgttcctttcctctgagtatgcgggcatcactcacaccagggtccaatgtcctacttcaggggaaagtcaggaaatccttcctgggactgatgaccggcctcagagagaagggtagaacaagggaaggtgagagtggcctttctgcttttgctgttttctcaaatgccaattttctattttcaggggcaatatgtcctgaaccccatcaggatgaagccccagctccatgaagcccctcttgaactggtccatcctactgttccagtctcagctccctctgctccaggccttgaacttcacattccagcctggggactcctggcagttccctaaatatgcaaagagctcagctttctttcctggtcctggtcctggtcacttggccctctctgtctctcccttccttcttcccatctctcttcctttctggctcatgtccctcgcacatgctgtaaactcttcctggaacatctcccttccacctgtgaatctcttgccagctcacttcttttctccctttaagaatccacttctcaaaagaaaatggcaactctgtgaggtgatagaaatgctgattcgcttgatcattgtggcgtccacaatgtatatataaaacaagttgtacacattaccatgtataaatttgtgtttgtcgattatatgtcaagaaagacaaggaggtgtggaaagactgcacctctgtcaagacgcctttctgaccaccccccgaccctggttgacactccctgacatgagcccccgagtgtttacctacgctatgtgtatcagggcatcccgaccacttgctcactcacctgtctccccactgtgaggtcagcggcagggccttgttcagtgtcttagtcatatcccctccagcacccaccatgacctctggcactaagtaggggctcaataagccaatcattgtgttgatgtaccagtgacattgagggaagaccaagctcgccgacctctaagatcctgtccactctgagagtctgtgagtctgtatttctgctcccacagttagtcacggaggaagttgccaaagcagatgatgagacttctgtttggggttgcccaggtctgcctggcctttgcaatttgtaatcaggtcctttgaaagagaaactgaactgagagaaaaacacagtttggatgaggcaagagttgcaaaataatgagttatgtaatggtgatggtggcctgtggtagcatctttggccctgcccagatgatacaagactttgtatgtatacccttgagcatggccaaaaggacaattgtcaaaaccacggcttaagtgttcaaaagcctcttttcccataagatgttgcctcttgaggtcagactgaaatcctgtacctgtaataatttcctccttaggactggatgtacatgaaaagattggagatatatatgtaccttttttatatgccatgtaaatggtataacccttgcactctttggccattaacagccaattgtcaattagtttattgtgtattagatcaaactgtattgcccaggccagctcctgaagaactgtgaactatgaacatctcagcctagaaggataatgtgaccttcaatttgcacaccatccattgtctctttcaaactaagagcctctctaagctagataggccaaggattatttttttaacttttattttaggttcaggggtacatatacaggtttgttacataggtaacctcatgtcatgagggattttgtatagattatttggtgacccaggtactaaacctagtacccattagttgttttttctgctcctctccctcctctcaccctccaccctcagttagttcccagtgtgtgttgtttccccacatctatccatgtgttcttattatttagctcccacttataagtaagaacatgcagtgtttggttttctgttcccgattagtatgctgaggataatggcttccaattccatccatgtttctgcaaagaacatgctctcattctttaatatggctgcatagcgttccatggtgtgtatgtaccacattttctttatccagtctatcattgatggccattgtggttgattccatgtcttggctattgtgaatagtgctacaataaacataacatgtgcatgtgtctttatgatggaatgatttctatttctttgggtatatacccagtaatggaattgctgggtcaaagggtatgtctgtctttaggcctttgagaaatcaccacgctgctttccacaatggttgaactaatttacactcccaccaatggtatataagcattcccttttctccacaatcttgcaagcatctgttatttttttattttttgttaatagccattctgactggtgtgagatagtatctcattgtagttttgatgtgcctttctctaatgattagtggcattaagcttttttcatatgcttgttggtcacatgtatgtcttcttttgaaaagtgtctttttatgtcctttgccaaatttttaatggcgttgttttttcttgtaaatttgttaaagtttcttatgggttctggatattagacagatgtaagatgcatagtttgcaaatattttctcccattctgtaggtcgtctgttccctatggtgatagtttcttttgctgtgcagaagctcattagtttaattagatcccatttgtcaatttttgcttttgttgagattgcttttggcatctttgtcatgaaatctttgccagttcctaagcccagaatggtattgcctaggttgtctttcagggtttttatagttttgggttttacatttaactcttcagtccatcttgagttgatttttgtatatagtataaggaagggatccagtttcaatcttctgtaaatgcctagccagttattccagcaccattattgaacaggactcctttccctgttgcttgtttttgtcaactttatcaaagatcagatgattgtaggtgcacagctttatttctgagctctctattctgttccattggcctgcgtgtctgtttttgtaccatgctgttttggttactgtagccctgtagtatagtttgaagttgggtagtgtgttacctcccgctttgttcttttaacttaggattgctttggcaattcagactctttttttggttccatactaatttttaaatagttttttctaattctgtgaagaatgtcattggtagtttgataggaatagcattgaatctgtaaattgctttgggcagtatgtccattttaatgatgttgattctttctatctatgagtatggaatatttttctatttgtttgtgtcatctctgatttctttgagcagtgttttgtagttctcattgcagagatctttcacctccgtggttagctgtttcctaggtattttattctctttgtagcagttgttaatgggattgtgttctgctctcagcttgactgttgttggtgtataggaatgctcgtaatttttgtacatcaattttgtatcctgaaactttgatgaagttgcttatcagctcaaggagtgtttgggcagagactatggggttttctagctataggatcatgtcatctgcaaacagagatagacttcctctcttcctatttggatgccctttatttcttctcttgcctgattgccctggccagagcttccaatactatgttgcataggagtggtgagagagggcatccttgtcttgctccagttttcaaggggaatgcttccagcttttgcccattcagtgatgtgctggctgtgagtttgtcacagatggctcttattattttgaggtatgtttcttcagtacctagtttgttgagagtttttaacatgaagggatgttgaattttattgaaagctttttcttcatctattgagatgatcacgtgggtcttgtctttagttctatttgacccatcacatttattgatttgcacatgttgaacaagccttgagtcccagggataaagcctacttgattgtggttgattagctttttgatggctgctggaaaggtttgctagtattttgctgagggcttatgcatcaatgttcatcaaggatattggcctgaagtggttatttttgtttgtttgttttgttttgtttttcttgttgtgtctctgccaggttttggtatcaggatgatgcaggcttcatagaatgagttgggaaggagtccctcctcctcaatttttgggaacagtttcagtaccagctcttctttgtacatctggtagaatttggttgtgaatccatctggtccttggctttttttggtttgtaggaggctggggatttttatcccagatttataaataaagaaattgagtctcagagagaagtgacttgcccaaagttgcagctcatgaaaataaaaagaagtggccagacatccgatctttgtaccccagtgctcctctccactttgtaccccagtgctcctctccaccctgcacctcttgggcttgctcttctggtggaaacacaaggacctgaggtgaagctggagagtggaggggatggtggagagggctgaggagagcaggctggtgagttgtgctttggggcctcttagcccatggagatacatgaaggatgaggggaaggggttggagcatagaaatggagtttggggagcaggtaacaggagaagctggctgacctttcacaacacaaatttcaggccagtcctgactaagatgctctgggctgaagccaactgagcatgagctcccacagagaaaagaggtttgcacatcctctccacatgggtgcccatgagccagccccctactaagcacaaattcagggttgctgccctaagcagctactggctgagtgatcaaagcaagtcaagagccttgaaaagttgaaagtggctgctcaaccagcagtcagtccagatcctatctataactccagtcctccccagccccctccttccccgatgagagtccagaccagcctcaaacagaaactatggagatgaatcaaagacagagccaagacatctttgcctgggaattctagtgtatccatcataattgggtttattttacccagtaaagagagggctttccactcacctcggggggggggggcctccgagccttcttataacagtacaacgaaagtgaaccacagacatttgttcccttaattaacagcgttgctcttttgggtgggtcttgaactgttagcactggtctcccacattctttagtcagttaagggctgccaccatcatgacatggaatagtaggactgggagaatgtactgaatcagtacctagtgcagaacaaaacccttccatggaacataaaaggtacaaatattacattcacagccatgtttgttcattcaaagagcatcttctgaagactttctgtgtgccagacactgtccccagtgctggagaaaatagacaagatccctgttatcatggagcttatatgctaatggtggagacacaaaaaagccaaataaataaataaacacgctagaccatgtcagagagtggcaagtgccatgaagaacctgaaaatgagacatggtgttgtaggagatgccttagatagggaggtcctgggggcagagtacctggaggtctgagatcagagcttttacgcaaacagagcaggtgcagaagttgtgttcgaggaacaaccaggaggccagttggcctgcaaggcatgagccagggaatggtggtacaagataaacttggaaattgtttatgctctgtctctcacactgacttggccttcgatctcagctaaaatgctgctttacttcctactgtattggtgtttgcaaccaatgcatgatgtgtcatgtactttctactcagagaaaagtcctctaccagtgttgatgagggtgaaaagatcattcctactccaggaagtctctttggaaacttggtggcggaagacaggagagctaagagcagttcccatcttgtatgatctaaggttcccctggaagtgaagccacgatcccctgtagctatcacagcatagggatgtgcggagatcctggctccacatatagttggcaggaggtgagtctcctttaaggtgttcaaatgtagcacacacacacacacactctctctctctcacctgctgtcttgctcgatgctccatctcttctattgctgtcctgagaaccaagacagctccatgtacaagtaactcaaaaccctgacactccctcacactgcccaaaacaagacactgtcaaaataagtcacagatgtcacagttccttgtcactcagttttcttggcttagatttaaagcattaaatcagctcatcttcatctctcattccctagccccagctcttccctgctgagttatctttgatattcccttgggtggatttcttctccctccttcttctctaagaatctgtaagtttattttctctcttactctcactccccttctcatcctgcctcaccccggtccctctttctaagccctcttctccaccgccctattctagacaagatcttacaaaaatacctttcttccataatatcttctctacttccacaagaattcccccagattcctttcctttttgttgaaagggctgactcctggcatttataattttaaccagcagaagggcttgaaatgagaagtatgagtacttcgactcttttccacacctgttcccaatctccacttttttttgaatactgactctgtaatgggtggagagtaggggaaaagaaagagagatgggaaaacaagaaatgaaagggatttttagtaataaaagcaaatgaggagataaggtaactgtgttctgaacatcagggctggagaggctgatgctcatgatggacacaggaggagaggcgcagtgctggctaacaacctggacacagcaccaagcagattgtagtcacatgctaaagcatgtgctatgccatctaggtgcagtagagatcagccataggctggagtttgccccgaaggaggtggcattgaggtcacacactgcagagtcatccacatgactttgtagattggaatcttattttatcaactgcttacctgaaataaacatgccccacctgaaacttaaatgcagcttgatcttttctttggaagagtgtgatgcttacgacaggaatgtgttgccatgggatgctgctgatattttgtccacactcctatcttagcctttcgccactttgaaggtgccctctttctccaggataaacatcttcaacaacggggactttccaacagagtggaccaggtgaatttttttaactctctggaatttgatgttatgtgagatttctaactgtggaattgcgctcacattcatgttagaatattatgtctatcacatattcttatcagcacatttttgtagccagagatgtatgcaacccaagtgtcatgagcccactacacctaagagtttagacttactaattcactgaaaacttaaaagaggccaggatgtagtagattgcttggtgatagatagcagcctactcaccctgtctcttgagaaataacttcacttctctcccccttatcctaattctctaaaacagtcctatcttccaatggataaagtacagacagatatctggttacctttattgtaaacatctatagttcacccaagagcctagatgaagcacctcacatagcatgccaactgctggcccgtgtatttagtctatgtttaatacccttttacttaggtttcttgccctgtaaattggaattagactaaaatctggtgtcttgagtttcacagcatattgagtttcacagtatgattttagcctgtctactcatcttatatctgatagcagtaaagaaggtaaattcattcattcatatattcctttattcattcattcatgtaaatttattgagcatgcattttgtgctaggcactgttcttggtatggtccacagctctgaacataacaggcaaaagttcttgcccaaatggaagttacattctaggaggtaatataaagcaagacaaaaatatccagtgtgttagacagagatatgtgctagggagtagtggagtagtggggtgcagttttaaatagggtactcagggaaagcctcattgagaaggtacttttttttttttttgagacagagccaccttctgttgcccaggctagagtgcagtggcgccatctccactcactgcaacctctgcctcccagattcaagcaattctcctgcctcagcctcctgagtagctgggattacaggcgcatgacaccacacccagctaattttttgtacttttagtagaaacggggtttcaccatgttagtcaggctggtctcgaactcctgacctcatgatccacccgcctcagcctcccaaagtgctgggattacagacgtgagccacggcactgggccgaagttaccttttttaaggttttttttttcagccaatgttaccatggtgtaatttatcttctgtaaaattcccacattttaagtgtacagatgagtggcttttgactaatgtatacatccactaccctaatcaagctacagaaaatttccatttccttgaaacgtccctctttctttttcatatttagtctcctactcccactcaagctaccacagatactatttacatcattataggttagtttttcctgtcctagaatttaatatgcaactatgcatgttaagtcttttgaatgtggcttcctttggttagttgaagccatgttactgcatttatcagtcattatttttttattactgagtctattgtatgaatgttttataatttgtttactcagttacttattgtttctattactcttcattctttgtgtggtttcttcctggtactattctctttatactgaagaacatcctttagcattgcctgtagttcagatctgcttgtgatgaatcttctcagattttgcttatctgaaaatgtcttcatttcaccttcaattttgaagactatttttattcaatttatatagaattctgtgtgaataggatttttacatctccaaagatgttgtttcattgtcttctagcctctactgtttctgatgagcactagtaataattcttaactttgttcctctgtatgtgtctttttctttggctgcttttaacattctactttatcttcagtgttcagtcatttgactgatgtacttaggtggggcttcctttatcttcatcttacttgggcttcgtggatttttaagtcattttttaaaattttgggaagctcttggccactatttcttcagatattttttctgctctctctctctctctcctccttctgggacaccaaatagacgtaagttagactgtctgatattgttccataggtctttgaccctttgttcattttttccttaatattttttatttctgttcttcagatttgatattttctactgctgtgtctccaacttcactttttcttctatcatctccaacctgctggcaagctcttccgatgaatgattcacttcaggcattgcacaattctagaatttccatttgtttctttttagggttcccatttatctactaaaaattcctcatttactcacaacttagggccatttgtctctaattaattaatatattttttgaatatatattgtaaaacatatatgttttaatgtctttattttctaaatccaacatttggtccatcttagaatagttcctttgctttcattttttactatggattacactacccttgtatggtttttgttggtttttatgtctagtgatttatcattgaatactgggcattgtgaatgttacattgtagaagctctagctcagcactcttcaatagtacctgcaatgaagaaagtgttctgtgtctgcaccatccaataggacagctgctggccacatgtggctattgaacacttcaatgtgactagtgtgactgaggaactcaattttaattttaatctaaatgttcgcatatttacacccagaacttctcaacctctgttatactgtttcagtctcaacctcatagcagctgacatctggcaagcctctgatggttttccctgcacatatacagtcaagccctcagccgtggactgagggaggggcttcccatacgcatgcaaggacttctagggctttgtctttgcacagattccagctatttcagttgcctcagattctgatccctgcctcttcagcccagcaagagtcctgtgctctgctcaaactcaagtctccaggcagacagctggactactgtggggctcacctcacactcccctctccccatttttgcagtctggtgttgtttattttccattgtctgaaaactatcttgcttcacataccttgtcctgttttctaattgtttacaggagacgaaatagtctgaaactagtcattccatcacagtcagtagcctgagaagtgtcccttcaggtcataatccaaagaagattgtgggataactaactaggggaagagagtttcaaacagggggacgtcaatggaaagggtgggaggcagaagcatgcctgcctgacttagaacggtagggaggcaacatggctgagcacgagagctaaggacagagagagtaggacagtaggtcagagaggcatggtggtgggaaagacactgtttggcttcataggccattatctgcactctagcttttactctagtgagatgaaaagtcattggaaagtttggggccaagaactgatttaggttttaacagaatcacactagctcttggaaacacctccaggacaaaagcagggtgctgaattagaaggccattgagagaatctattgactaaacttgcaaatctaattaaaattctgaattattcaaggtcgatggctgagtttttattcatttcctagagtttggggctcacgaggagacaggtaccttagtgtggaagatcacatcatctgaagtctgattggctgtgtgactttaggcaagtgacttcaactgtctttctttatttctatacaatggaaataataagaatacctattacataaaagatattatgacgattaaatgagataattcctgtcaaattctctaaattatacctggtgcatataattcctgtcaaattctctaaattatacctggtgcatatgaagtaagcgttctacaaatgttaactattactatctgagaggctgaatgtctgatgattattactgtaccctgtggacattgacattgatctactctgtgaataaagggtaccacactcaattctgattctcaagagatatgtgcaactggcatagaaaaaatatctcaaaaacaagactgaaggaaattagagccaagtagaggtccatgctgtcagctcttgcataaggagggaaggctgaggcgttattcattcaggctgaggagatctttgaagactattgagaggcaatgagttagggtttgaagaatggattagatacagagactgtggaaagggaagggaattctgaaggtcacctgaacttgcggccatcactaatgtttaaagagcttcttaaattcaaagtgaaaaattatgagttcaacatggttattatccccttaagctcacatttggaatcaaccataagaagtaggatatcattaccgtacagctgaatggctttattaacttatttttggaaattagatgacaaatgcaagcacagtcttgtttaacaagaagcatttcccagttgtttctatgagaatttaagaaaggttctagaaatgcaaatagagagaacccagtcaagtcctgaaatctcagtgcagcagaattgagaaagtgaataatggcccacaggtcacaggaaggcaatgaatacgctaatcaaaggttgtgattaatgaatgttgtctcacatttcatctggcataacatgtgtccaattgatcatttttagcatagctcatcagaggagaaaaacttggtgaaatatgatctggtggggcaggatgcaccagttgcacaacagacataagctgctccactttggccacacctgtataaaacatgagaaaagtaggttttcatagaggttgaggcatatctaactacctcaagtagaaaaagagtatccatttatttaatgagggagagagcagtggaaaggctcagcctcatccaggctgagaagtgattaccttggaaatgctgtttgttttgattgagaaagtcagctgagaatgtattttaaataggcagaaaatatatctatcaaagaaatactatgcagtcatcaaaaagaatgaggcatgtttggtattttaatagttatctccaatgtttataataaagtgataaatgcaatatatagataattatatagtgtatgacaattatgagaaaaatgaaatgtacatctgcacatacataaggttgcacacacaaaggatgcctctgggggagggaaattgggtagctgggactgaaaataaagataaacaggagacttatgtttcagtctatatcttttgaatttatttgtatatgcacctagatccagatagttttatttctcggttgaaaaaattaaaaaagaataggaaaaaagaaaataacaaccatagtttaattttttttttttttttttgagacagagtctcgctctgtcgccaggctggagtacagtggcacaatctctgctcactgcaacttctgcctcccaggttcaagcaattctcctgcctcagcctcccaagtagctgggattacaggcacacaccactacacccagctaatttttgtatttttagtagatatggggtttcaccatgttggccaggatggtctcgatctcttgaccttgtgatctgcctgccttggcctcccaaagtgctgggattacaggtgtgagccactgcgctcagcctaatttaatttttaaaagagctggaatgcgtccattcctttcccatttgcaaagggctccagaatcatcccagatgatggctttcaaaatgatagttcaataagggagatttaggataaagtgcttctttctgatgcttcacttaagggtccctgagagtattagtttgctagggctgttgttaaaaaacaaaaacacaaactgagtgacttaaacagcaaacatttattgtctcccagttctggagactaaaaggctgagatcaagggtgtcaggaggattggctcctttcgagggctgcaagggagaacctgtggctctctcctaacttctggtgtttgctggccgtctttggcattccttggcttgtagaggcatcaccctaatctctgctttcatgttcatgtgtcactgtccttgtgtgcatgtgtgtttatgtccaaattttccacttttataaggacaccagtcattggattaggggtgtgctctagtgacttcaggttaaccaatgacatctgcaacaaccctatttccagataagatgacattctgaggcactggggcttaggacttcagcataagaatttggaggggacagcactcaactcatgacaccaagggacacttacccagagttaaactgcttactgaggggaggtttttgctatgtgtctatgaagcacagatagtaacatgcatctcctcatgcccgagatgtataaagtgaatacacgctggtatgattgaaaaccttaatattttttaacgcactaccatcctctgaggaaagaagagagcttaaacttgcttaactaagaacaacagcttgttggagcgataaatccatgaaacaaaactcagatcccctgctcttccctccccatccatgccagctaaaggcatgtgcacacagcaatgtttattaaacacctactgatgcccgatactgcactgagagccagggacggagttggacagaacatcctcctgcccttcaggtggagaaaagacacataaaataatgcaggcatgcactaagtgactatgcttcagtcaacaacagaccgtatataggaccgtggtcccgcaagactatgatgaagctgaaaatttcctatcacctagtggcattgtagccatcctaacatcacataataatgcattgctcacatgtttgtggtgatgctggtgtcaacaaaactactgcattgccacaacatataattgtgtacagtctataatatttgatgatagtgaattactattttactagtttgtttttactatagtatacttttaatcattattttagagtgtacaatttctccttatttttaaaaattaactttaaaacagtctcaggcaagtccttcaggaagtattccagaagaaggcattgttttgtttttgtttttgtttttgagacagaatctcactctgtcacccaggctggagtgcagtggcatgatctgggctcactgcaacctccgcctcctgggttcaagagattcctctgcctcagcctcctgagtagctgggaccacaggcatgctccaccacgtccagataatttttgtatttttagtagagacagggtttcaactattggccatgctggtctcgtactcctgacctcatgatccgcctgcctcagcctcccaaagtgctgagattacaggtgtgagccaccgcgcccagccaagaaggcattctaggagatggcaggtccctgtatgtcattgcccctgaagatcctccagcagggcaagatgtggaggtggaagacagcaatactgctgatcctgaccccatgtagggctaggctaatacgtgttctagtgtctttctttttaattacaaaagagtaaagaagttttaatttttcttaagtttataaagtagaagaagttatagtaagctaagggtaatttattattggagtaagaaaaattgtttgataaatgtagtgtagcctaaatgtacagtatttataaagtctacagtagtgtacggtaatgtccgaggccttcacattcactcactgactcacccagagcaatttccagtcctgcaagcaccattcatggtagctgctctatacagatgtgccactttttaccttttatatccatattcatactgaacattttctatgtttaggtaggaagtatttacatacacaaatacttaccattgtgttgccattgactacaatattcagtacagtgacatgctgtctacttttgtagcctaggagcaataggctagaccaaataacctgggtaagtagtaggctctaccatctgggtttgtgtgagtacactctatgcactttgtacaattacaaaatcatctaacaatgcatttctcagaacacgtccccatcgtcaagtggcacatggctataattatatcactatagtatagtaaatgtagagccatgaccaaggcagaaagaaaaccgttaactccacttggcgatgccaaggaaggtgccctatgagaagtgtcataagagatgactgtgaaaggctgactctgagggaggtgagggcaggaggaggtgactagggaaaagggagtcctggggcatgtcgtgtctcaagcgggggagcccagacagactcctggttaccaggaatggagacaggagttggaagtaaatctcaagtgcagacgagcttctgaaggagcttatcttcagcctgaggatttgggacttctttatcctccaggaaaccctggaagatttagaggagccacttggtcagatttccttctttgaaatatattagattggtgcaaaaggaattgtggtttgggactgtgaattttagatccttataactagactcaaacacatctttattaattcaaataggaacaattactatcaacacatttttgccaatgagaaataagtttgtttattcctgtagcataaaggtctgtgctttgggattcaatgaacacttggaaagcattttctgcacactgctggttgtggaagcaaaaagttgttgagatgcttgaagaagtggtagtcggttggcgagaggtcaggtgaatatggtgggtgaggcaaaactttgtagcccaattcgctcaacttttgaagcattggttgtatgacgtgcagtcgggtgttgttgtggagaagaatttgtccctttttgttgaccaatgccagctgcagccactgcagttttcagtgcatctcattgatttgctgagcagacttctcagatgtagtgatttcgccaggattcagaaagctgtagtggatcagactggcagcagactaccaaacagtgaccatgaccatattttggtgcaagtttggctttggaaagtgctttggagcttcttctcggtccaaccactcacctggtcatcactcgttgttgtataaaatccacttttcattgcatgtcacaatccgatcaagaaatggttcattgttgttgtgtggaataagaaaagacaacaccaccaaatggtgattttttttactttcagtcaactcatgaggcacccacttaccgagctttttcaccctttgaatttgcttcaaatgccaaagaacagtagaacagtcgatgttaagttcttcggcaacttctcgtgtagttgtaagaggatcagctttaatgattgctctcaattggtcattgtcaacttccaacagctggccgccacactcctcatctttaaggctctcgtcctctttgcaaaacttcttgaaccaccactgcactgtacatttgttagtggttcctgggccgaatgtgttgttgatgttgccagttgtctctgctgctttacaactcattttgaacttgaattaaaaaattgcttgaatttgctttttgtttaacatcatttccatagtctaaaataaacataaaataaacagcaagtagtaagtcattagcaaaaaaacataaagcgagaaatgcccattaaaatgatgtataacataaccacatttatttaagaatgtattccaatatcaaacagcaaattccaacaatgcaaaaatgcaattaacgtttgctccaacctaatattttcagagagaatgaataatggggaaagaaactgaagagaaagtaacaggcaaggagatatttgcaggtgagaaaaaaattatgaccaatagtctaaacagtggtagcggtggcatgaatagagaaaacaggggcacccttatcttccccgatttgtacaaattcagttaattctattttaacttatttatttgtgttatttttcagatgacaaaagataatacatactcactgtaaaaaattttggattaaaacatttaaaatgtataaggaatacaacaaaatcgccccttaattactcagaaataagcattcttattaatgtttgtgtatcctattaagttcttttcaaaatcatatctatgtacatatatagtcatttactcagacttttataaacagctttttccactttatatatttccctattagtaactttatagaacttgatttttgattgatgtgctatatttatttagctaatctagaggacagatttgaaaactgttaaggaattataaattgcagtaggaggtgattaattagctgatggggtatgagggaaaggaaaaaaactgagcaaccccaacttttgggctaaagcccttctttttacagctttcttcttgttttggccagaactggagggtccatcttgtgaaaaggaggtggcagaaggatctgtgaatatatgttacattcaacctcaacgatggtgaacataagcactgttcagggcatgcagacacagccccaggttcacaagctgccagaacattcattaaagtggataaaatggcctgcaatgaaatcctcaaaggatgtggtagataaagcaaatgccctcctaaacacagctgcaggctgccaaaacccccagccacacctggtgagcattctcagagaggagcaagtagagacagccttccctgccaggagggagtccctctccaggctgtgtggccctggctgtggtctctgcacctgccgcttgcctgatggctttcttgcattctgggagggcatgcctgtccgagcacttcctctgctcagtctttccatagcgagaggaggaagagcaagaggagtcaatacctgtgaggcacaataaatccagctgaggtgaataataaagcgtattcatttccaaaaacttagaagacaatgttagggcagatattgggaaagaaactgactaattgacccaggctttcatttcaggctcagtttggtttccattgcctaacacaactctcctacgctcctgtgcctcttcagaaatggcttctgattgaaacacaacctgtgtcttttgattgattgggaactgaaagatgttcctcttttaatctcatggatggaacccaatatatttcactttcttctttgtgctgatagacaaagcctcggaaaaaaatgctatttaaataatagctttcactgacagtagactcatgggaaaattgtccttccttccttccctccctccctccctccctcccttccttccttccttttttccttccttcctttttctgaagtgtatggaccattattgcttttactttgtcttatttggcttatgggaaaccgtgggactcctcatatatctatgtgctgagctgacataagggggactattaaccgcttctatgcagcatttattctgctgaagagaaaacatggagtgtggctttgttgaaaagctccccatcattcacagttcactgaaactcatccattcaatcatcaagcacagatctacctctgctccacttgtgcctgggatggtgctagatgctgagaacgtgccattgcccacatgttctcagcatctagcagaagaatcagttccagagcacactcacccagcttctggaatctcacaggttagttgggaggtcactcaaatagaacacgacgtgtgctgtaaacaagttaagcacagagtgcaaaggagcatctaattcaagagctgcttaggatggttttgtagagaaggcatgtatgattctaaaatgaaggcatggcacgtgcaaggctgtggtgttacaagagaacttggagcatttggagaagcggacgtagcgcaatgtgaggcgagagatgagagtggtacatcctagcaaggaaactcccagtcttggaggtaatggagaaccattgatgaattttaaggattttaagaataggcataatgtagtcaaattcacactcagtgaagtagtccttgaaccattgttcactgcaccacatggtcacagtcttattaagctgacagttgaaagtttcattggaaaacaaacctggcagttcttgaaatggaaacatgaaggtaatgcagggcctacaactctaggttgcaaaaagatcaaggacatttcatagatcttgccttacttttcctcttagggcaaaacacacattacaaagaccctcaaatgatgctcactgttaccaacatttttttctaatcttacatctttcatcctaaatgctcatgaaagacatgttgcttctggttcaaacttgggccaatgacaatgcttttcatgtttgttgacccaataatcagccattgcactcaaagacttagagcggatcagtttaaaaacagctattactgcatttgaactacagctcccctccagccctctgtatgtctgggcttgctgctgccacaggaaagctcctagttctacccagggagggattgtgtttctcagcctgtttcagcaccaacccgtaaaagctgcttatgtcaaatgtcagttaattgcaaacttacccgtgaggtttaattgaccttattccacaacaagtgtggccatatgaaataaacccaaagattcatgatcaggcaggtctaagtgttgcattttggagaatggcaaggggtcgtttttggaaggagatggagcacctcctatgctaatctcatgagattagctttaaacatcttcagtttcctccagtcaataatttgttatggaactgtcattttacatttaaacattttttgaacccttttatttttgcaccctttagcgttgggataaaaaattcttaagtcatatctcctccccactcccaccaccgccacactgttttatataatacttccttttactattttactgttttaaatttatctaccttcctgtccacaccccccacccccgcctcaccctgttgcttcagaaaaactcatgatttgtggaggagtaaatgctcacaactatctattctctcagccctacatctctctcaacttgcgtctctctggacagaacaatttttatctttttagcaattcttataccgcagttccccttcactgccataattctggtgaactcactgtttgagatcagtctccactgttccccatggagatcaccaaagccgatactaccagaagctcacatttgagccctgcagaacattgaggaaaagagcattttgggtttggtttgatttgtttcagctattttttcccctctctagaaacatgggtaggtggagcttaccaggtgaggttgctgactttcttctctagagtctgtagagtagagtatctacacaatattccatttgtgaaaatttgcacaatagactagataaacaacggattacggagaaaacagccctaatactcagaccctaaagcagtgctaggttaacaacaaggtgcttacttgcttggggtgccagccaaagtcagaacaatgaggctttcatggacttatccagaattttataactgataaaaagaaatcattttatgttttgtggtttagtattgctttaatctgggtttatatatgggaggaggcaccaaaatatttcagtgcttggggacttagactaaaagccacaaggaggaagagaaaaagcaggaaacaggctgccctttgtcacggaccttgtctttcctggcactctttggctctggttttcacagacatgagtctgatgagaatgctgagtgattggcttccagtctcagcagagtgtatatgaggaaagaaagcactggttgcctttgctacgtctagcctatgtctccacctcccccagtgtatcctagttagcccctccccaagcttaccccctggtcattctcacggggtcctgttttttaccctaggcctcttagtgctctctgttcccgccaaaatatctttcagatccgttagtcatattaaattagcaacagctctttacaagttaaaggtcttctccctcccacagataatgtcataccaacacgggttaaagtcttagctaaagaaggagtgtctaactttggattctcagtcataaaccagtggaaaggacatctgactagggggcaggtgatctcagtgcatctaagctcccgctgtatggactcgtgctgcctaacagagtagctaccagttgcatgggacgattacaatttaattaattaaaattacataaaataaaaaactcactacctcagtcacactggccacgtttgacccactcaataaccacatgtggctggtagctcccacatcggacagcacagatactgatcatttctggtctcacaggaagctccccattggatggtgcaaatctaagtaatttccttcttggcttatgcaaaggcaaggccctccccagtgcagggttgctcaggcttagcactattgccatcttggactggattcttctttgttgggggtggggatgtcctgtgcattataggatgtttagaagcctccctggtctctatcccctacatgccagtaacagccaccgccccccccacccagttgtggcagtcaaaaaacatctcgagacattgctaaatgtcccctaggggacccctacactgaagttggctggagctctggggatcagggaggacatctgcaagcgtgcttatgagttgtaagctctaagaggggagggacattgcacagggcaggtcaggcacattgtaagtgctcttaaaacattacagttgagaagaatttcagagtaacatttatagccaagaaagatattcttcccccaacttgggcattcccttgatgttaaattgtcctgtgcgtcaaaaccctaaagaactgcagggaagcctataaccccaaaggaaggcagagaaaggtcctgggggacaggttgtggggtgagttaacttattccagccaaggtgaaggagttgccccgggcttcactctgagacttggagcctagtgtgctaagctcccagttcccaaagtgaccattcccacgctgaatgtcattactgcctcatcagcagcttgtcagctgtaatttctaatcccaagccgggtctctcttcccaggaccaaagtcataaagatgtttgcccttgcacgggtgtttgacatgtgctaggccatatttgtgcatttgtcttagggccctcttgagggcttagcacttctctctgacccaggcaagactttatgtgctgtgcattcctcctgaacatgatgtcatgcttgtgcctcaccatggaattctgcagccaggcactggggctcaagtccaaagacgggaagacttaaaaggctcaaacaagcaaatgtttgtcattatttaagattttaagacaactgaattctgaaatgtttatggtcctggcctcctttgtgggtcatcaatgacctcttcccttttaggaggtatctcatggagagggcgtcttggcctgctcccctctggggccactaactcacaccagagctgactcaaccattccaggggaagattggtaagaagtttattcaccagacatgtctagctgaaatgaatgaaatcaaactcagcagaagtcaacacttagcacggaaggcaaagtagagacaaagggtcacccggctgctgcacaccggcctttagctttagctcaagttgttctgctttaaaggacaatgccaatcatctcataagtaaatgaagacaatgattcaacagtgctgtcaagtttgagagaaaagagaagccatccctacacccaacacttaatatattgttaggcttggggtgggttgcccagtgccttctgggatgacctgtgctcttttcttttatccaggagcaattagaatcaatctgcttcatctggaagttctgcccaagggtctggcaccataggaagttgtccaggattattttaaccctgttacaggatccaagtaattcctgatatgtatgaatgtaaagcccattcttgtattcagcgtttctcagtggagatacttttgacattttgggtgggatgaatcttccttatgggagtgtctccagcacacaacagggcacagaatgcaagtggtgtcctcctctggtcattgtcacaaccatccacccaccaatgcacgcactcccaggcaccacgtggtgggtggcactgcccccactgagcacattgcaagcttattgccacagaaactagaatgctagtactacccatgggagcaggcagcaggcctgttctttatttatttcactctttgattctgcagacctcagatttacccactgttattgatctgtggaaggcttttgactgtccattttccccctagggtgagctcatataagtggaagagaagcaaagagatagctgttgcacagctgttccattcctgctccctgttgatctcctaatgttgtgaatacaccctaagaattctcccaggtgtggattaagacgacttaagccaggaggaaatttgccccaaggcaaagcatcctcttttccctctgcagaaactttgtccaggcaccctagcatgagggattgcctccccatctaacatcttcacacaggccctcttgctggacccacattaatggacggcagcttctgacttccagcaggccctctttcactttccatcgtctttctctgtctgtgttttatagcatgaggcactgaagttatcaggtgatcagagaagactagaactggatataaaccaacagatcatcgagtaacgtggctttcaacctccagacttcgaggtctattgactgtgaagatactggaggggactcaaaagctattatcattttctaaaatggtgtcagaactgttcgatgtactttaaataggactcacaggtgtattaaaatgtcaagttttcttttgcctaaaactgtatgaacgcggtgcaataactggttatttcaatgctgacaaaagttctgattgacagaacttgcactcattatatatcactcagtacctaattgatatgataattttgaaatcaggaagactgtggagagagattagtaagaggtccttagtggtaaaaggactaaggaaattgtagtccgattgtctctttcttcaaaagttgaggcccagagatgttaagtgacttgctgacagttggatgattaatgccctagaactatggtggccatgccacaccagtacagtccctatgtgctcctgttgtcccagcatcatcaccagtaggaatccctgtcgctctcaaaagaaatccagtttgattaataagttacatggtcactctacctaaaacccaagtctccaactgccaattcatcccttttctcaccacacaactctacctctttctctctttttcctggttctcaaaattgtttctcctatctgaatgcatctcttatgttttcacaagtaagtcatcctcaaagtttgggcgactataaatgacagctccaaatccagatggcctgaaccgtgggaccttttgttcctgagtggagggggaaggaagatggtacggggcaggggcagctgggccccaggcaagcccagggccttgcccaagcctcagacagccacccatgtgctcctgtgttctcagtgacaaaggccaggaggggcagagggaagctggtgaatttttatgatttaaaaaatatgaatccacactggatagaaaaaaatacaatgtaaaacaccacccatgccgctctgaaagtctagaatgtccaggtgactccagaatggtgttcatagactttggcaatactttgaaaacctctgtgaacaataaaagttaagcatgagaaagaaaatatttcccataagaaaatgtaaacccttttccttgtctgccacatggggccaaacataccagtgtgtttaattggtagatcagtaccactctcaagaatttcttagatgccataaacacagaatgcaattttggtggagtcccacagcaagctataatcatgagcagggaggacctgggttcagcagctgtgctttattcctgtgttgctttgaactcacagcagagctaaatacccggctcataagaccttctgataacaaagtccagcggacttgggagaaacttggggttttttttgttttgtttttccttttttttttttttttgagatgaggtttttgctctgttgcccaggctagagtacagtggtaagatctcggttcactgcaacctccgcctccagggttcaagagattctcctgcctcaacctcccaagtatctgggattacaggcatgtgccacgacacctgtctaatttctgtatttttagtagagacggggtttcgccatgttggccagactgatctcgaactcctggcctcaggtgatccgcccgcctcggcctcccaaagtgctgggattacaggcgttgagcctctgcacccagccaagaaacttgttaaaatgaaaattgggtctatgtagactgggagattaaaaatgactcctttttaatgtaaggaactttgctttactgtttcattaaaaggtttgccagtgcaaaccgaaaatgtaggagccctttttcaaaagcaggaacaaaaacaacctctgctgtgaaaggtactaaaataaaagccgctttttttcttctgcagtctctcttttgacttgtcacaaggcttttaaaatcattcttattcgctatttaatgccactctaagtaaaggaaaattaaaattttaaattgttagcatgaatcttaccattcatctttatattgtgcaaagccagctttaaacgaaaatataagagcatttaatttgtatgctaaattgttccaaatgatgcaatttgcatatttcattcttaccagaacagtggaaaatgctgcacaaaactaattcaatgcttttatttcgcttctcaataatgcacattctttttttttttttttgagacagagtccctctctgtcacccaggctggagtgcagtggcatgatctcagttcactgcaacctctgcctcctgggttcaaatgattctcatgcttcagcctcccgagtagctgggattacaggcacccggcaccacaccctgctaatttttgtatttttagtagagacagggttttgccatgttggccaggctagtctcaaactcctgacctcaggtgatccaccacctcggcctcccaaagtgctgggattacaggcgtaatccaccgtgcccggcctgatacatgcacgttctatcaatgctctctacctttggcttactgacaagtaaggaagaatttaaaaaaggcctatgggttgccttatctttctatttctttctgtgtcttcattttcagtttaagttgtttgcaaatgcaaagaagtaacatgagtaagaaaggtcaaaccaagtttccttggtcatatgtgtttcttagaataccactgctgcctttgtgtttgaagcaagttttggttttcaaatggaaagtgtggcctctcagggctgtcagtgtccctccccctccccagctaactcagtcatagacaaaacacacttgggagtcacttagaagcttcatgaactcccacacattgtgaatacaccagaattctgagttcatggcgaatgctccatgtgaatagggtgacaagaaaggacaggcacacgtatctcctgtgtttctgctcattccatgctgtctcatcagaagtcacttacaaaatacaagtttcaagaggaaattattacaattttaatacggtggccgcagagcatgaaacccatcaagaagtccttctgagcaccaagtcctatgcaagcacacaggtgacgtgccatgaagctggccctgcacgtggggtggcaccatgcatgaaaatggtgaagagatcccaggggatcgggcggtgcactgagaaggaacaccaggcatccagacctgcacacagggcagtgtgcacagcaggagtccagggcagccagagattcactaccagaggtacagcccgagagcacatgccatgccaggaaagaggagacaggcagagacaggaagatcaaagtggagggagaaaagccagattactggttaactaagacactcagccggcagtgtcaggagagagccacaaaatgaaggcaagggaatcacggaagccagatactagcaaaggggcatcggaaaccagtggccacgtggctctgatcccaagcactgagtgccctccccggcatccttgtggggctgtgaggttcgtttcatgtgtctggacgtggctcctcagcgtggtcttccagctcctctcatccctctaccctcttggtaaaaacaagacatcttctaggagtgaggcaacctccccgctgccctgtagagagccacacttctgcttttctagtgttctaagaatgcttttcctgatttatcatcgttaagaatgggtgggaaactagctatgttgaacatgtgacgtgcaaggtggttaatggtgatccaccaatgagcaggacgccaggaccttgtgcaactgggagactttgcaacaccacagcggaaggctgtccctcagaggtttgtagccacctaggggcctccttctatcacccatgactaagtcttctgcattagcttagagcagggtttttcagccttgaaaccatgaacatttggggccagacagttttctgttgtggaagactgtccagtgtaccgtaggatgtttagcagcctctctggcctctgttcactgcatgctagtagcaaccccctttccctaccctgtgacaaaaatgtctccagacgttgctagatgctccctgtgggaaatcatcacccttggtgagaacctgtgactttgagcccatgagccctgcagaggatcatgtctgagaggacgccactcccaccacatgctcttccagctggaatggttgtctttgcagtgcctgcttttctgaaagtgtctctttattgctttggcttccttctagcactatattccccactcctgggcaagttagtaaggcctgggggtatagtaaagtcactcagtgggcaagtctccttgctctgtgttcatccaaagagagttagatcagccttgaaagtcactgcaaaatatatatatcctgaggcctacaaagatttttgtgagctcaccgtccctttgctaactctctagggcactgtgtactactatgtagcaagagctcaatgtttgccagccttgtcatatgttttgtctcttttaatcttcaaagagaaaaaaataactcctataacataacagcgtatctcctataacttataaaaaattcctataaagtagtattgactcccatgccgggaattaataagtaacttgcccaagaccacccaggtagtaaatggatttgaacttgggttttttggctgctggtctaagaccttttctatcaatgcttccctggcttcgtgcatgtaagaatcacctgtgggtgtttgcaaacaatgcaggtccccaggcctcgcccctagagccttggtaggcaggtttagagcaggccccaagaatcgggatttgaaacatctgatgaaacacgtcattccggtaatgactgtgcaggtgactgccccttgagtaacactgaactccattattctgtgcttcctggcaaaccatcagggaaggagggaaggagaaaagagaaaagagaggagaagggttgagagagattgaaagcactcaggctgatgcagggttgagaggagctggtttcctccttcctctctcatccttgcaggcttagccacatgtctgacaatggcaataccgtgtccaaaactccacacccacgagatgccccttgacctctcctgcctctgtgtgtttgggcagcctgggtgtgggttcccccagctcagtcctcaggtgccaggaccaaagctcccatcagtgaacctgactaattcacaaagcatttctttttttttttaagttctgggatacatgtgcagaatgtgcaggtttgttacacaggtatacgtgtgccatggtggtttgctgcacctatcaacccgtcatctaggttttaagccccgcatgcattagatatttgtcctaatgctctcccttcccttgcccccggcccaccaacaggccctgctatgtgatgtttccctccctgtgttcacgtgttcttattgttcagctcccacttatgagtgagaacatgtggtgtttggttttctgttcctgggttaattggctgaggatgatgatttccagcttcatccatgtccctgtaaaggacatgaacttgttcatttttacggctacatagtattccatggcgtatatgtgccacattttctttatccagtctctcgttgatgggcatcaattcacaaagcacttgcatcagcttcatttgattatggaaattagcccactaacattgcatttctttgttcacagatactttctaaaatccttggccttcgctagagactttcctggaaggtttgtctcccctggctagatcatgaaaaacctggatcagccttaagttggatatctggtcacttttgcttttaaatagtctggcaaagcaagaggtacaacacatcctggtttgatgtactttccagcaaaaagtattagcaaaacaataataatattcagagggctcagttcccagtagaattcagcacatactccagatctcctgaggttcaggtctagttgaagggaaaggaatgactgagatgagtttgagtttcagacttgagtttctcccagctcccttgagaggcaaagaaaatctgccgataaacacgaaacaaagctcattgtcctgctacttgtttgcaagcaattgtatgtctgtcctgcagacctcactgggctcacggcattttgaatagctttctgtgatgtaacgcacacaggttttcactcacactatgcgcagggaattcagctctcggagtcatgactacgtcatccttcacctctcaaaccatcgctgctggtggccttcgcttttatttgttaagctgtagcttcaggaaagagccaattccctccctccctcccttccttcctccctccttccttctttccctccctccttccttctttccctccctccttccttctttccctccctccttccttctgtccctcccttcttccttccttcctttctttgcccctccatttccctccctctttttctttcattccctatctccctcccttcattctctctctctctgtcatggttaacaacacatgcttcaacaggttttttttttaacctcttaagaggtatatggttaaaaagtctctttgctattcctgtcttgtacctaagccacctacccccaccccacccctgccatacacacattcatacacacaagtaaaccattggtactgatttgatgtttttccttccaaagtgctttcaatatatatgaaagcacatttgaatagatgttgtcagcccccaaatgacagcctgtaaaacacagtgctctgcatcttacacttttcactcaccattatatcttagagatctttccaaacgtaaagaccttgtacattcttttttatggcatcatagtactccagttgtatagattagcatcatttatgtagccaatcctctattaacaaaaattcaggttgcttccaatatgttgctgtcaccaacaatgttgtagcacgtagccctgcactatgtcttcctgcacatgtgccagtctgtgtgcagcataaactcctgaggatggcatttgaggatgagtggctgtatgcacctgcagtctggatagatacgaacaaatcgcttatcgtaggcaccgtgtggacctctcttccaccaatagtgcaacgggacctggcagtccctattgcaacaagttcctgaggctttcctgggataagaaaaaggcgagagagtatagaaggttatttaattagaagaccaggttccccctctcacttcccaagccacaaccatcaaaattctcaaacctgattctttatgatacaacccaagaaagatatatttttatttttaaaatcgtaacctaatgaattaggatttttttgactgtgagtaacaaaatacagttcaactcagcttggcagtggactgggggagaaagagcggcagggcgtggtcactgtaagaagaaggacacatctcatggtacagtaggcaggagtgcagccgtgctcccaggagggacagcatccaggagctgggagaccacaggacagccaaggatacagggcctgtcacccattgctgcttctatttggatcttctttcttgaaatatttttttcctctcttctattcaatcctcacaacaggtaaaggtggaagctcatagtgaccaaattcacagttggagacagactttgtgtgcatgtgtgcatgttagtgtgtatgagtgtgtgagtgtgcatgagtgcgtgagtgtatttgcttgttagtgcaagtgtgcaccagtgtgtgagtgtgcatgttagtgtgcgtgagtgtgcatgttagtgtgcatgttagtgtgtgtgtgcatgttagtgtgtgagtgtgcatgtttgtgtgtgcatgtttgtgtgagtgtccatgtttgtgtatgtgtgcatgttagtgtgtggcatgtgtgagtgtgcatgttagtgtgtgtgtgtgtgagtgtgagtgtgcatggttagtgtgtgcgttagtgtgagtgcatattagtgtgtgtgtccgcatgttagtgtgtgtccgcatgttagtgtgagtgtgcatgttagtgtgtgtgtgcatgagtgtgtgattatttgcttgttagtgtgagtgtgtaccagtgtgtgtgtacatgttagtgtgtgagtgtgcatgtgtgactgtatgtgagggtgcatgagtgtgtgtgagtgtgagacttgtgtgtatgttagtgtgcatgtgagtgtgcatgtgagtgtgtgggtgtgtgagagtgtgagtgcacaggatgcttttctgctttgattccccattcccagaaaagggcgttggccctgaacttggggccaggcacccagcctgggccaggcagctgtgaacagcagagcttggtcatgttgtccaagctgaaatgtgggtcccgctgttctgagtgggcagaagagccaggggaatcttttcaagccgagcagatattccacatggcatctgcacaaccacaaataaagttgtttatctttgtcactttaatattataacaaaagcattataaaaacaaggcagaaacataatgaactctaaggcccaataaatctcttggttaaatggccctcgtggtttctgaagttatcccagaatgggataatggcagaaatgaattaggtataaactggacaaattctcacctctcctgttgtttcttttcagccaatagtttcctaaaaactgggttatcagagacgctcttttagagtaaaacaattttttttttttacatttttaaaaacagagcttctctccaatgaatgtccagaaagaccatacatttcagggctggcctacaggacatatttcaaagtgatgtgtaatgtcattttagaagagtgagctgttttctgttgtttttttttaacttaaagacaaaatggccagggaaaaagctgccaagtctctgagtaatcttattgagggttcagctttctaagtatgaccttatgctagcaacagcccctgagtaacaagaaaacaagccaagctaggaagccttgtttctatgagacgaaatggtaagacagcaaagtctgaaggtgaattctaattatgtaacatgagtgagtcatcaacgccgtcagcgatcacagacaatgatgcagtgacccgccgtctccccacacttgcaaagcacagaggctgtgtttctcatcccccgctccacaccttcctctcacccctccttccttccttcttttctatttttctcttttcttttccattttgtgctgcattactcagggttctcagaaccaataagatacacatatatatttagaaagtgatttcttgtaagaacttggctcatgtgatcatggaggcaggcaggtcccaagatctgcagaatgagttggcaaactggggacccaagagagctgatggtgtggttcctgtctgcgtctgaggctctggaacccaggagagcggatcacatagctctagcacaaaggccagcaggtttgagacccaggaagatctgatatctccatttaagtccaaaggtgagaaaaagccaatgttctagttcaaagacgaccaagcaggaggatttctctcttgctcaggggaaggtccacctttttgttctattcaggccttcaactgattgaacaaggcccacctgcatcgggagggccacctgctttactcaatttactgatttacacgttaatctcatttcaaaacaccctcagaacacccagaataatgtttgcccaaatgtctggacatcctgtggcctagtcaggtggacgcatagaattaactatcacgtgtgccttcctgttctcgggtgcactggccacgcatgctgtcacccatttcccgtttatcatcttttctttacagccaagtttctagaaagagaagtctagactgtctgcagtttctcatctctcattcacaagtcaacccagcggcagttggcgcctgtccccatcattttcttgaaactgatctcaagaatctgcataatctaattgtcaagttctttcctctgttctttgtgtaataacgcaccatcctgaatctctccttcaggcctctcttctctgtgcggccctctaggagtgatagtccccaggatcctaccatcttcctatctatcttttttttttttaatttatttttttgagacggagcctcaccctatagcccaggctggagtactcactgctacctccacctcccagtttcaagcaattctccttcctcagcctcccgagtagctgggatcacaggcccgcacccccatacccagctaatttttgtatttttagtagagacggggtttcaccatgttggccaggctggtctcaaactcctgacctgaggtgatctgcccgcctcggcctctcagagtgctgggattacaagtgtgagtcaccgtgcctggccccctatctcatttaacaagctctgtctggcagatgttataagctctcttgctttaactgccagctctaggctcatgactataaaatctctgtcttcaacattctctctctctgaatctcagacttgggatatataactgcttacagattctctccccattggatagtctccacatgaaactggaacttaacatgccgcattcaaattcaccatttcccccgtagacttaattcttaatttcttctttctcagaatgatactagcatccatgcagtctccagaggttttatccaggagacatttattaccaacggctccgtctcccaccttgtaattcaaatcagttactatgctctttcggttctccttgctaaatatccatttcctctcctcttcactgtccctgtctccagcttaatccgaaccttccttataattctcaactggagtatagctttataatggatttctctccacctccatttcaactgccccttcaatgaattagtgactattttcagtgtgattcttatgcaagaaaatgtgatcgagttaattcccactgaaagcatttccaagcctaccccattgcctttaggatacaatatgaagacaattgcaacagtccaggagagagactgtgagctaagacagaggcaactgagatggagacacaggacagaatgaagggagctgggagatcctacaagctagaaatgccaagaccccattacccatgagacgatcagacgtgggagtgagagtaaagggagatgaaggaaatcctctccatcctgactttgatgataaagtgagtcatagtcttgttctctgagctggggaactctagatcctgactttcctcaaagcaaacagcaagtgaacttacttgggtggggcaccctgtctggggaagcaaagccttcaggaaactcaaaggtctgcgtagagatgaatcagagactcaataacgaagaaataaaaattaataccagatgggtgaaggaggcagttgaaagtccttgtaaatagtcagcatccaagagtgctgcagaagtggaaggtgccacaaacaatgctcttctgccaggagattcctaaaaatctgctggcaaagaccagagaaagaatcagagccacgtgcccagcaagacattacctaagctcaaaagggtttaaaggacttataaccctgccttttaccctcaattatttcatgatcaccaccatgccctttttcctggtcaggtggttggcagtagtttggaataccttgctgtttgtagaacatgttaaagcatgaattatttgttgctatgccttctgggtgcatatttggatgccctaacagatgaactaatagctcttttcatctcactctctttattgagtcttgcccatttacaacaaaggagagacttgttttgtagatctttaaaacacacctgaggattttgaattcatttataagccaatcccctccagtgatcattcagtaagaaccaaagtcatttgcaaagctatacaccaacaacatttaaactggttaaattgagccaaaccacccaatttggctgttcagccaaattcaagtatgtccaatgcattgggatattaaatccccaacaaattcttctttggcatggcctgacaagatcactggtatttattggttgcttttatacaaatggaaagaaatatatcataaccaaaaagttttcacaggcaacctcattagaatcttgcatgggacccaagagtgggctgaagaacacagtctttcctgccaaagagcagccttttgctctgcaagcaggtggctgatgggctgttttatgaagggtttaatgatctctgtctgccttagttacctaccaaaataaactgtgtgaatcccaacgtggtagaaggactccctcattaactgtcaagcaaaatcttggtagggctccacagcctgaggaaataaagttgctaaggaagacaagtcagtgattctgtagtttctacagacctctgcttcagatactgttagcagcccaggaagtagttctgttggctgcattgatcctgggcccagaattaccctaaggcagaaccatcagggagacagagctagatcagtctccattcccctaggacactactcatttggcgacaagctaaccagagagcttcactcaatttataatattcataactgataaaggccttttctggtatcccactaattatatatccaggttataacctaaataagatacaaaactgaggatgcatttttgtctgatctctttatttgatgcctgaggaaactgagactcaggaatggctgaactgcctgaagttgcacacctgagagtcgagcccaggtctcctgacttgcaggccacagttcttcctgctgtgaataccatcatgtgctgccagctgcacatggttgaatgggagttacagaagtttggaaaacctgggtcagatatcagactagagaaacatccaaagagagataagaaaaaacatagactggatggtccacaagcctcagtgtaggaaatgaagtggattagccaggaaatcaggaacctaggctgttttgagggggcataaaagctgccttgctcaatcatgcttatttcaatctatagagagaaacaccctacaggcagaagacctgccatttttacccatgcttggtccaagagtacgccttccttcatccatatttctagctttctccccacccactcctttctttggaaggaagttattttcctttcctatcactgaaaattctaacagagccccactgagagtcttcttcatcctacgtcctcatttaaagccaaattttactgagcacttactatgcaccaggtgctgagctggggtaacaaagatggagcagccacagttataatccacaaggatctcctcatccaaaggtcctgtttatgtagagtgcttgcttgcaccatgtggacagtgagcatacttctaaaccccaaatctcaacatatggtccaagaaaagcctgcttttctaatttgcgaatgttttataagggtgtctttaaaaggcttacaaattgaattgtgttagtaagtcctataacaagttcctttactagaaaaaaataaattttattaaatcaggatttttgagaaaaatctgtgctgtgtgttctccaaatccatatgttttaacttgtaaaacctccctataatcacagtctattgcagttgggaaggatctgaaatgtcacctaatccagaagatgtaaattttttattttttaacaatgaaacaatttttaaaaacaaatattaccgtgacttccaaaataataaaagaattaaaattggcacctttctcctaaaaaatgagcttgtttactcttcccgtcgcaaatgaggaaactgagatccaaagagagtgagaggtcaaaggtctcaaagaaagttacttgcagagtgagggtaggaacataggatcctttcctattctctttccacccatccatccatccactcatccatccatccatccttccattcacccacccacccatccatctattcatctatccacccatctatccatccatccacccattcacctatccatccacccatccatctattcattcatctgccatccatccatctatctacccactcatatatccatccatccatcattccattcatccacccacccacccatccatctattcatctatccatccatccaccccttcacctatccatccacccatccaccatccatctactcagccatccatccactatctatccacccatccatccgttcattaatccacccatccattcaacaatccacccaattttctattcatccatccatccatccacccaccatctatctattcatttatccatccatccatccatcatatatctacccattgatccatccacccatctagatattcatctatctacccatccaccaaccatccatctattcatccatccattcatctacccatccattcatctacccatccatctatctacccactaatccatctatccatccatccacttcacaaaccttcaataagtcctaggggtcctgcacttgaaaaacaggtagacagaggccagaccatgcatggccttatgagtcaccttaagaattttggacattgtcttaagaacaataagaaagacattgcagtactttttgttttgcttgggtttagggattttcttttaaaaacattttattgtagaatgtttcaaaagtagaaagagtagtatcaattacctagcttcaataattctcagcacatggaaaaccttgttttacgtctccccactttccccaccccactgggttattggcctgcaaatactcagtatgaatcttcaaaagacaaagactctttaaaaatatatatatatataatatatatataatataaaattataataccattatcaaacttaaaacatttccatagtaattccataatattaaaatttcattagctgactaaaaagtttagagattgggaactcacatgacacagttgacattttagagacatcagctctggctacagcatgaagaaagggttatagagagatgagccaagtctcaagggccaatgcagtaatccagatgagaatggaagtggcctgaacatgacagcagtagggacagagaggaatggagaggtacaagagcactgcaggaggcatcgtcgagaggacatcttgaaagccatggggaagatagacaatggaaaccattaggatgaggccatggggaagatggacaatggaaaccattaggatgaggcccagcatctagtgtgggtggtggtgccattcactgagaggagaccaaagctgaaaatatccatttggattaacagatggggtgtgtcttttggagaggtggagcacagggtgggagaggggcatcacggggagctgtccagggccagctggagagaatgcttgggctggagagacaggttcaggagtcctgaagctgtaggtggaaactgaagttgtggctgcaggtggtgaaagtagaggaggctgaggacagaactggaggctcagtgccatgatgggaggtgaagagaaacacccagacagactagcaccaaggaaagagcatcatttaaaaggggaaacgtggtcaatggtgtgaaatcttgcagagatgtcaagtaaagtcagactcaaagtgggccactgggtttaggaaaaaggatttagagcaagggatgttgggaagagcccggttggtgagggagagaaagcaagcaccagactgtcaccagtgaaaacggaggaactggaatttcttctgcgcccgacccaaagtgctaggattacaggcgtgagccactgcacccgacccagtctgtaatattttattatggcagctctagcaaactaatacagccaggcactgtgattaacatgttacttccttctttttatttaatattcacaaacatctcatgaggtaagtgctcctgtatctccttttcttgatgaagagattgaagcttagagagggaaacaaactaacttgcataagatggaaaagtcagtaagcagaattctaatgcagtttcccagggatgctgtcacaaagcaccacagactgcagggcttaaacagaaatcgatcgtttcacagctcgggaggctgggagagaccaacgggtcggtagggttggtggcttgagagggctgtaaggaaagaatctgcccatgtttcttcatatcagctttcctctccgtattgctcctctttataaggacatcagtccagttggatgaggggcccaccctgctctagtaggacctcatcttaactaattacatctgcaatgactttatttccaaataaggtcccattctgagatactgggggttaggaatttaacatatgaatttgggggtacacaattcaaccctcctgccctgcctggatgagtgtgagctgaaggactcagtcagctaggggaaaacctgacttcagggtcttaaaggaaaggggtgactgctgggagcaagtcaggagagaggtcatatatggagaaaagtcccatagaaggcaagacaggatggcattcagtggcaggtgacaggtggagggattcacttgggcatgagaggacacattttccttattgttacaaggatgagggaaggaaaaagggatgagttgaaatgtgaagtcaatctgcagatgtggaggagggaagttgaggaagttcatttcagagggcgcctgctttctttgtggagcaggtggggagactgcctactgaggttaacagcagggtttaagattggggctcagaagaaagacagcaaataaaaccagagacattgaaaaacatggggaaagtttgaaacatccgctgtgtataaactgcaacagcctgctgtttctagactaggccccattcaatgtagcattgcagaagataatctactctcattttaattagaaaaataggagaagaggagggtgagctggccagggaactacagaaggctgcctgacagtaacaagggtctagatggcattggtggccctgaggttgcagtggcaccatctgcagggtgtgtggttttgccagccatgctcaatagctgggcgattgatgcagagtaagtaaacagttgagttcatccaaagctgggctttggccagggcaatgcattaaaaggacaaacggcaaggaggttgagcatattggcaagaggagggtgaagtagggaagctcaggggtttcagtgggcagagagggaagtgggcatgtgaggaggctgtggctatttctgctgaagaggcctgctcatgccccttgctttcggagcgcatggctgttgctgcttcctggaggaacagatgctgccagatgtgccatactaatgagctgcaggctgacaggctccccagatggtctccctcctctgcagtggtcctgactggtcccagctgggcaattcagcaatttgtgctcagtgctgccacaacgctcagagcatgctctggggacacacacccctgtgaaaggatgaggttggtaccagctgccctcctagtggcgtgtcgatgtatcccctggatcagtcagctcatttctctgttactttaaaatgcagtatggagtgactctgtttacatcttggattttattgctgtaatcttctaagactaccaatcttcccttagctgccatatttcaaataaaaactatggatattattataaatattattgatattactattctatacctctactgatgttattagcagtcaacttgaaactccaagttaccatattcacttcagtatcttcatatacaaataaaggagaagaaaaacccataaatgttttagaggggtggtgacacactaatgttattcctagtacaaaatggtcaacatttaaaaaaaatactaaacattgtcagaagcaatgggagctattataccttgttgatgagaatatcgattgatacgaccactttggaaacagtttggtattttctgttaaagctgaaaacaaagcaggcaaggttctgtgagcctgtagtcccagctactcaggaggctgaggcaagagaatcccttgaggcagcctgggcaacacaaagaaacaaggaaggcaggaaggcagggagggatggagggaaacctatcatccagcaattccacataaacacaacagaaacagataaagatctacgtagcattattattcataatgggctagtactggaaacaacacaattgtctgtgaacattattaataggatggaaaaatgttggcatatccatacagtggaataccatacagcaatgcaaattacaaactacagctacaggcaataacacagatgcattgctcaaacctaatgctgagtgggagaagctgacacaaaagatcatatgctgtgatccatttatccaaagtttaaaaacaggggaagtcactttattgtataggagtgccaagtgacatagtaaagcacagagaaaactaaggagggaatgacgagaacagtccaggtagtcacctgtaggcaggcccaccgttaacagacaactggcacattcagtaattgaggacacataagtatactttagacgctgctttgcttatatacaaataaaaatctgcaatatatatcatatggaattattcttttcctttgacatcacttcaaaatgtatattatctgattcttatcatgagtttaaaacaaaggatcaatgcctgatattctcccaaataataaattatcaggattccttggagcatgacaaaaaacaattttttgtggggcttaaggtagaagtacagatggagaactgcatattatgggtctaaatattgtaaaattataaattaaactaacaagctgttaaataaaagatgtcccggccgggcgcggtggctcacgcctgtaatcccagcactttgggaggctgaggtgggcggatcacgaggtaaggagattaagaccatcctggctaacacgatgaaaccccgtctctactaaaaatacaaaaaattagcccagcgtagtggcgggcgcctgtagtcccagctactcgggaggctgaggcaggagaatggcgtgaacctgggaggcggagcttgcagtgagccgagattgcgccactgcactccagcctgggtgacagagccagacttcgtatcaaaaaaaaaaaaaaaaaaaaaaaaaagatgtcccatcctcctacttggacaaatgtctcttcatagtgacctgagaaaccacgttggaccttagaattcttggactgcttgggtcttcctgctgtaacatgtgccacaggaagaagccacccctagacccagccatctacccttatgccccagccctgctccatcccataacccaagggccttggtgctcatatgtatcactcttgagccctcaagtctaccttcacccatggccttttacgaatatctgcttccaggccccccgtcaggaataaggacttaaggaagagcccacaaagaccaggaagtaggtttggaatcgtctgaacaggaagtcccaatgtcctggtccttggcacggggtctagaaagggagacatggatctcgggtgggcatggtctcttggccccacagacctctttccccttgagaaagttcatggctggaggacagccagaagcccaaaagcacaaggcccaacacagagaccccggtgcatggggtaagggtagtaccaccttaatgggaaagagaggggttgcactggaaagggctcttggaaagcttctggagtcctggcagtactctatgtcttgacctgggtggcagttaaatttataacaatttattaagctatacatttattttatacagttttctatatgtgtgttatatttcccagtaaagaattaatgacatgtgtgtgtgtatatatatatatataatttctggtactgtagtttatggtatccccatagacaaatcagctctgagaggttgtcttataagcacagacaccttgggcagttaaaatgcctcaaggtgtgagtacctaaagaagcaatagacagacagggcgctggaaacgcagtaaatctcccttttgtttctccatcctgtgtggggccaagacactggggtaaccacacatgggttcaggcagagcaaatgagtcatgggcctgtgtccccttgcctagccactgcaagtgcctcagaggaaaattcctttttcccccctcttagccaagactataaatactgcgtttatcaaactgaaattacaggaggctgttcccatcctggtagaagtgaaaggagaccaactcccaattatcctgtttggaaaggagttctaggaggacttctcttcctcctaagggcagctgcataggttcattaatttttttgctgagcttctattatgtgccagacactcttcttatttttctgcttccccttttaaaacaacctcttacttattcttgataggaaaacactgtccttttacaaagattcacattaccaattctcaaaaagatattcacgtgccccgtgtggtttaaatatcagggtttttctaaggatatataccccaactatagcctacaaatacatacacatacatacacacacaccatctcaaaacagccttacagctgcaagatattgaaagagagtgaaaaattggccagtactaactcaccgaaagcccagtccatgtttttcccaaaaaatcaaattctgggctttgcatctaagctatttaaaagccacatttccaaaacactagtttttctccttttctggaaacaagaaaagcatatggctccagtgaccttcacaagctgctggtaagaggtagagtcaggcacatcttgtggcttcaaaatgataaaagtggtaacatattaagttggtataaagggggatggtggggcctcagggatgggagagtagaaaacaatcaatgaaatcaatgacaagactaaaactgtaggttataggcaaggaaatttcactctcacctctactatccatacaaaacatctggcaaacgtctacccatctctcaagactccacccaagattgaccttcctttgtgccctcaccagacccactgcacatttgacccgaaatgatgtaacattttattgtgctgtatttttgtttgttcagtgagactgtgggatccttgaggacaggactatattttatgtgtctttgaagttccaactaaagcatagtaagaaccccataaatgctttctttgattgcatgaatgaatggatgatggattccattcacaagactatggatttggcttttccagctgctatgatgcaacccttaaatgatgaaaagcatctcaatttttttcagatcttaccaacctttccatctctatctcctgttttcagattcagtaagctgtgaggtccgtaatgtcagacactggcaaacatcatatgttcttcaagtagagttatgaaaacgaagaaactggtcagaagagtaaaacgccggaattgtcctttccaacatccagagctgcatcattccttggggcaaaatgtggacaagggtgagtactgatagaaaaaaacagacaatttgtgattcccctttttccagtttgctcagcctaaattctctgcaataataatacaaatcatgtttttttgtcatacgggcctgcaactaacatttggggaaaatactgttaagtttagactgccagattttgctgttaggtgaattttttacatggatgcactgatgcccacagggcatcctattccatccagaaatctctggggaagcagtcttctgggatgcagatagattattccacttaacataatggtgcccgagcaagcctggaagttacactcactgaactattcattcagaagctgattgcccacgtttggaaatagccagttcttggtgccttgtttctctgtttgccagtcaccttcaaccattcaacttccattcggccattcctcaagaaaatcaagttggcctggagtagagtgtaggatgaaaataatcaatttttctatctaaccaaggcttcctaaaggttttatgaaaattcagtagaagaaatgatatgtaattttacctattagttggcctctaaaagaggcaggcatcatcgcatggcatagtggcattgagggtcacaaagatctgaattttggtccttgcttttctgtttagtagtagagttgacctggagccagtgacctgacccttttgaatctctgtttctgtgtttataaaatggtgacaggaagattgttcagaggatgaaatgagaaaatgcacatagagtaactcatgctcaaaatgaaaaaaggtaaattcccttatctattgagatcgatcaactgttttctgtatctcagagaatcaaccatcaactgcacacaaataaaaaagctctgggcaccgtatcaagccaagaacagcccaatctcctttctgggcaaacgttccaaggtaaatataataagaaatgctttctttaaataatttgataagtaacaaaaggatttccctggaaggcattaaaaacaagtttgattgtcatatcactgtgggtttttttaattatattttaagttctagggtacatgtgcaaaacgtgcaggtttgttacataggtatacatgtgccatgtgggtttgctgcacccatcaattcatcatttacattaggtatttctcctaatgctatatctcccccaggcccccacccactgacaggccccggtgtgtgaggttccccaccctgtgtccatgtgttctcattgttcaactcccacctatgagtgagaacatgcaatgtttggttttctgtccttgtgatagtttgcttagaatgatggtttccagctttatccatgtccctacaaaggacatgaactcatccttttttatgactgcatagtattccatggtgtatatgtgccacattttctcaatccagtctatcattgatggatatttgggttggttccaagtctttgctattgtgaatagtgccccaataaacatacgtgtgcatgtgtccttatagtagcatgatttataatcctttgggtatatacccagtaatgggatggctgggtcaaatggtatttctagttctagatccttgaggaaccgccacattgtcttccacaatggttgaaccagtttacactcccaccaacagtgtaaaacccttcctatttctccacatcctctccagcatctgttgtttcctgactttttaatgatggccattctaactggtgtgagatagtatctctttgtggttttgatatgcatttctctgatgacaagtgatgagcattttttcatatgtctgttggctgcataaatgtcttcttttgagaagtgtctgttcatatcctttgcccactttttgatggggttgtttgtttatttcttgtaaatttgtttaagttctttgtagattctgaatattagccctttttcagatgggtagactgcaaagattttctcccattctgtaggctgcctgttcactctgatggtagtttcttttgctgtgcagaagctctttagtttaattagatcccatttgtctattttggcttttgttgccattgcttttggtattttagtcatgaagtccttgcccatgtctatgtcctgaatggtattgcctaggttttcttttaggatttttacagtgttaggtcttacatttaagtatttaatgcttctagttaatttttatatacggtgtaaagaagggatccagtttcagctttctacatatggctagccagttttcccagcaccatttattagatagggaaccctttcaatattgcttgtttttttcaggtttgccaaagttcagatggttgtagatgtgtgatgttatttctgaggcctctgttctgttccattgatctatatatctgttttggtaccagtaccatgctgttttggttactctagcttgtagtatagtttgaagtcaggtagcgggatgcctccagctttgttcttttaagtagttttttccaattacgtaaagaaagtcaggtagcttgatggcgatgacactgaatcctataaattaccttggaaagtatggacgttttcataatattgattcttcctatccatgaacatggaatgttcttccatttgtttgtgtcctcttttatttcattgagcagtggtttgtagttctccttgaagagttccttcacgtcccttgtaagttggattcccaggtattttattctttttgtagtaattgtgaatgggagttcactaatgatttggctctctgtttgtctattattggtgtataggaatgcttgtgatttttgcacattgattttgtatcctgaaactttgctgaagttgcttattagcttaaggagattttgggctgagacaatggggttttctaaatatacaatcatgtcatctgcaagcagggacaatttgacttcctcctttcctaattgaataccctttatttctttctcttacctgatttccctagccagaacttccaacactatgttgaataggagtggtgagagagggcatccctgtcttgtgccggttttcaaagggaatgcttccagcttttgtccattcagtatgatattggctgtgggtttgtcataaatagctcttattattttgagatacgttccaccaatacctattttattgagagtttttagcatgaagcgctgttgaattttatcgaaggccttttctgcatctattgagatgatcatgtggtttttgtcattggttctgtttatgtgatggattacatttacagatttgtgtatgttgaaccagccttgcatcccagggatgtagccaatgtgatcgtggtggataagctttttgatgtgctgctggattcggtttgccagtattttattgaggatttttgcatcaatgttcatcagggatatggcctaaaattatctttttttgttgtgtctctaccaggctttggtatcaggatgattctagcctcataaaatgagttagggaggattccccttttttctattgattgaaatagtttcagaaggaatggtaccagctcctctttgtacctctggtagaattcagctgtgaatctgtctggtcctggactttttttggttggtaggctattaattattgcctcaatttcagagcctgttattggtcaatccagagattcaatttcttcctggtttagtcttgagagagtgtatgtgtccaggaatttatccatttcttctagattttctagtttatttgcatagaggtgtttatagtattctctgatggtagtttgcatttctgtgggatcagtggtgatatcccctttatcattttttattgcatctatttgattcttctctcttttcttttttattggtcttgctagcagtctatctattttgttgatctttttaaaaaaacagctcctggattcattgattttttgaagggttttttgtgtctctctctccttcagttctgctctgatctttgttatttcttgccttctgctagctgttgaatttgtttgctcttgcttctctagttcttttaattgtgatgttagagtgtcgattttagatctttcctgctttctcttgtatgcatttagtgctataaatttccctctacacactgctctaaatgtatcccagagattctggtgtgttgcatcttttttctcattggtttcaaagaacatctttatttctgccttcatttcgttacttacccagtagtcattcaggagcatgttgttcagtttccatgtagttgtgtggttttgagtgggtttattaatcctgagttctaatttgattgcactgtagtcagggagagtttgttgtggtttctgttcttttacatttgctgaggagtgctttacttccaactaagtggtcaattttagaataagtgcaatgtggtgctgagaagaatgtatattctgttgatttggggtggagagttctgtagatgtctattaggtctacttggtgcagagctgagttcaagccctcgatatccttgttaaccttctgtctcattgatctgtctaatactgacagtggggttttaaagtctcccattattattgtgtgggagtctaagtctctttgtagatctctaaggacttgctttatgaatctggttgctcctgtattgggtgcatatatatttaggatagttagctcttcttggtgaattgatccccttaccattatgtggtggccttctttgtctcttttgatctttgttggtttaaagtctgttttatcagagactaggattgtaacccctgcttttttttgctttccatttgtttggtagatcttcctccatccctttattttgagcctatgtgcgtctttgcacatgaaatgggtctcctgaatacagcacacccatgggtcttgactctttatccaatttgccagtccgtgacttttaactggggcatttagcccattttcacttaagattaatattgttatgtgtgaatttgatcctgtcattttgatgttagctcattattttgcctgttaattgatgcagtttcttcatagcatcaatggtctttacaatttggcatgtttttgcagtggctagtaccagttattcctttccatgcttagtgcttccttcaggagctcttcttataaggcaggcctggtagtgacaaaatctctcagcatttgcttgtctataaaggattttatttctccttcacttatgaagcttagtttggctggatatgagattctgggttgaaaattcttttctttaagaatgttgaatattggcccccactctcttctggcttgtagggtttctgccaacagatccgctgttagtctgatgggcttccctttgtgggtaacccgacctttctctctggctgcccttaacattttttctttcatttcaaccttggtgaatctgacaattatgtgtcttggggttactcttcttgaggagtatctttgtggtgttctctgtatttcctgaatttgaatgttggcctgccttgctaggttgaggaagttttccaggataatatcctgaagagtgttttccaacttgattccattcttcccgtcactttcaggtacaccaatcaaacgtagatttggtcttttcttatagtcttatatttcctggaggctttgttcatttccttttactctttttttctctaaacttctcttcttgctttatttcattaatttgatcttcaatcactgatatcctttcttccacttgatcgaataggctattgaatcttgtgcatgagtcatgaagttctcatgccgtggttttcagctccatcaggtcatttaaggtcttctctacactgtttattctagttagccattcatctaatcttttttcaaggtttttagcttccttgcaatgggttagaacatgctcctttagctcagagaagtttgttatcacagaccttctgaagccaacttctgtcaactcatcaaactcattctctgtcccgttttgttcctttgctggtgaggggctgcaatcctttggaggagaagaggcactctgtttttttggaattttcagcttttctgctctggtttctccccatctttgtggttttatctacctttggactttgacattggtgacctacagatggagtttcggtgtggatgtcctttttgttgatgttgatgctattcctttccgtttgttagttttccttcttacagacccctcagcttcaggtctgttggagtttgctggaggtctaatccagaccctgtttgcctgggtatcaccagcggaggctgcagaacagcaaatattgctgcctgatccttcctctggaagcttcgtcccaggggggcactcacctgtttgaggtgtctgttggcccctactgggaagtgtttcccagtcaggctacacaggggtcaaggacccacttgaggaggcagtctgtccgttcttggagctcaaatgccatgctgagagaaccgctgctctcttcagagttgtcagacagggacgtttaagtctgcagaagctgtctgctgccttttgttctcctatgccctgaccccagaggtggaatctgtagaagtagtaggccttactgagctgtggtgggctctgcccagtttgtacttcctggcctctttgttttcactgtgacactttgtttactcaagcctcagcaatggcagatgcccctccccccctcaagctgcagcgttgcaggtcgatctcagactgcagcgctagcagtgagcaaggctctgtgggcgtgggacccactgagccggcacaggagggtatcttcttgtctgctggttgctaagactgtgggaaaagcacagtatttggtcaggagtgtactgtttctccaggtacagtctgtcatggcttcccttggctaggaaagggaaataccccaaccccttgcatttccctgatgaggcaatgccccaccctgcttcagctcaccctccatgggctgcatccactgtccaaccggtcccagtgagatgaatcaggtgcctcagttggaaatgcagaaatcacccatcttctgcatcaatcttgctgggagctgcagactggagctgttcctattcgtccatcttggacaatagcccgcttactgtgatgttttaaggtcaaggtaatgacctcttaacaatcctcgctagtactagattctatggcaaaagtctgtcacagaactggatacttcagaggcttccaccaaaccaaattagtaatccaaactggaacaaactatatttatttgtgaattctcaatccattcaatataaataccaatttctctatgaatagtgaaacaaaaaatgtctctcttctcattttttatacctactcagccaacattactaaactgagacaaaaacagagagatacagggagataaaacattccctgaagcaagtcagtatttcattccagctgtaactctgcaattaacattagttctatggtatttccaatacatgctgattctcaacttttggaattctaaacctaaaaaccatataatttcaccacctcaattttttaatttgctttagaattatctatgttgagtcaaaagggcctttgaggtctttaatttcatgacttctgggtgattttttcccccattattaaactttattttaacttttcatacacacagatacacacactcacacacacacatcacttcacactacgcatacatatattcctactgctctttttcaggtaggatgctggttaaaaatatggactggggctgggtgcagtggctcatgcctgtaatcccagcactttgggaggtcaaggcgggcagataagttgaggtcaggagttcgagagcagcctgaccaacagagtgaaaccccatctctactaaaaatagaaaaattagctgggtgtagtggtgcgcacctatagtaacagctattcagaaggctgaggcatgagaattgcttgaaccccagaggcagaggttgcagtgagctgtgattgcaccactgcactccaacctaggcgacaaagcgagactctgtctccaaaaaaaaaaaaagaaaagaaaaaaaaatacggactagaagccatactgcctagtttgaatcccagtcttgcctctattgagtaatagggccttgaacaagttattaaccctctttgtgcctcagtttcttcatctacaatatgagaatgagaatagtaccgacctcaaagggtttgtgatgattaaacatgcatgttgcttagaattgtgtttggcacgtactaagccctcaaaagaagcttcctgagttttatagcacataaaaagtcaagtcagtgcagctaaaagaaatcattgaagggagaagatgagagacacagagcataatgaaaggcctggtgggagaatgagccttgggaatctggatggggctagacttggtcactcacctgaacttccttaagctgtgatttttctggttccagaggtgacaatgaagacaccatgagtgaaggcatggacagaaaaattcactggggaagcctgtgctaaactcataaatactcttaaaagtaaaccccttacaagaagcctcagcaaataaaagcaagccctgagggaactgcactaatatcagtgtgaggaggaaggcggagaggtctcctcacacctggagagctgtccctggctgcagagaggctggcaccctgcagcattcttttcccaggatggttctgttttatttcattttcaaagagctggtagttaaacatttaccattgctccactgaagacaataaagaataaaggggctggctcagaaaaaaatgaaaaccaaaaaaaaaaaaaaacaaaacaaattaaactgcaaagctttttcacctttgcattagggcaggaagcctgcagccaggcatggcatgttatagtttatctaaagaaaaaaagccaaatcggctgggcgtggtggctcacgcctataataccagcactttgggaggccgaggtgggtggaccgcctgaggtcaggagttcaagactagcctgggcaagatggcgaaaccatgtctctactaaaaatacaaaaattagccgggcatggtgatgtgcacctgtaatcccagctactccggaggctgaggcaggagaattgcttgaacccaggaggtgaaggttgcagtgagctcagatcacgctactgcactccagcatgggtgatagagcaagactttgtctcaaaaaagagaaagaaagaaaagaaaggaaggaaggaaggaaggaaggaaggaaggaaggaaggaagggaaaggaaaggaaaggaaaggaaaggaaggaaggaaaggaaggaaggaaggaagaaagaaaggaaggaaggaaattttgccattctttcccactaaatgcaagttcactgcagttccaaggtacttatccacaccgtgtatttacatctgcctcaggtttgtagtaaatgctgtaaacagagagatgtgatgaagagaggtaatgcatattctttatcacctctctaaaaacatgattatcctgacctattgtagggaatatgaaaacactatgtagtgagaattaccatcctgcttcattatacttaaaagagaatttaacctgttcagatttctgagttgttccttaagtataaaagtgaaagaatcaggatcaaaacgaagaacctctaaatccgcctattgtatctgcttgggctgccatgacaaggtatcacagagtgggggcttaaacaacagaaatttattctctcacagttctggaggctggaagtccaagataaggtgtctgcagggttgatttctcctgaagcctctctccttgacttgtagaccttcatcttctccctgtgtggtcttccctctgtgggtggctgtgtcctcatctcctcttcttataaggactcctgtcatattggattagggcccacccatgtgacctcattttaacttaattacttctgtgaagaccctatctctaaacacagtcacatttggagttccttggtgttaaagtttcaacatgaatttggggtgggggtcacaattcagtccatcacacacctaacgtgggtgtaatgtgtctacaggaacagtttgattgagcaacaccacaggttgcattcccagagaagcaaattttgagatggagattggcatgctggaagtttgtggagagtgctcctgggaaactgtcaaggcaagagaggaagcaggattaggcagaggaggaagctgaaatcaggataaagaccccagcaagtcacagaggccctccaaagctgggatgtccttccatgttgtctgaactgaggcaaggtagttggaagtttatgccccttcctagacagtcactgtaaacaggccacccgagggaggaggtgtgctgtgcctcagctggggacaatctcaagaggggactctgaagcaagctgctaggtgccaacccttccatagctgacagaatgattgactaagcctgaagtggggtgtcaggtcatggaccccagtgtccactacaaatctgaaatttactttcctcaagtgagtggaaggacttaccattatcttcttaagaaatatctcgcaccctacagaatgggagaaaatatttgcaaaccatccatctgataatgggttaacagtcagaaaaataaaacgcactcatacaataataacaataaaacataatctggctaaataaatgggcagagaacctgaaaagacatttgtcaaaagaagacatacaaatggccaagaggtacatacaaaggtgtgcaatatcactaattgtattagtctgttctcacactgctaataaagacctacccaagactgggtaatttatatagaaaaagaggtttaatggactcaccattccacatggccggggaggcctcacagtcaatgcagaaggcaaaggaggagcaaaggcacgtctttcatggcagcaggcaagagagcttgtgtagtggaactgccctttacaaaaccatcagatcttgtgagacttactcactgccataagaacagcacgggaaagacccgtccccatgattcaattacctcccaccagattcctctcacaacatgtgggaattatgggagatacaattcaagatgaggtttgggtggggacacagccaaaccgtatcactaatcatcagggatatacagatcaaaaccataatgagatatcatcttaccccagttggctatcatcaaaaacactaataagtgttgtgaggatatgggaaaagggaacccacgtatactgttggtaggaatgtaaactgatatattagttcgttcttacattgctataaagaactacctaagactgggtaatttataaagaaaagaggtttgatgggctcacagttctgcaggcggtacaggaaacatggctgcagaggcctcaggaaacttagaatcatggcagaagacaaaagggaagccagcacatcctatatggctggaacaggagagggagagagcaaagggggaagtgctacacactctcaaacaaccagatctcatgagaacttactcactatcacgagaacagcaaaagggaaatccacccccatgatccaacatttcccaccagacccctcccccaacactgaagatcacaattcaacatgagatttgggtagagacatagagccaaaccatattagctggtatagtcgttatggaacacagcatgcaggttcctcaaaatttaaaaatacaattatcatatgtagcagtaactccacttctgggtatatatccaaaggaaatgaaatcagtacctcaaagagttctatgcacctccatgttcattacaacattattcacaatagccaggatatagaatcaacctaagtgttgattctactaatacatgagcagataaagaaaatgtgatacacacacacacatacacacatacacacacacacacacacttacacaatggaattctattcagccttgaagaagaaggaagtcctgtcatttgtgacaatgtggatgaacctggaggacattatgctgagtgaaataagccaggcacagaaagacaaatactacatgatctcactttatatatggcatctaaaaaagacagactcatagaagcagaaagtagaactgtgcttaccaggggttgggggactgggaggattggaaagatgttggtcaaagagtacacattttcagttacaagatgaacaagttttgggaatctaataaataacatggtgacatggttaaaaatactgtatttaatatatacttgaaacttgctaccacagtagatcttaaatattctcaacacgcacacacacacacatagacggtcatggtgtgaggtgacagatatttcaattagcttggttgtggtaattatttcacaatgtatatgtatatcaaagcatcatgttgtacactgtaactatatacaatttttatttgtcaaatatgcttcgataaagctgagagggggggatagaaaacaaagaaatttctcacaatgtctctcagtagatctaagggtaacatattaaaaactcgaaaatatttggcccaatcctgggctgctaacatgggttagtggaaaagtgcactgtggcgccagaaaggtctgggttcaaatctctatcttgctgtttgctaatatttcttaacctctctgaacctccaatttctcctgtgcaaaatgaatataataatacccatcttattggactgttgcaagatttaaacaaaaaaaaaaacatagacttagattgtctagcaacaatgcttgacacaaagaaggcatttaaaaagcatttgttcccttcccctttttacagcaaatagttcattggcagtgaatgattacaaactacaagtgtttctcaacttggagtggtttctcaagtatgtgactggaaccacctgtagagattgttaaactacagatccctggaccccaccccattcttaatgaatctagttcatgggttctagggtggagcccaggaatgtataattttagcaagttccatggatgtttctgatacccagaaaatcatgaagccctctgcttgaggctgagctcagtaagaatattctttgtattagaacccagggaggtctgtgcttagaggatgcctgaggacatttgcacctccctccttgtcatgagttctgtggatgtacatctgcacatcacatcacagagacctctctccattgcataaattctgtgtattccaaaactaaaacatgcataaatcacatcagttatagactcaaaccaattctcctttttgagatgtcattttattgagttataaatcaccactaaaaggcaattttgtgcagacagaaattttactggaggatgcagatcccctgagcttgtctggaaaatgagaagcctattcaaagacgaagtgtcctgctggtggaagagtcattgggcctgcaaagaggcatgtctggatggaggtttaactttttcatttcaaccaaacaaaatggagcccctcacccagatgggattgctgaaggctttctgggtttgattatgggtcacaaagtccagctgcattgcagaaattacactgtcaagaagacgctgaccaaggtccagaaaataaacaggagctgagatgcagaaagtgacctcgaagcttaaacaggctttcccatgcctaccagacgcttttcttgatttaacaccgggtcatgtggtttttcagtgtcttctgtggctttcttttcccatagatgggcctcacttattctaaaatataaagctttgggggtttcttgaaaatggcactttcactcagtaaaaataagtccagatgaaaaccttatctgtgggaatccattctgaagaaggattaaagtaagtctattttccccaaatgatcaataaccacccagacctaatcactatctctgattacatgatgaaaaagattctggaagcagcacagcaaaaatatgacaatgacagagaactcaaaggtgaccctgtactcaccatctccatgcagacatcacaagtgcagggatgagtaagccctttagttggagatctatgttgctaataacaagacattctgagttttcttcttcttagtgagagagccttccatgaccattttcccatagtttgcctttattcgtttctaagaaactatttttccagttttgaccatggtgctgtaacccacagaggcaccgttacactgaaactatgcaaccctatctgttaagtattatccaacgcccacttgggttttcactggctcatttagagaagcacctttgagtacaatatccaattaaacagtaggtttacatggagtgcttcctgctcgtgttaaaaatctcattctggccgggcgcggtggctcacgcctgtaatcccagcactttgggagcccgaggcaggttgatcacgaggtcaggagatcaagaccatcctggctactacggtgaaaccccgtctctactaaaaatacaaaaaattagctgggcttggtggcaggtgcctgtagtcccagctactggggaggctgaggcaggagaatggcgtgaacccgggaggcggagcttgcagtgagcagagattgtgccactgcactccagcctgggcgacagagcgagactccgtctcaaaaaaaaaaaaaaaaaaaaaaaaacctcattctatttctgccctgtgctctgccattccctagatacacagaattttggacccagtagagcaccttcacgaggatagtgctgcagtgaaccgcagtagcaaggaaatcgtacaagctcagtggctcagcacaacacactgttctcactcgtggtccagtcagggactctcctggacagctgtcctcggggatctgggtctcttccatcatgggctccagtatctcggggcctttcacttccagcatgtgaaacactccgtcttcttcaagagggagtgtgtgggacatgttagggagcaggctagaaagcagagtacatcacttccactggcactctaccgtctagcactcaatcgcatcatcaacctaaatccgaagaaagcagggagatgtagagatgagcacagctgctgacagtgcctgcctcggagagatgttagctgcccctttctttcaatccctttttaaggttttgcagttgaggcgactgagactcggaagacatgttacccacagctagtcagtgacagcccagcgcagtgttcacccaggggcctcttgcccacccttattaattccaattaatggataaaagggctcatttggtctcgaggtacagctggagctttgtttcctgctcttctacgcaggactccacggtgaggaggaggacgaccactctgctgcaaaacccgcagttccagggcaatgcctcttggtctgggagctgcacagatgaatacctcaaggagcaagtgccagtagccaaccgtaattatgggaaatgcttcttggctcctaagggatataaaattactttggggaaagtcaaggaaaatagaaacagaataccccataatgctttatttggaggccagaagtcacatactaaggcttgtgttttgtgtttgattctgtcaagagagcttaaaaggtggagacagcctttggggggaatgaaggtctggatggtatcagcctggcttgcaagcgtcgctgtggctcatgaaaacatatgtcttgaaaggttgtcctgctcatagttccgagcaaatgtgagaaacaacagaggcttccaacaaatacctgctaaagaatgaggaaatggacacaggcaaataggcaaatggagtctccttaacggaatcgtaaggctgtctggaggtaatacgagtggaaagaactcctgtgtgaaaatctgcatgcatctttgcccccgtggaaccgtctacacaagtgctaatggaacagttagttacatacctatttttttaaactctgactttaccattacagaggttatatatctataggattttttgcctgaatttttagattttcacctggagatctggtatggaataattaaatgctgcatattgtttctcttattcttaaggatcttggagaaattatttaacagtctgagatctccttctctccttccctaccctccccacccctgacctataacagctagggagagaaaataaatacaaataatatctgctggccaggcacagtggctcacgcctgtaatcccagcactttgggaagctgaggcaggcagatcatgaggtcaggagatcaagaccatcctgtgtaacatggtgaaacctcgtctctactaaaaatacaaaaattagccaggcgtggtggcaggtgcctgtagtcccagctactcgggaggctgaggcaggagaatggcgtgaacccgggaggtgggggttgaggtgagccaagatcgcgccactgcattccagcctgggcgaaatagcgagactccatctcaaaaataaataaataaaataaaataaaatatctgccatttggctgcaaagtatggtgctgatttaacctgaatattaccacataaaatcaaataacaataataatagaaaataggtttatagcagtaccagaattatattacttaatttagctgccttttcccaaaatataatcacacttcctagattttacaggtcagatataaaagagtacagtggaagaattcaatcacatgtgccttcattgttcactttttcatctcaagctcttcttttcatgctagctgttccagctcttcaaaaaatgtttgttcttgtgagtcagaaatattgtatccattttattaacagcctgtttgaagccaataagatgaatgcgtttgctgagcataggttagtttatggcaaagtctggactcaaatcaatggcaggagaggagaggcaagctagttagatacctccaaaggacttggacataaggaagatttcagagttaaattagcaaaatgcatacattcaatacatacacactagtaaaacaaaatggctgcaattagtcaattatggaagtaaaccaagaaaacatccatctgtctgtaaaatagaagagtgtgggaacttcttaaacttcagtcctgctgatctggggtatagtaatgaggaagatgaatatatggttgtaagtcagtgagcagaatgccaagtggctgcattgtgcctgattggatgaaatgttatccatgttatctgattggatgaaaggtatgtgaacagaaggggctggtcagccaaagaagcaagaaagaaggagaatcagagggtctgaaagcccctctagatggcaaagcccttggacatggaagcatctaagaaaaacatagtcttggcagtgttgaccaaaagtatggttccctttatgagacgttccctgttgtgagcaagagtgcctcaagccattgacagcagcattctaagatccattaagagcacttgttctgatcctgtggacaccaagcaaccttgtgataatttggctcctcacatagtgagactattggcagctctgcctcaacacattctggtctacttgtcagttgtatagacgaatttaattatatctgacgtggtgtgctgactccaccctaagcacgccaacaaaatcacttttatgagcctaacagaccttagaccagggtgtactctttaaggtaaacaccaccctcggcatgcagctggacaggcagtaatgttgcccagcaacaccccaggccacacgccatacgccacttgaactgcagctgaaccagcctgcgtaattttgactgagccacatataaagtcaagatcaggatgttctaacaacatgaccacctctagtgatctgaccaaacaattgccatatcacaagccaggagcagtctgcagagtggaggaatggaaagaacctaaaccattttaacaggccatgtgccaattttcaactgtacccgggaccccaccatagacagcttcatcaaagatatcaatgctgttgacagagtaatgttttccaggttttatcccaccctactcagttgcagtaattgttaggtgataaagacagtgacagctcattacaaaattcaacttccagaagctggaaggttaagtgacacctcttacctgctgggtgatgggttagcgtcttaaccttatccttttgctactctctgccccaaactccaaccccatctggaagcttgtgcacttgaggcagtagatttcacatgaaaccaagtcagaaggctttacaacagaccattaagtaggaatgtgtaggaaaagtacgtagaggagaatggatgaaggggatgaagaatattgcctaaaaactcaagaccgttatctgtagcccttataacactttttatttatgtgttctgtgtgtgtgtgtgtgtgtgtgtgtgatttgtgcactactgtaccttcataccagcttgtcacacacgtataaacctatgtccacagacattaactacttggtttttgttttgttttgttttgagatggagtctcgctctgccacccagactggcatacagtgacaccatttcagctaactccaacctccacctaccaggttcaagcaattctcctgcctcagcctcctgagcgtctgggattacaggcacctgccaccatgcctggctgatttttgtatttttagtagagatggggttttgccatgttggccaggctggtctcgaactcctgatatcaagtggatccgcctgcctgggcctcccaaagtgctgagactaaaagcgtgagccaccgcgcccagcctacttggcttctttaaacagctttattgaggcataactgacatacgataaactacacatactgaaaatataaattattttaatctgtaattacacctttattttttaaaaaattgtgtgagcccaaccagataaccatgaaaagttccatattaatgatgattgtactgagtagagaagcctccaattaaagtaaattttgataacattgacatatatatatgcactggtggaaccatcgccaaaaccaagataacaaacacatccatcacctccagaagttttctcatgcccctttgtaatcccacctctgctgcttcctacccccagccccattcctaggcaaccgttaatctgctttctgtcactatacatcagtttggatattccagaaaattatataaatgatacatatcttatataccctttttctggcttcttatactcagaatagttactttgatttgtatctatgttgtaatatgtatcaatagttcatttattttcattatggctgagtgttattcttcatacggatggaccacagtgtgtttatccattcacctttgatagatatttggtttgttcccagttgggggcaattagaaataaaattctaaaaacatttatgtaaaagggtgtgcatggcataggctttcttttctcttggataaaaatctaggaatcaatgactagattatatgatcagtgtattcctaacttcctaagaaactgcctaactatgttcccatcaccagtgtttgagagttccagttcctcctcacccttgccaacacattttatggtcagattttccttctaattcttgctattctaataggtatgtagtggtaccttctagtggctttaatttgcatttctctaatgactaatgatgttgagcatcttttcatatgcttatttgtcatctgtgtgtgtcctcattaataaaatgtctggtcaaatattttgtccattttctatttggtttgttttcttattattcagtaatgagagtttcttatctattctggctacaattactttatcagatttatatattgtaaacattttccgccagtgtctggcttgtcttcttagtctaataacaatgtctttagaagagcaggtgtttttaatttttatgaagtcctatttattaattttttcttttatggattgtgcttttggtgtggtaactaagaaatccttgcctacccaaagtcacaaacattttctcttatatttttatagttttaggttttatatttatttctgatccactttgaattaatattcatataatgaaagatatgaactgaagtgcactattttgaatactgatatccaagtgtactagcaccatttgttgaaagaactatgtttctccactaaagtttctttgcacctttgtcaaaagtcagttgtccatataggtgtgtaggcctctttctattccacttatctatttgtcagtctttaagccaatatcacattgtcttgattagtatagttttgcaattcttgaaatccggcagtattaatcctccaagtttgttcttcttttataaagatttttgtttttgaggatttttgttttgctttttgtttgtgctgttctaggtcctttgtgtttctatatgaagttcagaatcgatttgttcatttctacaaaaaaaagcctactgggcttttgattggggtgatatcaaatctataaatcaatttaggaagaactgacatcttaccgatataagtctttggattcatgaacacattatatctctccatttatttatatcttctttaatttttctcaacagttgttttatggtttttggtgtacagagaactgtacaccaaaatatcatttctcagtatcaaagtattcaaagtacatcacttctcagtatcagactgtcaggaaaatgatcaatttccccttcaagactgacaagctaaaggcaccagaggcttaggcttcttacagcaacacaatgcagggactataaaaagcaaacgatagcacctatttcctaaagtcacgaatgttaagtgagtttaacatttatgcagtttaacgtaacaccggttgtgaaggtaaactgcctgggttcaaatcccagctgcaccacttataactgaatcaccttgggaaattcacagtctctctagaactcagttttctgatcagcttaatgcagaaaatactagcacctccctcataagggtcttcataagaataaaataagctcactaaagacttagaactattcttgtcatataagaactaataaatattagttatattaatatataaatcttagcaagttttatattatatttattatattaatatataaatattagcaatcattgttgattttattattagtagcacttaacatagtatttggaacaaatgagtatccaataaagggtagatattattggcttatgtagcaaactagtggttaacaccttcaggtatgcttctcaactgttttgaataaccgaagctgaactgaatttgctagaagtaggtctgtttgttctttattttttattttttatttttttgagacagagtcttgctctgtcgctcaggctggagtgcagtggcgcgatcttatctcattgcaacatccacctcccgggttcacgccattctcctgcctcagcctccctagtagctgggactacaggcgcccaccaccatgcccagctactttttttttttttttttttttttttagtagagacggggtttcaccgtgttagccaggatggtcttgatctcctgacctcgtgatctgcctgcctcggcctcccaaagtgctgggattacaggcgtgagccactgacactgcgcccagccagtaggtttgctcttaaaaggcctgaccctgaacaggaacattccattctttggatgctgtatttaagatgctatgtcagacatctctatgcaggatctcaccatgataggcaaatctccaccacaattagctttactactggcttccttaatctctctctggcctatcttgaggtctaaaaccctggaggagattgtatgaattatatttcctcattgctcctgcaatccttagagagatgacattttcataaggatgcatctacactaactctggccctttctctagagtaaagaagtgaccagatcacctttcatacatactagactggttttatattgtgatatgatttccaaacccaggaaggctctgtgtgcctctcatcactcaccactactaccatccacccttgcacacacacacgtgaaccctccctcctggcttgctgacacaatctgtctaattggaaatccatttctgtgcttgatgactttgttccctataaaaatacgaattatctttgaaggaaaagcaatcattaacctttgtgtgtaggagacagtattaaagtaatagaaagagaaaagcactcaagattcaagaaagaggcattcaagattattagatcccaaatctttcctctcttgcaagaagagtttgccatggtcattaaagccatggcactgggtgaggtcatcatccatgtggtgactattgctagagaggaaaactctggaatctaatggtctcaaatgcctttttccctcctctgtaaccaagattctactcaagttccctgatctacaataacaggatggcatttgagccattcattcattcattcatgcattcagcaaatcctgaccaccctctcaccatggtcaggtattgttttaagagcaggggacacagtagtgaacaaaacaaaatccctactcccacaaagcttatatccaagccaaagagacaggtaatcagcaaataaacacaaaggttgtaataggttgtcaaggagtaagggatttcaagaataaaaataaaatagggtaaagagatggagaatgccaggaatgctagtttagatagagtatttaaggatgttctttctgaggctgcaatggttgaatagagacttgaaaacagtgagtgaggcgacagctgggcagctagtagaacattccaggtacgggactggcaaatgccaaggtcataaggtagaagtttgctcaaagtgtttgaggaaaataaaagaagcctgtatggttgcaataaagagatcgctggagaggcatccaaaggccaaaccatatagggcattgtaggtgatcataacgacttttctgtatattccaagcgagatatgaaaccactggagagttccagaaggaaagtgacaagatctgaccttatttagaaaaatcacttgggccgatatacctagaacagatcaccagggagccagagggaaagcaggacagccagcgaggagctgttgccgtagctcaggagagagatattggtggcttagatgaacaaggaaggtagtagtcaaagaggcaagaaacagatatgtgatatatgttgaaggatgggatgtagggtttaggttccatgccatgaaaaaagtaaaaaatgactctaaaattggttatagcaaaggagaatgccatttactgagatgtagaaccatggagaaggttggaggagggacagcaagtctgttctggacatgtgaagttggcattgtctatgagatatccagggttcatgttgagcaggcagttgtatacacacagctgggcttcagaggaagagtcaaggttagagagacttccgtttgtggtcatcactgtctgcatggccattaaagccatggcactggcaccatgtggtgacttgctagaaaagagaagaggagcatccaagaaaagacagtgagagggaacagccagggttgtcggaggagtatctggaaagcatggtaacatgtaagccaaactgtaaaaatgctccaaggagggagtgagcaaaagtcgctgagaggttcagatggcgtttttaatctctactatttattactgaattaaaggagatgaacacctgaaaccatgtattaaagtaccttgtgctacaggtcaagtaccagaaatcttgaccaaaaatagcttaagcaataaaagcattcatgatgtcacataatataattctctgagaagagtaattctgagggccgggcacagtggctcatccctgtaatcccagcactttaggaggccgaggcaggtggatcacttgaggccaggagatctagacaagcctggccaatatggcaaaaccctatctatacaaaaattagctggttggggtggtgtgtgcctgtaatcccagctacccaggatgctgaggcacaagaattgtttgaacccaggagtttgcagtcagccgagatcacatcacagcaccccagcctgggtgacagagcgagagtctgtctcaagataaaaataaaaataaaaatatataaaaaaagagtaatcctgaggttggttatctcattggctcaaacatatcaaggaccaagatttcttcatctttgggctctgccaccctgttggccaggtgtggtggctcatgcctgtaatcccagcactttgggaagccaaggcaggaggatcccttgagtgcaggagtttgagaccagcctgggcaacacagggagaccctgtctctaaaaagataaaaacaaaagaaaaaacggggggactgctgtagctccagatatcacatcttctcacaccaatgtccagaggtggaataaagggaatagcctttcattgtgtctctttctaagagtgaagaaactttaccagcaacctcctgcataattatcttttcaacgaacccagaactgtaccatgcacccatgtctacgacaatcctggaaggcagaatgatagaaatcgatatcacactttagggctggggaagagcccagggcctctcaaaggacatggctgctctgaggaaggtggaagaagtcagggttctgtaagcaagaaagaagacttaaaagggtagttcttggttcaacaactgataccatctgcaacacaagcatttgggcattctaaacatgcctatctttcttccacagcaatgatacaaatataggaagttatgaataaatattcattatctctcagccaagaggacaaggttttccttttcaggctagtgtttgagcaaccattgaatgcttatgcatgtcgtagaatctgtgggttcaaagaggccttgaaggtccatgtatcctcaatataaaatccccatgacttcttgtattagaaaagatcccagcaagacatacaggacacactcagattatcctaatgtaacaggaactcagaggatttgatgccaggactagctacaagtgaggccagggcttggcaaacaccaagggcaatgcagtggccagggctagtgtcagggaaacctccctcaccatgcctaggaggcagaagagggctccaagcgtggggcccccaacaggagtcaagaccattggttgagggacatagccaagccacagtggccttgtacggatgggagaggcaggggaaaatgtccagactttacttccttctccactcaactggaagccaaagggcagaggagccgcccagtggaataactgcaggtcagactctggggtgcagagcaggggagaagagggtggagatggcaccggaggagcaaatggaagacacccagtcctccccatggtgggggccagccactcctcaggctgctcatttcccctggccagttctgactgctggaaagttcccagtcaatccagggtccatgcaaaacaggtctaactcttcacttacatgaaaatactttagatagaggacaacagcccacacacctcacagccaagtggtggagtgaacaaccttgagatgttagtttagttccttggccccagggtacccagtgtctgatggaattggaaagctaaggtctccatacatcttccccttggcatgttgtttctcagctggaggtaattgcatcccccacaagacactggcaatgaatagagacatttttcactgtcaaaaatggtggaaggcatgcaactgacatctagagggtagagaccagggatgatgcaaaacatcctataatgcacaaggcagcccccaccatgaagaatgatctggccccaaatgtcaataggccaaggatgagaatcctgcccaggcaggagctgagcctggacaaggctgtagctgcaagacctttcccgggagccacccacgatgtttctctgggacatctttgttttcaaggtgagctaatgctgaaatctgtgttttcaaggtaagataacgcaaaacagtgctagagtccttgaagaactggagggaaggaataagcagcaatggagtttcaggggtgcggggagcgggaggagatgagagctgtttgtttgcagtgggaatggcaattgttgaatttccccttgcctggccccggcttctcaactaatgcaagggggagccctgagccacccttgatatcctgcgagccatcctcacatcacaacatcagctttcgcaggcaagcatgtaaacaagaagaccagccacgagaaacataagaaagaaataaaagttgtttggtcttctgtcaggaacagattgttggaatattccaaccccagtccaaaaagaacaaccaacaataacaaccgggagaccgcagcccacgctgagacacacgaagccttcgcttttcccggtgccgcggaccgtttccaggagaacgcgccgctggcatcgtcctctgtttttgccatggcctggggagctctagtgtttgtccaagcacccgcattagggccaagaaatatgaaaatgtcatctgtgagcatgaatcaggagcaagtgaacttctcatctgctgaaagtcagcaggtgtgagtattctgacaaacatctgcagtcctgcagcaattcctcatttatttggcatcaacagatcagctggaaatatcatattttaagtgaatcttccagatagctcaagttcaccctattaaagaatatccttaatgatgtagccttttagggtgaagacaactttccaaaaggtatctattgcctttacttcaatcaagtatattgacaatatttctattttttaactggctcagaataatgagtataatgtaataataaaaataataagatgtctgcagacctaggggtagtttgcccagacattaaatgaacccagatcagaacctttttccccctgctttttttttttaactctttatcctccctttgtgtagctgtcagctgctactctttacttacatctcccgacctgtccatctgtaatccctgccttctagtaattgccgctgtgggctaggacagtggttctgaatgttggcagcatgctgaaatctcctgggtcccatctccagaattgtgttttcactggcctaggcaagaggacagtttgcaactccccaggtgactgtgttgagtagccaaggctgagaaccactgagatgggaaatccagtatcttatctgttagaattgtgcacaaaataagagttaatatgatctgagagattttcctacaaataagctttagtgtataaacctttggcatgtattttgagctcttcgaatctgcaactttctcattcttagctgtacctcagcaatgtgacctcaagctaggagagaggtagaaaggaccagtggttaagtgtttggggtctagagctcaattacctaggttcaaacctcaactctgtggcctcgagcaagtatcttaacctttttgaacaccagcctcatctataagtgttggaaggactcagtgagtcagtgcacagagagggctggggacagggtctggcacgtcacaacactcagcacagtcagcgttacaggcagggtctggcagggtacagaattcgcttcagatgaacaaggaggagaggcagaggtgcgaactgggaaaagagcgcaattcaaggctactgtggttcccagaggctggcgagtgagaagcttgactagcctggacaggaagcgggaggggaagaagatgtgttatgagatcccagggaaagctgaggctgtggagagaagcagggaggcagcagagaggaagcacccgactcccattctccctccagcctccgacctcttgcaggagcctccctcccgctggctggatccagtgagaagccagggagtggaaaagaagtggccctcaggctcagcttctcaagaggcaaggcaaggcaaaggaagaaagagaatgaatctgggtgggtgggaggcaggcaaatggagaagaaccagccgagttagctattactaatcattccgtagctgggaagtcaccaaagaaagtccctattgccctagagtgggtgaacgctacacaacatccgctgtagaatcagaaagagaattgcccctcaagttcccacatgctggaagaaatgtgcctccaccacagacctttagcaccaaactgagatggttcaacactgctatgggcaaaagtccaattttttaagatgtcctagcctccttgagaatctcagggctgagggcaacgtgcctcatccctgtggactagttcgcgctgctctctgagccttttctcaccagctggcctctgtctcttttccaccccctgcccatgcctgtcagaactcagacctcctagctcacttcctttgctaattgaaacacattcctgagccccatttgtaacatgctttggaatttcttcctccaccacttccccacccccaaacgccacctctctcttctcactcatgaatgttgaccttttgtctaataaaagcttcattcttccaacctcccactattgacttaagtagccattcttggctgtgtttacatttgctctccaaaaccatagtctcactacctatcaagtactcagtggtgtaagtagaggcagaaacccttttcttccagcagcttccattttaagtgtaaggacaagagacattgctcagagtggctggtggctttcccagtggatgtctttgcagcgtgatagttccgccccatgctttgccactgcaccatattacaaatgaaaattagtcacttccagatgcaccccccgggcatcagagccctcttgtactgtgctggtacacttgcttcgctgccttggaaactctgcagtgactctattttcatttccatcactagtttgtttgtttgtttgtttgtttgtttccagatcctgtaaccaaagagctattcctttgccaggatctaattgaactattcatccttgttcctccattatgttccttccaaattcctttgaatccctctttcccatcacatatgcattatgctataataatggccactatttggctctgttttcccttggaagcctggcacatgttactactgtgctctcctgagtaaagagagaaggtggaaccaatcctgttcccctctggtactcagatgcccttctgcaaaagcatcagaatcagggaaccaggacctccagaaagagctgggtttgaagttaaaaaaaatcctaatgaggtttgacttggcagaattttaagcactgatttgggttcaggtgggccaaaagcgtgagtagcagcaacagcagcaccctctgtgtacccactccctgcaaacccctgttctaggccctaggaattccatcaatccctaccctcaaggaacttacattttagataaggagagaagactcagcatgtgtgcgcgtgcgcacacacacgtgcacacacacatgcacgcacacacacacgtgcacaggtgcacacacacgcatgcacacatacatgcacacacacacagagccaataatgcaggctagcatagaatgaatgccaattaagtagtagctaaataataataattaacttgcatttaaaaatctgtaacacaggcatttctcttaatcaagactcattttctcccaggtaatttccattttaattggtattggtggaggttttaattagatttcttaatctatctctgtttctgtttgcacaactgaaagatgtctcccacttccaaatctagcgtattgtttgaaattttgaatttatgacatctccacaaatttactatagattgatccatcagtatctaatgatgtcttgagatgatttcttatgattaaaacactttaaagtagtgattatctaaagtagaatctaacttcccgtttgaggaggttgaaacatgtgcttcctatcttcggttctcattttttttaatgtgggtgctgctttagcaaagccaataactacaagaacatcctcccccagtttgagtagatgtgtcaccagaaaagcaaaagtccaatgctgagtgatttgagtggcttggaagaatttcccagcttgcagcttatactgaacgagcattaatacaagtaaaccattaactcatcagtcacacctgctctgtttgctctgtgcttgtttctatcctagcacccttgacaaagtgctgagcttgctgcctgtgggcatgtcggcctccttgctagaccattcactagctgagaacatgcaggaggtcttttaaaaaaaattttgtatatatatatatgtgtgtgtgtgtgtgtgtgtatgtatgtattttaattgacaaataagaaatgcgtatattttatgatgtacagcatgatcttttgaatgtttgtgcaatggctaaatcaagctaattaacatatgcattagctgacatatatcatttttttagggtaaaaatatttaaaatccactctcttagcaattttcgagtatgcaatactttactattaactatagtcaccatgacacacaatagattctctgaacttactcctcctaactgaaattttgtatccttttactaacatttcctcaatccctgtacctcctctccccaaccttagcctctcataaccacctttctactctctacttctatgagttccacttttttacagcctgcaagtaagtgagatcgtgttgtatttgtctttctgtgtctggtttattcccctgagcaaaatgtcctccaggttcacccatgttgtcacaaatgccaagatggccttttttgaggatatgtagtattctactatctatatgtcctgcgttttctttattcatctacatttattcatttatccattggacacttaggttgattccataacttggctcttgtcaatgctgctacaatgaatatgggggtgcagagagctctttgacacactgatttcatttctttagatttgtacctagaagtgtgtatatatctagaccagaatggaattgctgggtcatatggtagtcctatttttaattttttgaggaatttccctactgtttttcataaggactgtactagtgtacattttccccagccgtgtgtaagggttcttttattcacatcttcaccaacacacatcattggttttttcatgctttattttttggtaatagcaattctaacaggtctgaggtcatatattattgtgatgcagtaggtattattcagcttggtacagtgagtacagcagagagtacagttcccaacagagagtacagtgctctgtgcccagcaggcccagaagtggattaacgagttgattgaataactgattagtgggaaataaggaaagcattaatactcccagagagcaaggatagacctaggggtgcttgtgagaaaccaaggttgatctacagcattcacagcctggtgaaaggggcccagagtgtggcaccagctgtagccctgtctgcactgagggccaggtgagtgagatgtgactgggtaccccttccaggtccagggaagaatctgaagagtggggcccacatcacccttcagaacataagacatggacactccctgatcacagggacagcccaggtcatttagccctatcccatacccctttataacaaaatactctattattacttccgtaaaacttggaaattgagatatgtgcaaatgagggtatgttccaaaaagctcctaacaaatactaactccaattctcatctggttcttgggcttgacatagagagggagagagagtggaaaaaggatttggtctcaaaacaacttttggattttgcctggaaacagtatctcgtagcatgttcattgcagcctttggctgaattctttcattagaaagaggaaaagcacatttggatgttgacgtgacattcaggtaggcaacatttctttgctcgacttgggaaaatgctaatgaagaagaaaccaatcctataaaaagaggtcagagtacgtcaaagtacctgtccacccccatagtcgttttccttaatcttgacatctgaatcacttgctgtcgggtgaacacaggaattttccagggaacaatctcatattgagtgaggctctactcacggttgccctacatgtcatgggtgtccatttcggccttccattgtatgaacaatgcccagggtaattcggatcttgataacattgactcacaacctcaaataaatgaagtcatatcaagccactggcaagacggaatctgccggccggaaagggagtagaaggctagaccacaggcggggactgtgtggagggcaacacaggtgaacgcacacagataggcgcagtccccggccgttcgcacctcagcatcggtggcacttgtcatgattcaggttgcccttgctttcagcaaattcaacccttttgaatgcttgtttttatagaaactaaattagagagggattattcatttacaaacaaattgttcattttaaccagagtcttaagtaactgatacctctgtgctagttataatttttttaatctcaacttggatacacattttcaagaatatatctattaggtaaagtacactcacataaggaaaagtagatggttaattgcctggctatttaattcccaatatcataatcttggacactcctttcaataaaccttcacctagccaattcccaagaaatcacttcctcaagtgagttaaactgggcaacggttaagcaataggagtgtctttttttcagatgccagcacagagccacttgtccctgttaatcacgaagactggaaaacaagcagagctatgtgacggatatattcaccagaccctatctctgtgggaggcggtgttttggcacagacaggctgatgatttcagggtcaagagggaagtgattaatcaaactgggaagaagacagaggaaaatccagcaaacagctatgaagaacatataaaaacaacaaccacccaatatctgtatgggtaaacaacgctccgtttgcacactggagaatgcaatgaagtgtgaccaggatgaagccgaaaacaaagaaatgatgcttccaactgcggctcccaggcatggcttttctttctgcaccttggagactcctctgcagctccattctcatcccacacctccagggtctgtgcacaccaaggcaggtggaaggggaggcaaggaactgagcaatctgaggttaggtgggggaaaggaaacacaccttctactattagtgcaaaacgagaattttcccagttaccgatcttgaaataaattcatcagatgatagcgttctccttcttcttttgccccttcttttgctcacacatcctaccttaatttgaaacattgcaatgaaagagaaatgtaaaaagcaaatctagaccaagctgcgttcaaatgtgcatgtagccagaaaccttaaaagtagaaggtgatcattttgttttgtttgaattttttaaaaagtataacatctgtcaggtactgactgtgaattctacatcttgtactgagtcgcccctctcttctatggaacattagaaagcaagaggaactaccatttgtgatagacgaagacagatttgcaggtggagggagtgacaagacctgatttgttttctgcacataatgagtaatccttcagacacagagatcctcatctgcagcacgagagaaaaggtaaaccaagtccccaggctcagcacccatggaaaggagcagagggagagagtcctctgagttggcacacgagttctgcaccgggctgtcctttgatatgacagctctcttctgtggtggggccacctaagaagtgcttgggaaaatatcttgataggagaactagacggaaacatgctttcagagaagggatgtgtcttgttgcttattgtggtttttcaatacatgagcctagtttacatagcaggggcccaaatgcagctctgtataatattgtcatacttcagctatgtgcgtgtttatcatttctttaccaacaacagctggagaaaatggctgagattggagaggagggagcagaggtagagaggaagtcaaaaccttggaatggatgacataccacttccccaatgaatgaagctgcagattcagccacatgtagttgatgtcgccatgtcaagactgcatttttccttccaaacacagaagtatggggtaaacttaatgcaggactatgaagatgaagccattgaggcccaagactttatcttgatttcttcaattccttggatatgtttactccctccccacactgggcccttgtagctgcttagactgaacctactggcccttctcttgctggaaagttgccctccaagaagtgcaagagctcagattgcacctgctaactgttaagaccagacttggccaggctaccagatctttctgcaacaaggccagcttcacactgcctgagcagacctttctgttctgccaaaggcagctgaagcagggaaaatggatcagcaaagggatctgggccaggcgcagtggctcatttctctaacctcagcactttgagaggccaaggtgggaggatcacttgaggccaggagttcaagaccagcctgggcaacaaaatgagaccgcatttctacaaaacaataaggttaaaaaaaattaatcaggtgtggtggcaactgtggtgccaactcttgagacactaaatcgggaggatcacttgagcccaggagatggaggctggagtgagctatgatagcaccactgtattccagcctggaagatagagtgagaccctgtctcaaaaaaagtaaataaaggaatctgaacttgaagaatgggccaaaaaagagtgatacttgactgcggttcctctttgcctgtgccgtcacctgggattggaattctgcatttcccacccccaattcccttctccagtcatctaactcctctgcttcctccaatactcagctaaggcattacctcctcctagaagccttccctgaaatcctcaagcagttctctttctttgacttccctctttggagcctcaactgtctctttgggtttgtctgtcctgctagactgaacgtaaataactaatgagggtatctgcatggaaagaaacagacccttctaagtgctgtgttaagtaacttcactgaaccagatgagagcattagagcagctgctttctagggttttgccagctcctgtatgcggacgtgaggctgctggggatgttgctattagtgataaagttaagggtccaagaggttctttgcttcacgactacgtcattggaggctgataagccatggccaagtgtgttcaaggtctccagctgtcataaaagtgtctgcttgtttattttaggtagataagtgttgctattattcctgggatggtaggaaaagccgggggcaagaaatcactctgtgaagatatattgagatccctggaacatttaaaaaaaaaaaaaaaaaaggttgaggggagggagagaaaccacatagcctgcatttggtgatactgtaattctagctccctttaattacagttaatcactacttactattttgtaatctaaggtaatgaacactgtagctttgcttgctaattgaagttgacagaatgcgagaaagcgccctatggcaaacccctttcatcaggagagtgttttatctttgtttatcaacaagagagtggattttttgtttgtttattttaaggagtcacactctgttgcccagactggagtgcagtgatgcgatctcggctcactgcaacctctgcctcctgggttcaagcaattcttctgcctcagcctccagaatagctgagagattataggcacgcaccaccacacccggctaatttttgtacttttagcagagtcagggtttctccatgttggccaggctgtgctacaactcctgacctcaggtgatccacccgccttggccttccaaagtgctaggattcaggcatgagccaccgcatccgcccaagagtgtttgtttgtttgtttgtttgtttgttttttaatggtttactctaggtttaattcagaggaagtaagagattattctgcagaacacccttgggtatttaacctggcacaactcaattaataagtgatccattttactattacaaactaaatttatctttggaaataatgacagaccgaaacaacccagaaactacatatatctattttgtatgaattaaaaaggaaagaaatcaccagaaagaaaaaaaaagagttatttaattgagtgcatggccccataagggcaattggaaacctgtatttaagtttgtatgcaattttgtgtatgcattttctggaaagaaaagtcatactttattcagatacccaaggaggtctgtgatatcccctctgccaatctcaacttagatattagtgtttagtgaatgaaatagtccataaactagattgactataaatctggtaataatgttgtaaaataaaggttttccacgctctacaaaagaaaaccaaaacaaatagcatagctatagttctctcaatcctcatccccaaattctctgcagctccctaaatagcctaagacaccagagaaagtcagaaatttattgtcacagcagctagaatgacctgtcacctaaccagacaaagtccagagcagaactgaaggagcagaagttcttagaaggtttaccttgcactgccatcactcacttccagcccaaaacctttaacaggtactttgtttgtagtgaatggcttaacttcactgaattgcagttaacctcaaacgtttgggttttttgttaaatgttttaagacgagaggaaaatagcacttttacgtaataagaaatttcagatacttgacctctctaagttcacaaattcccattttaattttcatttttactgaaatttcttacagagaagtaaaatccctcttcctaatttcaagctgatttaaatacctctgaaaccaggttaaaacctaggatatgatatagttctcccatttgggccagttgaaataaatataaatttagccctttttccccaaatattggttgtgtgtgtgtgtgtgtgtgtgtgtctgtgtgtgtgtgtgtgtgtgatggagcttcgttcttgttgcccaggctggagtgcagtggcccaatctcggctcactgcaacctccgcctcctgggttcaagtgattctcctgcctcagcctcccaagtagctgggattacaggtgcctgccatcacgccaggctaatttttgtatttttagtagagacagggtttcaccatggtggccaggctggtctcaaactcctgacctcaggtgatctgcccgcttcggcctcccaaagtgctgggattacaggcacgagccactgcacccagctggtaaattctttattatcattaaaagccaacaattttgactcagtcttattctatatatctgttctttcattcttcttgtatttcaatgaatgcttctataagtatactgacttcagccaggagtggtggctcccgcctgtaatcccagcactttgggaggccaagacaagatcacttgagcccaggaatttgagaccagcctaggtaacatggcgaaaccccgactctattaaaaagcaatacaaaagttatgcagtctcggtggcgcatgcctgtagtcccagctactagggagagtaaggagggagaatcgcctgagcctgggcagttgaggctgcagcaagccgagatcgcgccactgcactccagcctgggcgacagagtggggccctgtctgaaacaaaataaaagtatattatagatgccgtttttaccttgactcactgacatccagtttcagagccagcaaagctgaggcccaactctgctgtggtctaaatctgttgtagggtgaagcctgagggtcagtttggtgcccccttttacttttctctacttaaattcaatctattcttacggcataatacttagaaataaactttctattataagccttagatataatattcaaaggtaattagtttattggagaactggagaaaggccattttttaaacagtttattggagaactggagaaaggccatttttctcccccagacaagacccgtatctccacaggcattgacaatagcttcctaatttttttttcttactagctgattagtgctatgtctaatgaattgcccatacccttgttccctaggattgttgttgaaaatatatgcagcaatcagcatatgtatttagttgaaaaccaatgtctccaacagccttaaaagcccagctttctcttctaatatcaaaatattctattttactaataaaccatttcttaagccatgtaaaataaagtctaagtacaaatcttaaggcattatgaaaagatacttgggaactacatccctgcagccaaggaagtggtggtttttttttttttttcaaagacatctgaccttatcaaagcttcagaccaagaattcagttcatcagttcatctgctatctaataagcacaagagccatttgtccttcacatgataaggtcatggtacattacaagccacttgcaggttttgttttcttgaaaggacacatttgcagggagcactgccagagagaaacgactggctgaaatcaaatagtcgacatcaagggatacctatttcagaaaaagcgattgaaggcagcagccagaaatgctgagattttcatatgagggatgtttgtaatcataagccagcaggtaattccagcatgtgcagattctctttgacatggtgctataaaaactcttgggctaaaagcaaaatctctacctgacagaagcaatcctcactcccatctattgatactttgctcctgattcacagcaataaatggtccttaaagtgaatgagaggagggtaattcattccctacacacacaccaagatgagcccagtcttcttgcattaacttcttgctgaatgcaattgatccggaccattggctggttttccagagacttcaaatagcctgacttggcttgttcagccagtagggttgagatcagagacccctacatcaaggtcactgaaggtaccattggaaactacaactatcctggcttagactcagaccactggttacaacttcccattcctaggtgacaaatataaacccatacagtagttgaagactaaggaccaataaaaagcagaaaagttttttttaataataataaatacacctggctaaaaattccagtggccagaaggaataaatttagcatcttagctttcgttgctaaaataggatctgcttccaggctcactcttgtaagggaattgtgtatataatggcttctttttccagagtttggggcagggtttctcagcatcagcactattaacacctggggacaaataattatttattgtggagttgccctgtgcattgtaatacgtttggcagcatccccagatgctactagatgccaatagcactatgtctccccctcccccgaatccacccaagtttgacaatccaaaatgtctccagatatggaaaaatgttccctggagtaagtgaggggggaggggtgcaaaatcacccacaggtgagaaccactgctttagggcattatttgtttattaattgtataaatgtatggggtccaagagcaaatttgttacatgcatagattgcactgaggacaagtcagggctttagcctatccatcacttgaataatatacattgtacccattaagtaatttctcttggtcccctcccttcccaccccctctcccttccaagtctccattgtcaatcattctactctctatgtccatgcatacatggtttttttagctcccacttatgagtgagaacatgtggtatttgactctctgtgtctggcttgtttcacttaagataatggcctcagttccatccattttgctgcaaaagacatgattttattcttttttatggctgaagagtattccattgcatttatataccacattttctttacctaatcctccattgatagacacttaagtttatcacatatccttcttattgtgaatagtgctgtgataaacatgtaaatacagttatctttagggcattatttaataaacacatttcatctgtaccaatgacacctctcccctgattccttgctctccaaaagtacttccttccaaaagaattgcctccaaaagaattgccttttcttctgtaaaaaggtgaccagtcttagtttgaacaatttttctgccaatattactagtcataaggacaatacattaattgatccaattgttctttcaggatagagaaaagtgcttccatccatacatgctggaaaactttaagcatagatttattgaaagaacaaaataagttaaagtccagaaaatactgtagcaatattcaagtcatcgagaaaaccagaaaaaaatgaaaatttaaaactcatctgaaatcttcacctgaaaccacacagaaataaccattgctgatatttggtgagcgtttttccacttatctctccttgtccatataacagatataaagcctggtagacacaaagaagttcttctgtgaaataacccaggattcattatcccgtagtttcatattgacatttagaataatgagaggatactcatgcaattttaaacttgaagtatttgatttaattttccttgaattaacagattaaaaaatctgaaaactgaagaatctgatgaactttggacatttcttcactgctagagatattagttcttaaaaggtccctataatttaagaaaatgtgcaaaacctatagagctggctgggagcagtggcttacgcctgtaaccccagcactttgggaaggcaaggctagaggatcacttgagcctaggagtttgagaccagcctgggcaatacagtaagacccccatctcttaaaaaagaaacaaacaaacaaacagaaaaacttaaaagagctgaagttattgttatttttaaactgtgcttttcactgttgactccttgacaggaaagatgaggaagtcagttaacatatttttttcaacctcttttcttctcttaccagtatgattagttatattaaaatacttacttgtgacctttaaattctttttttcagccttactccccaaattgtttggtctcagttctgttttaaacgaatccacagcctctcagtttctgagttctttattttgattcattttttatttggctggattggttttcaagacacactttttatttgcaaaaagaacccatggatgctgtgttccttgaggtttgattcgttcctaaatatctgcctcctgctttcttactcaaggaacaactgggctagagattgaattcttggggaccccttctcttgctcaatctttatagacaccactccactatccctggtggttccccaagcagtgacctatgagcgcgggatgctggggcatgtggttcctcacagagccctgattcttcctctgggggcgccatctcactcagactgcagcctgggcatgctcctgtcacctcgaggaggtgatgggagtccagcttttgttgggccccctctcgccactgcccagcccctgggctcaatctgcatttccagtggggaggtagccggttgcaaagccccttctccatctacaagaatggcagcagaggctgaccctccttccttgccccagacctgccttccacatccggggaactctgatggttgccgtttcccttcttccatgaaggaggctctaccactgtccctattttaaagatgaggacactgagacatagaggaattaaggaatatgcccgtgttcagatagctaataagctcaagtctagacttgaacctaagaagactaagagatgctctgatatctacatggattattgtgagagaaatggtctctatcttgactaaggtttgcaaggatgtaggcttacagaagcatacattaaaatttgggttaggactaagaacaaacttcctttcttgagagcaacagggctcagtctaccaaaagaggttataagtaccctgtgtaaatgtcccagacaaaaatggcacctatgcacatgtgacctcatggcacctatccacgtgtgacacccttccagccaaccaaacaatgacctcatgatgtcaaaggccaggaatgtgaattgggaaggcgaaaataacagcttgctttcactttccaagcacaagccagccagcccaagacgtttctctctgccatgtgctccctgcagttcaagagggccatccatgcgccagacagattaaacactaaaggaattctagacgatcactcctgggagggtttttttccactactttctaatccaatgaagcctgggctggcaaaggcagttgaattgagagtggctaaatatgcagagtccttggaggttagaatacagtctgtctaccaagagaaggcattttgccttcagtctgtctggatttctaatatctactgcagactattaatcatgaaggccagactcttgaacctctttgagttgtttcacatttaatcagaatcctcccccttacacacacaaaaaagctacaaaatcctgcctggttatctgatttaaatgaattttaacattcaaacaatggtttatctggaacatatcccctgcatcgaacgtatatttaatagctttgaaataaagtcaaacaaaaccaaaaatgcaattactatgcatgtcatgaaatcatcagaattaaaaattagccaaggtcatattgttcatttcctttagatttcctgttaaaacactggttaccccagattttcaccatcaggaaatgggaaaaaaattgaataactcattttctataagacaatttccatcaaattgtattgggtgagaatttggcccagaatttacactttaatgtatgattttgcattttaaatgtcatctgattttatttgtgattttcacattaagcagatgtcataatttacctgaattccatgaatagctctgttcatccacatacccattttccatgtatttaactgagctttaacttattttattcttttaatgaatgtatactgtgtttaactcagacttttctattttggctttctgagatgtgaggatggaaatgcttttctctaagaaccctattctgggatagggaagccaaattggaaatgtggagccacactgatatacagcttccagaatagtcatatttccccgttccaaccacacataaattcctaaacttgcttcacacagagaatctgggaagtgaacaaagcctatgttttccctcttctactctccaaagtgtgggttgtgtgttggcaccttaggacaggaagggaatttagaccgcatgctcttgattgcacagtctgggagggtatggggtggtaaggagagcaaatgttcagctaggccagtagaatgttgccaccaatctgtcactaacgcagctgccaaaattttcacattgccgagaaagtaagtctttaaagcaaaggctctttgtgccttctttttggaagtttcttgctaatttcctcctctgcttccctggcgatctgagagctagagcttttgtaccatcaactctcagcaaatagaagctgggccagcaggctgcaaagcaaagggtctcattaaaccacagccctttgcaagtcaggtccgggcacatgtttggcatcaattttctacactggggcatattccaaaatacataaggctctcaatttttctgtttctttaaaagaaattctccaaagtcagataaagttaaggaatttgaaaggtgtttaaggtggaggtttccactaggaataattattccaaggagctgagttccaaatttgacatcctcagggtaagacgagaatctaacacatcatagcaataatgactgtctggtggtctgcaagcttcaccgctgggccgaagtgctctttcactgcacacagacttttagttgtttgggaattttagcagagcaaaaacaaggggaagagagaaaataaggtaaaaacaaggttcaagttgtcacaacagccatatattctggattttccatgatccgcatccatataatctctctgattgttcccataaaggtagtcatactcactagaattagaaaagttaaaagcataaacttggtatagtttataacaggtaagacacaactctattgttctttgagagcaatgattgtgccatatttatcttcgtgtttctaatgacttgcacatgacaaagagctcaatttatgttgaatgaatgaattgaaacataaatatgctaatgaaaatcaacagaaatatgggaggatagttattgtattaagcattattgttttacctctatgactgattttaacatacactaagaatgcaaagacataggttctaattgtggttctgcagaataccagggagaaagttacttatcctccaaagactcagttttgccatatagaaaatggagttaataacttccctgacttagcttatgttatggagttgttatgtaaaccacctgagacactgaatgtgaaaacgcttgataatcggaaaagatgcgtaccaatgtacattttcatcattatcgttattattaccaatcatcacggctctggtactcagggatgctcagtcctctcaaatcttgcaaaaagaaaactgctgggagccacaaaacatcttgtgccacatgtgagcttactttccaaaatggcttcgtttttatagtcattaaaacacaactcaaaacctgtcattctttgtccctagtgagccaaccaggacatgatcaaatgtggagaattatggagcatgaatcccaggaagaattcttttacaacacacacacacacacacacacacacaggctcacacacgtgctcacacatacatgctcacacacaatatcacacatcctttcagcactgagaatggttaatagtaggtgtgaagactcacccacagaaaactgagaaatagtgtgtgactatttctgtgactaacacactttttatatcatcttcctcttcaataccatccttaccccagatgtccaggatcttcaagttacttaggacccagcatacatgttgctaaacttctaccacttctgtaagtcatttaattcaagcccattcactcaatgcccagaactggagtgacaacgggtgggatgagaagtcatcaccttcttcatcaccatctttgtgatcttcatcatttcatgaacacttactctgtagctttacattcatcatctctgtctattgtgacaacatcttatgaaatatatactattaaccccattttgcagatgggcaagtcgagactcagaatgattaattttcccaaaggcacacaccctaatgtgacagactctggatttgaaaccaattccacctgattctaaagaccatgtttttaaccacctcactgtaatgctgagtgttcttaatcacaggaaatctttggtgtgctaggacagaggtttgcaaggccttccgggagcttctcaatgtacattctctactctgtttatttttgtctgtataccaacatatatttttgaacccttttttatatatggccaatgatgctaggcctggaagaatattaaaaacaattatttctataatgtaagtgactaccagttatttaatttccgttttttgggttatttgtattttaaaagaaaggctatatgctataagccaagtgaatgaatccctaatggtacgatttctgacaatgagactagcagatggagaaggatctttgtttctgtggtggggtgtgtgtctgtgtgtgtgtgtgtgtgtgtgtgttaagggcgcagtcaagcactgcactactcgtaccataccatgcagacaaccatctaatctgatctctcaaaaggtttgacagtattggcatcattctcaatatcctcatcctacacgttaaaattgctaattaatattagtatttggttgctttatcttaaaacaatacctacctctgttaataggaaaattagaaattatatctattgttcctaaagatacaatttgtttctctaactccaagggaagtgaatgaatatgtttcagactatacttgtctgtgtattatttgtttttgtaaggtggttttttcttttgcttcaaattgagagcatacaaacaaaattccactgtataagcagtcaattttggtaataataacacatgcctagagcactcagattaaattattacacatactaataaaattattcacagtagtactccttggtaatgttggtattagggaacaggatagaacccatcttcaaagtcaaccctattacttcaagcctttgcagggtcctgctgtttccaaggatacaatccaatgcttaatttacaggaatccgaaatcatttgctgtgttaaaaacttgagattagcccttgctgcccccttccaggttggcctttggaagcgaaaggtctttaagcttaagtaaactggagaatatttctgagtaagcaggctccaggtggagggtacactccaagataccttcacttgccaaaacaacactccctgcaaggttatcagcgaaaaggcagtagaaagagccctcctgctgccagaaggtcttgttttgcaaggcttctcagcctgcctgcagccattgggtgaggagaggaaaggacacctcacctggcagagcagcacaaaggtcaggcatgtttccctcctgacctggaagctgggtcctgctccttcacatgaactgtccagggcttggtcatatacccaggtccccctcagtcctgcccagagtgactccactggtctccccagaaaacaccaacagcagagagaaatgaagtgtgtctgttttctggtttcatattgcagctcctcttgctcttcttaggacagaaataacatctgcaatgccagagacctgtgaagtaataaacaacctttcccccagctcttgacaagcattaccttgctttgaggtgcaatcagttctgacaagtttatggctttgtgtccttcaacccaatggacattaccctctgggggagtttaatgacccctctcagcttcacactcacttgaaggaaagagctagaagtcagtaatgatgtgttatgacttgcatggcttcaggtagttcagaacctgcaacctgtagttcagattacaggagaagaactcagacgataaattggcttccaaagaaggccaaatagaaaaaaaaaaggcttcttcagaccaatagctgagtgacctgaaatttaaatgcaaaaaatgcattaaaacccacaaaaccacttcctttaaaattcttgataccaaacatgttacagcattaagtgaaccttaatctaagcaaaattcagagaagagcattcacacctttgatagaagagccagccagccagggtgctggggctcagctcttgagaaaaatgttgatgtaaaagccttggtggcctggttcagcccctgagcctccctggtaagcacatggcaggctcagaacatccataactgaatgctctgagccctgtaaaaatgcagttacaatgggaaatcaactcttaagtatgctatgggatgctgtgataaaatttgagtttctctaccttctgtttgcactttggttcatttagaaaagagtccataattgtgtgcttcaagagtgcaattccatggctgtaacagaatagagtcctctttcttctggcctttgcctctttggggatattccaactctgtggaaggtgatcatttgcgattatgatcagttatttatatttgactgtaaatgaaaacttcagagtcagtttcaaaaaacaagagatggacataaggacatgtgcttatgagtaggggacaaataactagagacaagaaataaaaagagacaagatatgagacaagataacctttgatgccgtactgcacacacacacacacacacacacacacacacacacagaatctacattgtttctgtcactctgcggggctgctggaaggcagaaatgagaagcctcggccctcatcttgtttagagttttgcctgggccaggctcttctgctgcattggaattcaactttgcaaatctcagtgtttccaggttgacctcgggagaaaggggaccccagaaaaaattagaacaaaaaggaacaagtaaggagcagtgtctagaatgggaacactgacaaaaagaagcaaagtcagaacacatggtctatttggggggctgttagacagacctggactaggctaattccagggttgcctccatgtactcacgggccctcagaaggcactcttccctctcttccctctccagatccttgtcttcccattagatcaatgaggatggaggactacaccagggacacccaactaggggcaattttgcctcccaggggttatttgccaatgtgtagagatatttttggctgtcaaaactgaaggtggtgggtgctactggcatctaatgtgtgcaggccacggctgttgtgaaacatcctgaaatgcacaggatactctccaacagcaaagaattatccagcccagaatgtcaatcatgccaaagttgaggaaccctggctccaccatttgaaggatctgatgcaggtgatcgatggtcccccagaagagtattggtctgggaccaagagtccaatggccatactttacatttttccagggcctgagtgccaaagtgacctacaatccttataaatgttaccctgttttctggcattcatgagcattggaggttgaaaaatgattctctaagagaggcttggcctgcagtcaagttgaaaggtgagtgagagtgggtcagcctacaaatatgccatccacatggggctgctctgagtttgcacaaaggacagaatgtcacctaaatcaattcacatctactgatacaaacagcctactgcaaaggctctattgaatccagggtttgtaataagtatatcagaattcgaccgggcagggtggctcacacctgtaatcccagcactttgggaggtcaaagcaggagaatcgcttgaggccaggagtttgagaccaacctgggcaacatggcgaaaccctgtctctacaaaaacaaatataagaattagccaagcacggtggcacgcacctgtagtcccagctactcaggaggctgaggtgggaggatcacttgagccggaaggtccacactctagcctgggtgacagagtgagacctgtctcaaaaaaataaataaataaaaattaaatactaataaattctgtgaaagagataccacctacgcttcttggtaattgtttggtgaatacagccaacaagagcagaggcgcctctgtggtgttagagtgggctggagtgtttccacaagtttgccaaatattacagaaatatcctgccctcctgctgcacatacacctggcaggagaggaaccaatgggagaaggtctcgccgggaagattccagccagatgggggccctgccttggcaggtgcttggcatgggaaaggtggttctgaagcaccaaggcaggtggcttgtgaatctgcctacattcccctaactctctgaggcttgaaatatcccctcagggctccagagagttgctgttgttcagttatgatgccccatgccctaccagcctctagcaaaaaccatgcatagtgacttgggaaattcttttcactttgctgggccaagacccagatgctctgtgggcatgctgatgggggcctagtggtgttactcctgtattcctccgtagcaaaaaaatagtattaggagagatacagggagatcaggagaatacagcgtcccttcaacttctgcccaaatttctgcagtagcctcctaaccagtttccttatagctctctggttcccttccaatctctcccctcctatgcagccagagggattccttcacactgaaagctaatttgttacactcctgcttaaatacataaagtgattccatagtgctcagggattaagggaaaaatccttaacagatctcaaaaggcctcgcatggctccagcggctatgtggatccatgcaaggccttttggggtctgttaaggaattttctgcctctcaagcctaacatcccaccatgcgccaagcttgctttcatttccttggatgccccaagcttccttctgccacggggccttcacacatgctgtttcagctaccttagatcttctcctcccaggcccccaccacctcttgtcaccagactaattctattctcctcagtccttacctctctcacaaggccctggccaacctccctcaccagatcatgcctcatacaccacctatcatggcaacgcgaatttcttttacgtagttctttacaaaattgcagttttacattaatttatgcattggaattcaataaatatctactgaataaacaaatgaatgaatgaatcacccccttctggggtggaacagagaatccctccgaccacacattcttacttccatctctttggtggttctgtcctctcagcatggttagctgttgatttgtatctctgcccataagattcttcctttctggccaatcccattcatccactcatttctccatgaacccttctctcatctcctactcctcacagaacttatttgtctcactctatgaatcctgttgcattttctctatttttccacactttgccttgaatagcatcagctgtagacatgctagtcttccctttggggctctgaactccttgagaaaagagactcaacccaacatattgttctgcaaagcagcatgtacttaataaatatttgttgaactgaaataccacttgtgaaagctcaggtgataggaataatcgcaggtggcaactttaagatcacaccaaaacaccaatgccactttcattccacccactccgacttctaagagaggatgtagaatgtagctgggaagagggtctctctccatggggagagagcagctagaaatgctgtgagagttttctaattagcagtaagttaccaccacctttggggcccagtgggatttctcctcttgctccagatggctgtcatggcagtaactatttctctgcatgtaagatggtcagatttagcaaataaaaatacagggttttaggtacagtttacactgtttgggtgacaggtgcagcaaaatctcagaaatcaccaccaaagaatgtatttatgtaaccaaaaactacctgttccccaaaaattattgaaataaaagtttaaaaatagaaatatttaatttttaaaaatacagggctcccagttatatttaagcttcagcttcagaaaaacagccaggcttggtggctcacacctgtaatcccgggaggctgaggtgggcagatcatgaggttgggagttcaagaccagcctggccaatatggcgaaaccccatctctactaaaaatacaaaaattagccgggcatggtggcacacacctgtaatcccagctactcaggagtttgaggcagaagaattgcttgagcccaggaggcagagattgcagtgagctgagatcatgccactgtactccagcctgggtgacagagcgagactccatctcagaaaaaaaaaagaaagaaaagtttcagataaacaacaaatacatttttgcacaaatataacccaaatatttcatggcatgtacttctactaaaaagttgctcatagtttatctgaaattcaaatgtaattggccatcgtgtattttatctgtaatttcatgcttttagcataagcttgaagatgccataatattaattggtggctccaaatgaaaattcatttaaaaaaaaataccagtacaaaatgaccagacgtgtgcaactccttctcactgtatccttgtttgtctgcctgtctataatatcactgcctgagtcattattgtcttagagggtgggtgctggatctattttattctttttatagaatcctgatgttgcattcacatatgcacttaaagtatatttgtcttgctgcctgtgatgtccagaagaaggaatggactttggtaatagtttttataatgttcccacagaagatttaaattccaaaatgataccatagtttcccacacttaaaattttacatttcaaaaaacaccataaaatttaaacgtggaaactagttttgaacatttgaaataagttaacataaaagttcaggttttcattcccatgcggtgtgagtttgtcctggggcacggggttgtgcagggaaagaaaaggcaaatattctccagcaattttcctggagatgtatgacttttcaagcaagaggaaataaaagtgaagaatgagacatatccccgatcaaattttaccttcagaaatattaactgctacagtacacttactccccgcaacctcaatggaggaggccagattcctacaagcggggaggccttgtctgatttcattatatcttttcctcctttgcaatcctgcaaagtgatactttctcttttttatcaacatgggttgtaagttcaacgactgcgcacattcatgaaagtgccaaagagatgggaacctgttaggactaaaatccaagcgttttcttttgaccgtaccctgatccttgtctagatgttcttaaaaaactatgacctgacttttttatgactcagatgtttgtaagacccctagatcattaagacatatttaaacattctcgtgcccctactcctctcccacaagataatgttttgttcttaggcaactgccaggaaagcattaaaaacatctagcacaagcccaattttcccaaaagaatgatttcttgtttgaagtttaggagaaaaaaaaaatacattcctatcacttccatttctgtgtctaatttttatttatttatttttagaatatgtaaagtatgtattttcttagaatagttaggccctggggcatacaaccaatttactcacaaacaaaccctatatttaagagacagagttgttttttttttctgggaaaatgaaactgcaggctaggaattcatttctgtcctctatttgtcattttcaactttgattaggataataatgctttgcttgtgcagaaggctctatataactaaatagtgtaagtgacatggacctaagatgtctatttcctaccagctcctttctgctctctacagggtttctttgaccatggaagggggtgcttccaggaggcatgggaggtagctgtgggctgtgttaatttgtttaaaggatggagagccatagagaattctattaacatagatcttgctgaagcattcaaaataagcagagataatacatgagttactgtgaaatcgggacgtgagagctggttccgatattgcaataggaaactactattcttttgcttgactggcatcctcttagaccctccaataactcttctcaatttttatgttcatctgtattctcagctcccagtgagccagaaagttcatgacatgctcaggctggtagaaaatgagaataccagtcagctctccagagggctctgctggcatagctaagagccccaggacagacatgaaatgaagatctggctgagagagcactacagcgcccagctagaagatattaacacaagctctgattcacatgggacagcaaaatataatctgtgtgtgacaggaatcgacacagccttcaaccctgaggtggagcgaaagcacccagatatgcttttgcattgatgggaagtgcaagcagaaggtgaggggagaattttgcccatcactcaccatccccccccacacacacatacatagagtcatgccaaagcatgaagcagcacagaatccccagcattcagccatccctggcactgagccacagagaaattagtcaaaggctctgagggcagctagagcacaaagggtcatttgtttttagaaacaccagaaaaaggacaatattctccagctaaaccttgccagctccttgttttgctttgttttcctcttgtagctctgattctaaatccctgaagtggttgaacactgtgtctgaggccagaagctttcgtgggtcactagaaaagagcctagtgagggggaggaactggactggaacgtggaaagctggaatcgggtctgacctgccctgccgccttggcaaatcactcctacaggtaatgagtgggcctcagctttctcacaaccaaaactgagatcctgatgtgagtcccgctcaccttagagaggagagagaaaaccatgaccgtgaccgaggaagatgcctcaggacataacttctgcacaggggaggttgtcaatttcctctgcagtatggatttatgctcctcacctaaccagcctggactccagtatccctatctgtttaatattaagctctctgaaatgtctccaccataggtatctcattagtagaggacaagagacaaaggtgatttaatcaaaacagccaccaccccgacagcaaaacacatttactgattcctagaaccactatctttcctgaaatgttagtatggggttgaccctattggttacatttgaattgacttttccatgttgagagaattaaggtcaagagaatgaactaacagccagccagtttttatacaacaacatttttgtattctttccattgtaggttatatttctttaaagctcaaattaaacagccacttatcctataccccatcatctctttaagtctccttacagcagaaaaattctggagacattttcaaaggtggaaaatccaggcccagtacctagagaaattaaaatatggaacattggctcaaagttcataattaaaggtagtaaggaatttgcaggtgtgtagttttatcccgaagtcagtaaaaagaatcattttaatgttgttaatcagtggttcagcctgggaccttgttaaattgatttgcaaatgggaactttgaaacatcctggagtggccaagtgtaaaggaatgagagacgggatgtggggctctgcgcctaagccacagtacatttccagctcctttatcccaaaggaacagtcattgtcaagctcaaaagccaggtctggactcagcttacaggtgtctcctggggacctggggaggagcgattcccactgggtgaatgtcagcagagaatggtatgccggcaaagggacaccagagaactctctggtcgtaggacgggcagcaagactgcttcggtagattcaggacatgattctgggcagttagcagcctctctcccctgctgtgtgttaagaacacttgaggatgttttcccttagcatttatgatgctgaggaaaagagattttggaaactaccttgacaaagaaattaatggagggtgacatggggattccagcaaggccaacatacaattgcctcattttcatggtatgtcaaattagatttaggttttggctactgtgcttgtcatgggggctctaactctcacccagggccagcatctcacaaaattttatgactttacactgactttgacctccaaggacaagggccagtggggagaaagaccagcagaggctcattcctcctctagtctcaacgtctctctccctccctctttctggaacttgtgctcctgaggtggatgtctgactgtgtctttggccacagccagccatttgcacatctgttcctgtggagtgacaggcagtgggggagctcaccgcccacttcaggacccagacagccatggtccaggcactgctgtgggctggagaaagctggaaaggacctgcctgtggcaggaatctctgggccccttgaccatgatctccacactcaccacgtgtgtaccaggagggcagatccagacacaggagccagaaggaagcccacgcgagccaacagaacataacctctgggcaggaagagggaaatgcactctattgcccagtaccctagcatgactacctaccatgagcagaggtctatccaaacaggcagaaaaaacctggcacatgtacatttatcaaacagttatggagcatctactgtacatatttacctagtaggtacttgtggccaacactagcagtcatcctctaatacccattctcctcttccttagtcatgaaatgaccacctagaatagagactacacctcccagcatcccttgcagctagctgtgaccatgtgaccaagatctggctaatgggatgagaatggaggttctaggagcacctttcagggaggaggcacttttttcacctaattcttctttcctgctggctggaagatgttatttagaagtgatgtctagaatttgagccaccttggaccttgtactgaggatttcaaagcacaagagaggagaaacctgggtctctacagactttatagagccctgaaccaacccaggaattctaacaaataagaagaaaattaacttctttttaaactcattcatctagggtttttctgttactcacagtcaaacttaaccctattggactcaatatatatttgttttatttaggccttcaactgattggatgaggcccaccaacattatgaagggcaatctgctttactcaaagtccattggtttaaatgtaagtctcctcccaaaaaaccctcgcagaaacatccaaaataatgtctgaccaaatacgtgggcattgcagcccagtcacgttgacatatgaaattacccatcatggggatgaaaactggtgagtcactggcatatgaatagctggcatgactgtggactctggggagagagaagagaaggagaaggcagggcctaaggaacatcactattcaatgatcagatggaggagagggcaggtagctggcaaaggagacagctgacacttcatcaagtcctcagataccagtactgtagggagagccgtgtgcaggtagcagagccatcccagggccaaggtggggcctcagtttcccatcgagcaagtttccagaaccaagtgagatcagggtagcactggtgtgctgggggcttagtgccaatcagtgcttgaccattctggatgggcctggccttggggacgtgtcaggccaaaggctccgatgccttctacaatgaagaatggagggccacagaagccaggaccctgagcagccagcagaacagccaagccccttccctgtccagctgttctccaagaccagaagatgtaatgcctattgccgttttctgtacaacatcaattttcttattaggatacttttggggaaccagtttgagaatatatagaactgcaattttgttcaaaggcagtaacaaggttataagcatgaggtttgaagccaggtgggccttggttagatccttgctgtgatcctgagcaaggcagtcactccctgagcatcaggttccatatgtaggattactaacccctccctgattcaccattacggagaagagatggcgcacttagctgtatctggcacatgacttctacatggtaaaggctttcctttctttctttcttttttttttccttctcaaatctattgtttttattttttttaagtaagcagtggtatatatgtcatctttttaaatgtttcttttgggaagatcttatagaaaaatggcaccctgaaactttcagctctatatcccaaaaattgtctttcaagagttaaaaaactctttaaaatgaagagctttttttaactctttatgagttttaaaaaaacccttaaaaatgaagataatatacctggcctaaatcaaaataatctgaaaaatagatgtgtcccagtggaaagcctacaaaggaataatctcccatcttcatgggaccttctttctcctttctttctaaaagccttctaaagcatcaccaacacaccccaaattttgcttttcttttctattttattaccattttttggctgttatcactccatgttcccttgcatgtgttaaatgtatacatgtgttcatgcgactgaagtcatcttttgaaatacatacaaaaatgtaaatagccaatctcgtgtttgtgttagcctttgaaatcaggctgaaaataaaaatgcatgaagtcagttataaattgctattgccaaacagaaatgagatgagtatttgccagaggtctggggcctggggggaaatggggagtgatggctgatgggcatggtgtttctttctggagtgatgaaaaagttctggaattagatagtgatgatgttgctatagctctgtgactatcctataaaacaccgaagagtacactttaaaattgtgaattttatgtaggtgaattatgtcccaataaaaacaaatttctatcgcttgggtcaaatagtggatcgcctacttctaaggtcaagtgttatgaaaggcggggcagcattagggattcatacatggcagacaatggcaccaggactccgtgttgaactagcagaactgactttgagcatagtacaaattcaggaaaaaggactcatctagagaggctggcgtcaattttaggaggacagacttgagctgagtatgcagggaggaaagaatggactggaagagcaaagtaaaagacattccaaagaggaattcagaaggagggagagatcatgatgctctctttacttggttactgttttaaactttcatttcatgtggcagtgttttcaaggggagatgggaagattggacttctaggcaagggagttgggagcacaaatcttgtttggctgggcagggaagagccacattagagtgtcccttcacaagcagcctttatcttgatgtgggaggttgcagggcagtcgtctgaagccctggagccatgaacagtcacatgtcgttcattctgatgcgtctgaactcctgcatcctaagtcacgtaactggaggcaacgagagcctgttggataggaaacatgtcgactggcccagcctttgcagcctttcctttgtaagagatgtctaagctctgtttgaaagaaatgaggtttctttgttttaaagaaatagaatactgcaagggagagggagagtttcccgggctgccatcttgttttctgtgggtgggaagtgaaaaacctctcatttttggtaagctgagcaaagcccaaaagcaggagcaaaatcagtccacactcgagcttcaaatgccactgtgaaaattcgaggcaggcttcattggttaaaccgcagcctgtcagggaggcttcagcaaaaatgctggcatgagatcttgattcttctatgataggccacaggacagtggccgtactgccctgccaggtaactggtggggcccggggcctgggggaccacgtcgtgatggttcattcctgggccctgggatccatctgcctttgcctgtcactggaacccatgacagcagtggactgagcctgtcagggaggatgagagagatggaagcagcccaggaactctctcaacctgaggcaagttgtgcctcttcccggctgccctgtgccaggccccgagccagtacagaaatggcacttaggttgatatcttacattcagtccattttgctggaatgttctgtaagctccctcttggaattctgggtccatgacattcttttatcctttgctattaacattatcattgtgttagcagtatagctcagtatgactgctatttaaacatccatccccatccctgcccgctcccccacccgaaaaaaatactgtctgcactgaaaagaagtggtttggcatagtgaaagtttttaaacatccattttccagatggatatccttgttaaatttaaaaagaaaaaaaaaaaactaaaccatgtggaatgctcctaagtgaatattattgtttactagacttattccatcttatggcattttatgacaaaatatcagcaagctcataaagagggctttttttaaggtccataatctttctaaccataacaaaagggtggtaaatatattgtacaagagcacgatggaaaaatgtgctaaagtatttccacaaatcaaatgtagcactttggcattggctctaaagcattaaatttagtaaattagaaccagatgattttaaaatagaaacttacataactttacggtgtgattttttttcccccaacgcaagtttatcttcctgcagccgcgttggctgctactgtaataggtatttaagaagtagggcagcctctaggtattattcatctttgtagctcccaaggtgcctagcattatattgggcaattagtaagtattggtggatgggtgaatgaaatctcagcagggattaacaagtactagttaactggcaaggaaatgtaatataaatatttatacagatctacaggtagacaaaacactgccgctatcacacacataatagtgaaaatatgggttgcttttcctttcattgttaaagctgtggattaaaatcaatgaacctgaaataaaagggtggatctgcttcgcctttgggtcaccatgcttcaaaccaccatcaccctggaatgttcctaatacataagtctcatttctatttctgccatcatagcagccacagaaaatgctccttttggtcatgtctccctctcctcccacacacaagttcacaatgtagctaataccttaaagataagctgggagttcaacacagcatattgactgagtgcctataatctccaagaccctgtatgtgctgccacagggggtgcaaaggaataaggtatagtctttgccttctaggaaaatactttccagtagagggttagtcagcacactgtcattgcatgtaaaagaaatctaacttatactaggttagtcaggaaggtgtatttatggccttctgaactgagttgtctaagagtagacttcaggcatggctagatccagaggcacagacaacaggattagggttctctccatctctccactctaaatgcctttgcttctttttgcacatggactcattctctcttgctattgactctctctacaaggagaaaaacatattcaccaccgagcaaacatttacagtctatgatccaaagacagagaagttgtctctctcccaggcttcatatacaaatctcaaaaagatcttggattgactctgagttacatgtcaagttctcagattaattactgtagaaaagaggatgtattctatgaccaatcaggcctgagtggtggttgggactctccctttgtggatgaatgaaaaggaggcgatttatgtcttaaatattgatatttaaatattgatgtgccttggcagctgattggatgtgggaagtaggtgggagaaagaaataaaagatcagtctgaggttttgattctaggtgactggtagggacataaatagaaagagaatggtttaaaacagacactgttttaaagggaatttatcattcataggtgtattaatcagggttctccaggacatgtgtgtatctatgtgtgtgtgtgcgtgcacacacgtgtgtgtgtgtgtgtaaagagaaagagagtaaaagattggtttgttttcaaggagttgtctccaagtccaaaatctgcagggtagacccacagcatgtggaccctgggaagagctgatgttgcagcttgagtctgaaggctggtggaacagaattccctcttcttcagggaacctcagtctcttttccctgaaggccttcatctgattagatgaggcccacccacatggtggagggtatctactttactcaaagtctactgatttaaatgttatctcctctttaaaacaccttcacagcaacgtctagactagtgtttgatcaaatatctgggtagcatgcatggcctatccaggttgacacataaaattaatcatcccaatatttgactataaggagcttatgacatgcctctggaatatttaggtgcagtagaaaatgagggcttggaactcagaacacaggttgggagatgtgattgtcatcagagtagacgtcattggagagcatgagatagataagggagaaaatacacaaggaaaaggagctgagaatggaaccttgaagaaaggctcctgaaaagaagactgaaacacattggcaagagaagtagaagaatcagaagagcccactgctttggaaaccgaaggagttgatttcataacaggggaaataacaaggagtttcaggagttgaggggagatcatagagttggcaggcagagaagagtccccggcttggacaatggaggctgggggttcccctggagcaggactcctcaaaatgtgttctgcagacctgcaccaggccacacactggacaggcccaccaacaggtaggtgcagaaattgagagctagtgcttagaagctctgacagccattagacaagagtgattttttatcagctgaattcaattatcatcatgatcatcatcatcatcatcaaggcttgtattttgccagtctttttcatttcttttttctagtaatttcaacactactcctattctatgcatcaatggctttgatggttattgatggaacaggggtcagaagcagatgcctggaggactgagcaggaggccaggatgctggaccacccactctctggtcatggcaagtgaaagatagagggcacttggtcagtgttggggaaggagaggtggcaaagggaagatcctgaagacccagagaatgttgtttgtggctcatatttgctcatccacagtaacaaaatgtaaaaatctggagtattttgatagctcactcagcagcacagcctgattggagttggcctgagtgatatgtattcttttacccacttggcatgactctttgtagattcaattgctgaaacatgcatgcctttgctcatgggacacagccatggatttcactgggagtgtcttgtaatatgtggtatatgctctaaatctctttctaaaatctgaaatattctgaattccacaagctcatctggcctccaggtttttgaacaaggaactgtgaatctgtttttagggtgaggaaggccagaacttacttgcagagagcagggtgggaaagattagggggcacatcagagaggggatggttagggagctgagtcccagagtgggcttgagaggagagaaaaaaaatgcacagagctgtctggataaaaaggaaagacagttttttttttttgcctggtgaccagaactgcacaggtgatgacttttgaaaatgtagagtgattttaagatggcaaaatgaaaactgggggaagacatggcctctatcagctagggccaggagggcacagcctttcttcttgtcactactctccacccctcctaagaccagaagctccaaaagcaggttagagcatgaatcaggagaactgcatgccctgggttcaagaacacccttgcaacactcccttgtctacatcgtcaagtctgaaatcacagggtgccaggccttcagcaagttaagagaacttatacttagtgcctgtaaagctcaggggtaccagtgagcgagacttcaagtcttgtgcatgctcattgccagaccccctttggctttttgtataaagaagagagctgctctttatttccgggctcagtgggcagaaaggaatgctccgtccatactccgttcggcaagtcaagggtggacactggtgtctttatcaccacccagtcctcggcccacactggcaaggcattcctctagcagacaaaataaaagattgctgatagctggagcactttgtttgctttctaaaacgagtcaaactcttcaaaagcttggcttgaaccgtgcagggtgtgctgtgttcccgccacattcctctcacccgcctctccaccaggccttgtattatccggattcctttcatgcgctcacgagcgccagctggcggctgcttgggctggccggacaggccagaggctctgggcccggggcctgctggacattggccggcctcagctgatgagggcagcggggcacgggagggaggccttcttggagggctgggtcagctgggctcttttaaggcacgagggggagaaaatgcatctccaacccctgaagaaatgaggtaccctgggcattactagtggccatttggtgtttaaaacactcccttctcccccattgtgtactgtccctacctccgcccccggagctatgctggatggctggtgtggaagatggcttccggaggccagtgtgcgctggagaatggcaaagctcggaagtagattggaaacagaaaatccagcccatctaggaagctagggcacacaatccataagccttttctgcttagtccaactagacaatagcaagacgtggagaggggaagagggctacaaagtcgcatcatatcacatgatgtcatgccatggcaagtaggaaagatcatgtcttataccacatgacatcacatagaaagtgtatgccagagaagtcaggaagacttttcaaatgtaagaacatatagaggaagcacaaaggttagcaagaagaagacctgatgcctttgctccccttcatttaataggtagtatgcaccaagatgattgtgtttgggcagtgcctccggaaagaggagacggccactctcatttcagccatgagagtccattcctgtttatttgatgttggcagatcacttcaacctttgtaaaaatccacagtgtgaagtttctatcagcagaaaagatttccatgacagtttcatataacaagttgtttatttggacaaactaaagcatgtaataacagaacacctcacggctagagaaaacaggagagagaggctttgccaggcagcctgcacaattttactattaaactccttttgttccactgaactctatgcctttacctagctggggacacataaatagtagaaatgtgaaccttgcacaattatggagataagcctaaatctttatgcatttctaatttttcttatcacttcacctttaagttaattcatccaagtctttcatgtaaagaaaatgctaaaatggagcgtcacaattgcttgtcacatttcactagagtcgagtgaatttatttaacacctaatttaatctgtcaacgtttttcaattctttgaagaaaaaaaggtagtaattaagtattccaaagttataataacactaaacatcaaaacttcacaatcgcacagttttttaaacatcaagtcaagatattagccatagtcactccacttaaggtggtctggctaggtttttagtagcacggtagtgacacggttttacgtgttctatttcatggtttatcaagaactaagaggggcctaagacatcccattttagcgcttcacccttgggataattaaaagccacctcaaagagatggaaggaagcaggaagagggctcagtaggagtggtggttgtaaggggctgtacagtgacagcctgctcaagctcagctaagtggtaagaggcaccaggtcctcgtcaagtcttcacagtgtggagacccaccgcgtcgctgtaacctagaagatctagagaaactgcttccattctctgctgcctagcgccccacccaccccaggcagcttgtccttgagagcgaaatgagttaggagggaaccaaatgagaagaaattcagggatcacgagtcaaggagcttttttagaagacactaccctccacctccatctgcagaaacaaatttctttttttttttttttttttttgagatgaagtctcgctctgtccccaggctggagtgcagtggctcgatcttggctcactgaaatctccgcctcccgggttcaagcgattctcctgtctcatcgtcccaagtagctaggactacaggtgtgcaccaccatgcccagctaatttttgtatttttagtagagatggggtttcaccatgttggccaggatggtctcaatctccttacctcatgatccacctgcctcagcctcccaaagtgctgggattacaggtgtgagccaccgtgcctggcctattattttttttaatacgaacttaacaagtctttcagaaaatagaatgtattcctaggacactgttgctaacgaggtagttcggggtaaggtcgggtagccttcatgaggtctcttgtgccaaaatattagtggagggaaagtgaatgaaagccctatttcacagtatataaagaatcaagcattaaaactcttttgggcttttctctaataatagactttcattcattccaagagcttgaccagttcaacagataaaagaggtttattgccttgaagtgagaggagctcattcccttgccttctgagaagtggcttatttgtccccctgttgaattcagtgaaggcagtgtgcacagacaagacacaggctttgagaggacaaaagatggggttcagtcacctacataagtgcaaaatgggctacaacaaaagaaaagacagaaccctcttctataaattgctcaaaatctcattgcggaaaagaaactctcacaaaagaaaccatgtaagggaataccaagcactaaatggtgtgttatatacataaaactgactagagagcatatgcagattttttttatttttatttttttagagacagggtctcactctgtctcccaggctgcagtgcagtggcacaaacatggcacactgcagcgttgacctcctgggctcaagtgatcctcccccctcagcctcctaagtaactgagactataggcatgcaccaccacacctggttaattttttttaatttttatttttgtagagttggagtcttgctatattgcccaggctggtctcaaactcctgggctcaagcaatcctcctgccttggccaaccaaagtgctaggattacaagtgtgagctaccgcacacagccatgaagatcactttaaacgggtagattccatagcctcatactaagcctactgcggctcatacttaaaggagagaggcctaagcatttctaattgtttcttaagggaaattggatttgggaagcatagacttaggccacaggtgacgggagtccagagatacagaggaagattggagggaggagagcaacaatggagagatttttctaggaaaggttttataaagaagatggggtacaagcgggaggcacgataggatgtaggtaagcagagccacgaagtggggcagagtgatgaaagaagaactacatacgcacaggctccaacgtgcacgtgagtaaggggtgtgtgcatttgtatttacacggctgcatcagccctcctcacaactcaagaacaatacctgtttctcagttgagcttagtcccacgagggtggagactcgaccttattgagcggacaaacatgtgctcagataacgaagtgcattaattcattcattcatatgaagagaatggcagcaatatagctccatggtcagggccacacagactcagaaaccagaaagcctgggttcataaacaaaatgggccatcaccctgtaagttggcgcatgctgtagaacttctccagtcttggttttgtgaagtgtaaagtaagaacaatacaagctacctcacagggctgttacgtgagatgaatattaaatggactcctgcttgtaaacatctggcacagggcctggcacctcggagggtttcggtgaaggctgaatgaaccaagagtcagttgtattgaaggagaaaactctcaatggctggtctttgaggaggtttctggagacttgtaaaagactggaaaagttgctgcctccaattatttttgaaataagcttggtatatgtagattgtttttaaaaactaatgtcaaactagaaatgataaaacatggccctagaatggttcctttttaggactgggcttgttcctctggtctagcactcactcagcttccagattgttcccctgtagatgtggaaagatctatactttattctgaactcaggcatagatgtaccttgcactaatctagagtgtgggtcggcaaacttctagagacaaccaaataatactttttcttcttcggctttgggggctttgccatctctgtggcatgtgctcagagtctgccattacagctcaaaagacatccctacatgaatagggatggctgtgttccaataaaattttatttatagacatcgaaatttgaatttcacatcattttcatgtctcatctttggtttttttcccaaccacttaaaaatgtaaaagctattcttggctcatagatgcagaactagcaacaggccttgagttggttctgaaaaggtgcatcctaacaccattttaaataaatggaaaactcactgctaaactcaaacacacgggggaatatgtcttccctgttcccttcctgggcaccaaacagaacctcatgataaacatacgttctttgaagttacatttatcttcttactcattgatgctgcaagcatttaggcacctctaaggtatacaacaggacaggggacacagatgaacaagataccaccctgttccccaagaacacacatcggagctggggaaacagacatcaacaaatcattatgagacaacgtggaaagcccttataatagggccgtgttccagtacaatgggggcatagtgaagggagggaggaattagttctgaaagggcgaggtgggcagggtgggggttgtagacaaggatacacaaaagggttagtgttgaggccaaacttgacagcagaagagtgaaggggggtcattctcagcaaaggggcctgcctgtgcaagtcaggaaggtgcaagtccgtcttggaatcagtaagttcccggcaaccccacactcccaagtatggctagagggtgggatgggggtcggcggtagagggagaaagaaagggtgggttcagatggtggtccatgccaaagtgtccagattttgcttgttaagccattgaagtgtcactagaggtttttaaacacggtagtaatgtgatcgactctgtattccaggaattaaacacgtagtgagcaacgtggaagatagatgacagcagtgagagagttaggcaaagaaactaaaaagaaatcattagaatagaccagaccaagagattcaggggcctgacctcaccaccaattgctgttataactcaaactggtggggccctgtgtgaggcactcaatctctctgagcgacagacagctctgccctctctatgagtggctggattaggtgatttccaaagtcatttcctgccctcacatgctcttcactctttgcccttcactcttagagagcagtcacgtgggttcattccaagttgtcaacagaagtatttcttctttctagcctcctcttgattttttgctgtatttatgccagtgcccagttgcagctggaaaatcattagaatggcatccggtgccatttccctcactcctgcctgcacaagcatctggaaggaagagtgcttggttgaagagcaggcaggcggcaaggatgacaggaggggatgcccaccggagtgctggcaagtgcaggaagtggaaccggaggcccagagttctagccaatttcaggagggtctctatgggaatcctagggctgctgcataaatcaattacatagcccagtttaaacatcatttttgcatctgatagtaataaatgaggaagggaattgtttctgtattcactgagacaatttgtgtttccctgaagagttttaagggcaacatactaaatgacactaataaagtaacaactatctgcattatttaagctgcattaagaccagagctcaatattttaactagtagcctgctgtccttgagtgtttaacaaaccggagagaaacagattactccctggtcaaaacactgcagaggcttcatgtcacactcaggaaaaaaatccaagctccctaccacctacctctctgagctcatcctctccatccagccctgtgtaccccacgctaagcacactagacagcttgctgcgcttagacacactaagctcgtgcctactgcgggcccttcccctgggtcacttctgtccggaatgctcatcccctagatctctgagtggctggatccctgaaactattcagatttctgcttaaatatcatctcctcagaggagcttccctgaccactttatctaaaataatacacctcctgtcccaccctggtctgttttcctccagcaattttccctgcttaatttttcttcatagcatttatcactgcaaatcatattatacattcatttaattattttcctcaactctcactagactgtaagctccatgaagatgggaactttgtctgggctactactgtatcctcccctcctagaaaggtacctggcacatgctaggtgctctagtgataacagttcagtgagaaagctgccttatgaaagaatggcacacagagaaggggttcctccaacttcttctgaatgcctaccacacttatcaacagtagtctaatattaatactagttataattaatacaataattaaataataatctatagaatatagcaataatgtcataaaatattaacaaaatatcataaatctgatattaattaaaataataactaataacaacagtaataagaacaagcaaccatttaaggtcttacaatgtaacaagtactattaaattctatccacattatcttatttaatcctcattatgaggctagcaggtattattattttctctatttcatactgaaggacatcaaaattaagaagttcaactggccaggcacagtggcccacgcctgtaatcccagcactttgggagactgaagcaggtagatcacctgaggtcaggagttcgagaccagcctggccaatctggtgaaaccccgtctctactaaaaatacaaaaaattagccaggtatggtggcagacacatgtaatcccagctactcgggaggctgagggaattgcttgaaccagagatgcggggattgcagtgagccgatattgcaccactgcactccagcctgggcaacaagaatgaaactttgtctcaaaaaaaaaaaaaaaaaaaattaaaaatgttttgaggttccagcacaggtttacctgattccaacacccttgtgctttcctttaggcagctaactatatactgacccaagccttcttgaaatgaacttcgggtagattacatgtgtcttacttaccttacaggacagaaacaggaaagcaggagggccactagctagagaatgaaattacaaaaaaaccccagcacaaactttaggaaactgtttgaaaacattaaaataggatgggacagcactcacttactcaatgatattcatcaaacaaaacagaaaaaggattcagcttgaccacttaggaagccaaaggaatgttatctagatctcttggaggccgcaagactcatcttacagatgggaagggctttgaatcattgtcctcctttatccaggtagacaccaaaaacaatttcctgcaaactaacgactctccggtcagtctgcaggattcttaaggagatcgttacaatgcaatatgctgcgtgcttaatttgtgttcagaaaggccttgcacaatcactcaggcttatttttgctctaaggacaaatgaggagaagcaaggcctaatacaggctggaacaggtatgtcaacctcattaggatggcctggggggtcatgtccctggaatcagtgccacactgaactgcaaactaacctgccaaccctgtatctggaaaccacttttgtaggacagctgttctctcattccttttgcttagatcataaaagtagagttttcatccattgggaatttgtgtgttagacgcgaagggaatcagattctgatccaacttggtcaggaaaaaaaaaaataagggctgatttttccatccaagtcatgtagtctggttggagtgcatcccactcagggacagctattgtctggattcaccgagtctcagtcttgcccgggaaaaaggaatttttcgcctcactgctctgtccgtgagaagagttgcagaaggtgaccatttctgttttctgggtgattctctttctctatagaaatcctaaaatggaacctttatagaaattatgttctgtgcttcgctggagagagactggtctttttaaccaggctcatcaaacagtgggcattttcgttctcctggataataagtgttggtgggttaatgggtcatcctcaggacagaggtcagaaggaaaaacactgcagtgttcaaagctggagctagaaatgccagccgtcaaagaacacagaactcagtggacggtgatgatgtatagggcgtgcactggccaaccccatccgagaggtcacatctaacctttatcctcagcaaagccactgaaggtcgctcaatatgtgtgacccgcaactctgaggccctggtgagaagctgtccaggaaaacgctggtgcgtgtgctagagggttccttttcactaagggagaattgtcttccagctccttgcagactgacatcgcaaagtactttgaacgttgaaaagaacaaaaaaagcaaacagtcacacacacacaaaaagtaggcgggaggagggggaaagaaaaagggacagagagagagagaggtatcagcaggggtggttagtaaaaaggggcccggagacagaaaaccttttgttcccggagttcgtttcatgtagagattgtgaggtgaatggctttgaaacgaaatgggtttatgaaggagttgctaggtcacaggaagcgcgactgtcagactgcttttgtgaattcagtttctttaaaatttgggttaatcttaaaaagaatgtatctccttttcctgttctttctctttctgtcttcttttttggcgggggcgggaggacagagtaaggttcaggacggttccccactttctgttttattttccaccgtctgataaagcaaaaagaagcgatcacattacaagttctttgtcagtttttcagaattaggggtgggcagggcctgagcattaccttgtcccactagccaatggcggggcggcatgcaaatgaggtccgcgatcagcctgcctcagtcacaacagtgagctcagagacttgagggaggcgctgcgactgacaagcggctctgcccgggaccttctcgctttcatctagcgctgcactcaatggaggggcgggcaccgcagtgcttaatgctgtcttaactagtgtaggaaaacggctcaacccaccgctgccgaaatgaagtataaggtaagagagtgccttttacaggttaccttgcaagctgaaagctgtgcctgcgggtgtgtgcttgtgtatgcgtgttccttactgtcagtcccttgtgtgtcccggagagttctaagatgagtctcggtcactgaggttgacatgcaagcagacaagcaagcagagacccggtctttgagacccactccaggggttcacagtacacccgagtccatctgctctgaaagttgccggggaaatacctcggtgagaagttaagacttggagccgcttcacagcagccactggagatcagagggtgtctgacttgaatcgcggcaggcattggctcaagtctccttggcttccccaggcctggcttccactgccctggggaactgtaatgagaggaatgaggactgcatagtctgtctcagactggctcttagtgcaaagttttccagactttgctttaatcgtttggtctcggaaggagtatgccatatgcacttttggtgggagaaattaaaagcccagattacacagctgaggatggaaaattttgacatccttatgttatattggatgtaggaataaataagtatgagccatttcttgaaaacatttttattggagtttgaatggggtgagagtgcgaaggctcaggctggctcattgtgcctgaaagcttacagagtgtcatagtcatagtacttcagcagcattattttccaatgcattttacaccattgtttgtggatttttcttgccaaaaggatttttgacttgctccgtatattcccccctcccctttttcttttaagtcactcccatctaaggaggcaagcagcttccaggggacacaaagaaagcagactgcaatgaattggacatgaatttttcttgaatgatgaatagacatgagtgctagtgctactattttattttatgctattttaaacaaaagtgttattattaagatggatttgggcaagggtgctaggcttgtggattgacaatttatattaactgtacactagctggaagctacttcgctttttttctaaatttttctggtccatccttttttgatgtaaggttgtaaatacttggtctaactgatagccactgactagcctcagtaataaagcttttgttcaaaaactatgaatcttattcaaaagctttaagtctaaatgtcaaaagtctttatagtaatgcctacgttaccactgtctgaagacacaggtatcagctatttctgtttcatcagctttctattatcttcatcagtagggaagatcagaggaaagggtcatcctgaagactattaatatttgactttaggatgcaaccagaaacaaatccctctacttggcaggaaagttatcttccttaaagtggctcaccccatatttccttatttagaacaatgataggaccagatattactcagcctggagtgacttttttgctcctcctttccctgttgttgaataagaactggcttgcagaaaaaagagaaagtatgttcatatgtctattattggaaagtataaatggctgaaattaacattgagtgctataatctagaaagtgacgaaagcgacaaagtctcaagtcacttttattcaatgatctcatcgtggttagctttactctttatggaaagaaaatctaaaggcaactgataaagtgactgacagcgtaaactgcgattggcattcatggagaaacctgcttctccactgggccttactggtgttgaacaccttgccaaatgatgtaaatacatgatttttattaccttgtaggcaccttcaccagcaaaaaagctaacttctccgaccgaacacatgacttatgccctatgatgactattaaatcaaccaatagctgaagaaatccactttccttttttataaagttttctttctctctagttaataatgaacaactttacttcaggaaaggattttgttattgtaagtagaggagagacacaaaagtaatgaagtaacattaattgagacttactgtgacaacacaagattgtcatattcaactctcccaatagctctacaaggtgggtattatttttatactcaatttcaaatgacacagagaggctaagtaatttatctaatgccacacagctagaaagtggtgagctgggattagaactaaggcgatctggctccagaactcatgactttaaccactattaagagaaagagaaagagctatcgttgacctctctaaaatatggccagtgttttcttctccccagaaagtttaagactatttcatcccaagtattcctgcaggataatttctttttaagatagtaactctataaagcaaaatgaagtgcatgtttggcagttatttgtttaattcgagccacttaggtagtaaaaccagataattattagatggtaaaatcccagagacaggaattatctctaaaatactacgttgctctatgcactgtaaatttagcacaaaccttaaaatgtttactgaaagacttatgaatcaggccctataagattgtcgttgttaacctgattatctggtttggctgccccagggatcacaactacggaacaacaaaccttcacttattttgcacttaatatacatagcttcaggccaggcagcaaggtacttgcagtaatcctgagaactgtggaatgtaagctattactccggacagacatttctggttagcacttatctaatctgtctttatttccctgtatgtttttatttgtccacaggaaggttgcagtcactgtcatacgtacttaattttccatttctcttagaagggattcagtctgtggttatgtgatagtaaattacgggggcttcatttattaagaattttctacaaaatccccttcatatacagagcatgttcttaattgggcgggggctggcggggttaggtgattgcctcgatggccttggtttgcttacccagtgaaggctccctcctgagggtctggaggtgtatggttgtgctgtttcccaggagggtgatggaagggtctctgcgcagctgtgtttgagcagaagcccccgagaccccaccccgtttgtgcctgccaggcccgaggccccgcccacctcaggcccagcccgggcgggggctcagcggccccttggcctggctgctaatggctgagcagagacgcttttgtggctttgccaaatttctgagcccttacgtgcctacattaaaattctaaattatttatctcgtctaccatgcaacaaattcattctttaacgttttgactgaagaaaaattacagacggaacttacaatgccattaagaaaggtgcattctgaaagtcagagtcctgtgttctggttgaatggggtaggtcagggaaaggagaacctgtgtgccgtgaaacgctttggaaaggactttgaaagtattcgtatttcctcaagcaagaccgaggaaaataatgacagaggatctttaatttagtcaatatggtcatgcataagctattaaattcccaattatttccttgctttgatattttggtttaaaatgctttatttttctctgtatgatttttgcaaccaatccaaatgtaggactcctgtccttttcctttttaaaccttgtatgagatctatggatttaaaatcactaaaacatgctttgaaaaatatcaacttggttatttatgtatttatgcatttatttatttatttagtaaacccatttgcagagctaaatggcttacctacacagagataaaagcctttagagtactgaaggtgcctgataataccaaatttagcaagttgtacagtgcgtaacatgccaaggattcctttagcatcctttccttgctgggatacacgtcagtcctgttctcagaattcagtggttccctgtctctcccttcactccagtcttctgaaaaaaaaacaccttcctctccacttttctttttttctttttttgagatcaagtctcactctgtcgcccaggctggagtgcagtggtgccacctcagctcactgcgacctctgcctcctgggttcaagtgattctcctgtctcagcctccggagtagctgggattacaggtgcccaccaccatgcctggataagttttgtatttttagtagagatgggtttcactgtgttggtcaggctggtctcgaactcttgacctcaggtgatccacctgcctcagcctcccaaagtgctgggattacaggtgtgagccaccgcacccggcctttttgcaaattctctcccactttcgtgcttttatgacctcattggttctccttttatcttcttcttcttcttttcaggctttccttacgcttctttaatactgacttccgtagatcttacttccaaccccctactccccagccccccacccgcacctatctactgccgcccccttgcccccgacacacagatgtgacacttttaatgcacattctgtagccctcatttttccttctccttagactctgctatgggaaatcttggtccctcactgcccccattcatctgcctctctgtttgcgtttacatgacttgagcggcctgtcagtcccgctagtaaagtctcctcatccatccactctgtttaaacaatcaaactctgaaacctgtgtctcctggaccatcctataatccctaaaataggctgttatgcttttcacctctgccctactctgttagcactaccttacttattgacctctttcaatcaaattgttatctaaaggatacccgtaactcagataggttgcctactgggcctgtttagttttaagtaaaccccactgaatatgagagacccaccctctatttgtatgtagaggcagattgatcgaaaagtccttgaataaaaaacatgatctagggtctgtgaagttttgagggggccaagacttggtgttttatgctcttgtgttagagacatgatagagcatgggctttgaagaaaggcatttctgttccttatggcttatagctctggaccttaggcaagttaagctctctaagcctcattttacagcattgtctgtaaaatagggataagaataactgcctcatactattcgaagacctgggataatatatgaatgaagtacttactatggctcttggcatatagtaagcagacaatgcaagctggctccagctctctttgtatggtagatgctcaatagatgttgaaaggatggtatgtactcaagacttggtgacagaattatgtcaaaatcccagttactaggttgagatggttgaatattgttgagtattctgtgggcctggatgtgtattgtaagcatagggccctaacagcatatggccccacttgctaatatactaatgacttgattccttcattattgttcattggactcagtattcctgaaattacaagactttgctcatagaagacaaaatgtatacacaaatagccatttaagaggatcttaatactatatggcatagtaaaaaaacaacaacaacaacaaaaaacatgggctttgtttcagatcccacttttgttactttctaacagtataattttatgctagctactttaaaccttcttttcctcatttatcaaatgagaataatacctgtcttgtcagatagttataggatataatatatgacaattgtcctttctagcagatattaggcatttaataaatggcagctattatatgatgttatatacacatacccacaaagatatacagatatatagatatggaatttttatatagataaaagtgtttaaaggagacattcactagaattgtttacccataacagaaatatcagtgaggaagagaaagtcgtcaattcaaaaaaccaaagataaaatccaaagaatgtaagttgggagtacatgagaagttcagggtgaactctcttatccaattgcagtcaattagaatgacataaatgtaaagtaagaggtcttggttgtctatgtttagatcattttagggtcagaaagaaatctgaacaaattggtttgaaatgccaaccactaggaccaaggcaatactctgcaagaacatataggctgaattaccaggacttctcgccaagacaaatgaaacagggccattgggaagaaatactatatttctaacttaaaatgccagagagtaactgacggtttcctaggtgatagatggttgcaaagagtacgggcatgaaaaggggacacacacacacaaaaaaaaaccctgtttatactttgccaacaacacccccctccatcttatttactttgaacattccagccatctctctgcagtaattcctgctggctaatgaggattccacacagctagggaacatgacagcctgcaaaggattattttcctgaacaatctgcattttaagataagtcaccttgttggtaaccttttgtacccttcattggaaagggtgactctctttgaagacagtttgaccaaacaatgagatctaggtgaatttgaggaagatagaacgggcactccagaaatatggatagtggtggagctgacagcagtttttcatggttgacgtagggagtggaggcagctgtcatggagatattaaagttgccagtggaatgttttccaatacatattcctgggccccacaatggactattaaatcccagttattctttaaaaaaaaaaaaaaaaaaggccgggcgcggtggctcacacctgtaatcccagcactttgggaggccgaggcaggcggatcacgaggtcaggagatcgagaccatcatggctaacacggtgaaaccccgtctctactaaaaatacaaaaaattagctgggcatggtggtggtcacctgtaatcccagctacttgggaggctaaggcaggagaatggcttgaacccgggaggcggagcttgcagtgagccgagattgcaccactgcactccagcctgggcgacagagtgagactgtctcaaaaacaaaacaaacaaacaaataaacaaacaaacaaaacagctagtctctttctccctaatcccctcactaaccactactagtgcttctggtgcttacacggtgtctaagtaggtagttcatgatccttattcaaaggctggatccagtgatttgtaagtgtcatgtttctttgcaaatctcagtcttgcgaattagaattccccctgatatgtctaacatatcaaggtaatagttatatgatgttactaaaaatgtccctcacatgaaatgttatgtttatgcccacaggaaacaaagatttagcaacaaatatgtaaaagtgaaaccatttcaagcaacaaaaatatttgatagcccttttgaaattaatttgaattcctttttttactgtgtgtatgtgtggttggggggcaggggggcggtggatggattaattatctgtgaaacccagtagaaagttgcagtaaccaaaacacgtgtaaagttcagatttgaaccagatctcctgtctacttcttaaggcattgtgcatttagatagtatatgtcattcatgtttttcctaggttttattggtcaggcagaaacactgtgctatctcttggtaactatgagttagccttaatctcagtgattcatgacagtccacttgttttccttaatttaatgcctcactcccacaggagatgaggctaactgaggactcatctagaggactctttaagaatgagctgggcttatctgccccccaacaccctccgcctcccaaaataaccataacaggcaaagccagcacacagaaaatggcagtaagtggacttctagacactccagctacttctgagtcttcagtgtcaggacacatcagtcatctgtcgatgagattttttttttcttttccttttgttctttcgttcttgttactagtcactgtggcatgactgagagtttggcaggaaatgggttcgtggacctgtggtacagtcgcactaccacagcagcatgggcctagcaaaatgttgagccctctttcccttgcgtgctcccctggggcagaagtccagtgctatctccgcttccctgaccctctccactcagagcccagcatgacaagcacacctttaaatgggttcaaggaagggaatagcagaaatgaacgcagcccgacagcctcctttctcttgataacccctgtcactgtggagctggacttctaggctatctcacagaggcccagaggcactggaatcgatctcatttccttacagacatcaccttgtcaattagagaacacataacgttgattgaatttaagattcttatcagtgcctagctctttttctcccaaatccgaaattcagccatggcagatccataatcaagaaatatacttacattcccatcctttgttgttggtttcaaaaatatttcttttttgtgagtatgtatccatgttttacaaaccaaaaaaatgggacatatggtctgacaaagggaaggatatttgaacctggggactgcctgggagagtccggaagcacatggtcactctagagactgtcatcaagggctgctcctgagattaatccactgtcgaaggcattatcccatctcccttacagcagccttttgcaggaaactatctaagatgttgtgctttttttttcatttacttgtaaataacaaggtgctctctttccttttctttgcagaaataggcatctttagaaataaagccatgcccattttgaaataagaacttgtttggaacacctgagagtgttaagcagtgcgggggatttgcatccaattgttcttgctttaaacctggcatgggcgctctcgcctcatagcccgcagcacctgaatcaagcctcctgcctcccttattaagatcttaattacagactcagcttagttcattgctgaagggaaagaatttcatttctctgaagtgtgtctgttttttggtgtggcaggtgtaatcatgatgagatcatttctgggttttttgttttgttggttttttttttcctagaggaagtttttttttccaaggggaggagtacagttcttaagacacaatttcatgagctcatcttggcgcagtaataataactgtgctttgattttatagagactctttttcctgaagaaatcagagcatttggagtaaataatctcatgattcctcatatttttataaagaagaacatgtctattaatatttattttgcagacagggaaacagaggcacaaaaggcagagatttgatggtcattagtcttcaaatgtgaagtctgaagctagaccctcctaattcagtctggtgtccattcctctatccagggtttctcaaccttggcactactgacacttagggccaggtcattctttgtggtgggggctgtcctgtacactgtaggatgtttagcaacatccctggccactctacccactagatgccagtaacacacgtgtgcatgcatgtgcacatgcacacacacacacagtgacaaccaaaaaatgccactaaacattgcccgtacccagaggggacaaaaatcctcctagttgagaagcagtggtctaatctcttctactccttctccttaaaaataactgccctactcaaaaatacccccatagaactgactgccataattttatcattactgatattgagcttaatgtaacaggtcctaaccaaaaagcaacttcctcttacaggcctagccccagtttgtttcagtgaataccacaaaatactaagaagcgcagagtttcattcaagtcaaatgtaaaacccatcaaaccatctctaaggcaactttaaagtatttctctggcttctctctctacaatatgtacctcatcatggaacatgcatttagagctgggtctttaagaaagctattttattctcataaactggtgtataacatgtgcgtgtaagagcttgtctctccacctcggcactgaacaatttcacaatgaaggttttttgttccctttgctcctgccaccttttccctgtcttctaactaagaagctgcagcttcaaaaactcttccttgagacagcttagtggctgcattgctgacagtgtatgactgtaaacacctctcagccaagtgtgtgaatctgttttctaaaactctctgaggacctcacaagtgaagtagataataccaatcaggcaccaaatccaggtcaagtgacatctaaaagagttccagggagggttgcatcctatttacatcaactcggttctggctgggagatggacaacagttgccaggatgtgtatgcatttgtattggtgggtttagatataaccttgggctgcatagcttggtgaaggaagataagatagacaggaatggaaaaataggaacctctttttcttctttcaaacaccttatcagatgttataacttgtgcattttgactttgagaaatgacatcatttttggaagtatattgtaatatagtagattggggtctcctactccattaaaacttaattcttatttctcttccctgagtacctggatgttagagggatttgtctagacaggcagatagatatgatccagtgccaacactgtaatgctggctgaaatccagatggttgttttattgttaataaaatctatcttgtgggtgggtgggtgtcaggccttcatcattatatggtgcctgtcagatttatctacagacagaaccctgaaaacagcttgtgcctgccccgcatttttgaccccttgccaagatactgtactgaaatctatcaaaatcaggcaacctgggacaaatgcttcgagattccaaggcttaatagcaacagtgctgacttctaagatggagaagattctcaggaagggcatccttgtccggtggggaaaaattctagattaagaggtgaaccagatgctagctctggctctgccgctaatctgagaccctctgggctgtaaaataaggagattgggttagaatggttccttcttactctgaaattctactctaatcaactctggtcaaggtatgggtgacttctggttctaatacctataaaaaacctaggtgttcttcccccttctttttttctttttctttttcttttttttttttttatgacagagtctcgctctgtcacccaggctggagtgcaatggcgtgatctcagctcactgcaacctccgcctcccaggttcaagcaattctcctgcctcagcctcccgagtaactgaaactgcaggtgcacacctccatgcctggctaattttttgtattttagtagagacggggtttcaccatgttgcccaggctggtcgcaaactcctgagctcaggcaatctgcccacctcagcctcccaaagtgctgggattacaggtgtgagccaccgtgcgcggcctccaccttctttaagattctcaggagttgcttcggtaaacccaaagaccacagatgagtgaaaaagaactcagcagtcaaattcatcttccaccgtgggccaggaaataatagaagttgactgtgacattgcacgtatacacacatatatgcaaatctgcctactaactctttgccctaagattttgttggttacatagtaaacaaatcctagcatatgaatgtgtctgtccagcacgaaccctaaatcaagcaagaatagatggcattcattcaagtatggggaaggagaggaacccagcttttgaggaacccctttgtaattgcacagctatgctgtccatatcatgttaccaaatctggtcagagagagatttctttctgagatccaaatatccaaatttgcagtgagcatcagatcttttcaccagtcctcaaaaagtaacttcactttggtatatgagccaccaaaatagtgctgggttccaaatgatccttcatcagacaggattggccagtgtggaagagatgttaagattccaagccctggatctacaaccacacacagggcgctgccccacagcacatccagggagtattaacagcttctcttgccatgtcaaagagtaccttcgggaggcaagtatttaatgtcacatttctcaaaccttctcccactcagacatgctcaaaagagaatgctatagctaaagttcacaaagctggaaaatctaagaaaacttgaggactcggggcaaagtgaatgacgtcaagattcggcgggggggtccaagatactcctataagctttgtaactgtcataggggtctagaagaagcacttcccagaaaataaaaattactgcctgaaatgcagtctgggtgccacaggaggccttgtgggaaatgttgaacacccctcagcagtgggcagaaggatgccagggattagtgggacaaagtggggtcctgcttttgcctttctgtgagctccattcagctcacctagtgaaaagtgtgtcagaacacagtcgacaaatagtactgggaaaaaattagcatatcttatattatatcataacttatcatatcttctgtctcctgtattgaaagcttcatgcctgtgacttcataatctcaagaggaaccaactcaaaaaattcaacattccagatcttcagatgcaagaacctaagtgtaaaccaagtattctgagaattaaaatcctgacacttacagatatccatgttttctgactatggctgtttccttctctggggaaagcccacatccccctctatcccaaaggtgatggtgggaaggaaaggagaaatgtagccaaaatggtttgcagttctcagaccaaagccggttttcgtcagtatgcacaaaagcacgtgagcctttctttctcttccctgttgtgccctgagactgaccttgacaatgttcatccctcagctgcctgccttaggactgacttccttgatgatggccatttccttgaatgtgtctgtttctcagggtctgtcctctgcatgcatgcatttgcgcatgcaggcatgcaaacccacaagagtccaggctaaagttttgggggattgggtacaggaaaatcatgtcattgagaatggggcaaccctgaggccatggcaggatcccctgcatgacaaatatagaatgaagtaaaaataatcagaggaagccgggccattgatgatgctatcagtcttagtggggtgatacaccagacattctgtctcatttctcttcaaacgaccgcatgagtggtcatggaaactacaagtcacacctctccgtatttggaaaagcagatcgtttctctgacataggagtaataagctttcttgacattttgatagcagtgagggaagggaaaaaaggcagggaggagctggaggtggggtgaggggtagaagccgtcatgtgtcctagagctctctgtaccagcgttctggtcaactgtacagtattttcttcccactcctcaggcatagcttgggaaccaggaacagcagaacccaagtggtctggcaaagtgtttgaatggtgctctgtcacctagtgccaaaagcagattgctacactgaagggagaaaggctcttaaaagagaccattgtgtttaatctcactgggatggtcagttcctcttggccttcctgtttgctccgtagttgcgaacactagtttcaggggggtcaggctcccgatctgcgtcattatcctgtttaaatagggaggggcaggccctttcctgctgtctgtctcccatagtctctggctgtgaggcttgagtgacttggacatgacatttctctttctggttcattcattttccccacttccatctgaaaattctaaccaaatgtcttgctgaattctctaagtacaacaatttcaccctccctgcagacaatgaggaaatcagagtccagaatccatttcaacttagcaaacatttactgagtctatattttgtttcggatactggggtaaagttctggaaatgcaaaaggaatttgcatctctgaacttaaggagttcacagtcttgaacagggcaatccaagttgtactgtaaagaaatagtatgatcgagaactgggaaaggaaacagcctttgaatagatacccattctggttaaatggaagatgggtttcgagggaggaaggaatttaatgcaggaaagccaattgggaagcaatttctgtgctacagaaaaaaaaaaaaaaaaagttgctgaagacctgaatgaagggtggcagtgaggtgaaaagcagggccccagatgggttgcaggtcatgaagagacacagcaaacctctgcggctcttactgcacagctgtgtgcatgctgttaaccaagcaaagcaaagcaggagaaaaaggtgtttgcacttgcttttagagaggaagatgcccattagactggatataagggactggaatgcagaagaaatatccagcgaagactatggctttaggaattatctgtgtgttcagatgccatcctcctgtagagcgtaagcacatagctgagaagaggaaagtgcaaaggacaaatctctttggaacatgatcactttagggatgggaaaaagatttagtctccagtggagaataaggatgagagtggtcaagagaagagagaggacgaaaaagtggtatcgtggaggccagaagaagacaatttcaaggaagcttgggctggggatcaaggctagaggctgctgcaatcagggttccctcagatagggctcatgatcctaaatgctgatttgcaatcctgattagagccacagcttgtgttgcacctgtatttcacttgactaaattctgtcctaattctagacctgaagacaagaggcctgaattcctgtctcagctctaagactttcttgccaggtgagctggcaaatcattaacttcttgaggctcatttttttcttttgtaaagtgaaagggttggacggtaattgtttaaagttccttctggctttcaagttctgtgccctaactgttttggtgttttgccaagctctagctgcactgctaactgccagcctttggagactaaccatccaactgaatatagagttacatagctctcttatctctccttgatttgtttctgtgttgaccttccctaccctggagataaatatccaagggggtgagtgggcaggagaaagagtacatcttgagtagattaaactgcctctctggggtttttctaagatagcagatcatcagcttctgactttgtggctcaaggaatcacacctttgcactgaaggagaggatccctccacttccttgccagaagaattcattcttgattttcctattacgactgatgtgcacttttgaatgagatggtttatggtccagctgaaattcatttggctgttatggtcttactgaaaccttgcaccaacaccaaatcttttcgaaagtccaactcctgcctcatgccttttcctacctgctgatgtattatctgtgttggaatctgatgacatttatccataatttatcaagtagtatcattattaatatgttgtctcagaagttcccttgaatgcaaccaatggtttcactattgctgtttgtaggcagatactcaacaagaggttgcagtgacaagaactcattcataattcagaaatatactgctttaagataacagttcttctgaaatgtaatcctgagcaagataaatatcagataggtacaaaacatatataatagcatcattggaataggaccaagcctggactgcaaatggaaaggaggcaaggcggggagggagcctgaagcccaagggccatctagcaaattaaataaaacatcaccatagcttaccaaagaccgggaaactaaggcccaaagggatgctgttgcctggcaaagtaacacagctagaacctaagaccgcaaatatccaatttattccatagacacaaaaagaagaaccgctcctcttcagaactttatcatataatggaactgagcccagtaacaaggatgctgcgtggctgagctaaggtagcttaaagttctggaaagaggattaaactgaaagaacgcaattctctttccatcgctgccaatagtgtggtcttgggcaaatgataaacttcaaatctatttcctcatctgtgacacaagggcattgtgtccaggtgatctctaaaggtccctggagccgtaagcttcggtttaggagagtggctggatgtagacattggctctctgtagcttgcgcagatattaaataactcatactcctgttcggccaaggctgagaatatgtatcggtgtgtgaataggctggtgccggggtcctggctactaacagcactgtcaagctgtgcctgaaacctaatctctatgggcactgaggaggactgctgggaagtcctgacaaccagtcaggaggactcacctgcggtgcccacattagcccagactgtggggctctgagagtttcccccaagaagcagctcacaggccagtgtagaaacattagccggctgctcaccaggtggtaagaaggttactggggcaggagacaaagaacgcccaggacgactctcgcacggggatttctatctgcctctgatcaagcatgctccggtgctccacttcagtgcctcatggtgctcttggagttggaagtggcccaattccgaatgccttgagctgatttatgctgattagatctgtagccctttgcctttctactgttttctgtttctcttctttcccttctttgtagccagtataattgcacagctaccaaccctcagctcccatacaactagcccgactctgttgcttctgatttcatgtgggggcttcccgattgctgaatgggcccagaagaaagggacagacagaggccagagtggtcagctatctcctcacttaataatctcagtacagctctggtggagtcatttcctggaggtcattttagtaaaaggaccagaatcttgtcctctgtaactctatgacttctcttgtaaaatacagaatacccaaaagatgggagaagagaaacagagacaattttaggattatgacaccatccttaaatggttccatgaacaggggaaactgctgcctgattttttctttatgtatgtgaacttttcattgttagatgaaacccagcgcctcctggaatattaactacccagtgaaaccttcccctgaaatatgcactcctcagtttccctttagcttccctggccgctcacctctctgtgtctcacacttcctggatctcataactgtcaagaaaaaggacttcaaccttattcttgaagagtatcacaaagcttcctgaggactgtcctctatggctttatctcttttaattgccctggctaagaggaacctggctcacagcagcagaactggacccgtcccaactactgaatagagggcagatcccttccattgcacagccctccagagcggaaaacacacaggacccgtggcaatggggctagcacaaggggacgcgagtagtgcaagtcagctgcaaagaaatgaaaagcacgaggctgaatgatcaagtccacgttgctagagaagaaaatagacagcaaaagctcagacaatgacagccgaaaatcccacgaatatgtcatggtataaaataaagtcatgaacctgccccatccaatccgtaatcctttcttccataaatgagccccacctcaatgacattaagtgcatccaaacatcttaacaaagcattagagttcacttttagtgttccgagggcttgtgctgaatcaacaacgtccccgacttcgctgtgctctgggaagggggcagacatgcgggaatggctgcccgcgtgctgggaaactttactaatgccaagaaatgaaatcttccgagcctttgaaaggcctccaagaatgtcagcacgtactgcctgcccactctctgctgaatgcctactttggctgtctgcttagtactgaatgtgccagacaggccttcatacaaagacggagagtgtgttgggcccatgaaaggggaaggcacagcttttctgatgtgaatggtgagattcaagaagtaggtgatgaaaggggagggcgaggaggggccctcaggaaaggtatgcataaaagaccgagagagaagagttggcatccacctatgtgttaataaatttgttgtcaaagctggagatgtatatggctgctggcctatgctccacgcttgatggcatgtctacatgccttgcttgtggattctctctggatccaaggctcctgtcatctgagaacaagaatttctaagccctgccaaggcatatatatgtgtacttctattggcttttcaactccaaatataaatgctatttgtactgtgtgttatttgggatttttcttttactcttttcacctccaatatagaacaatattgagaaatgttcattgtcgaacatctgaatatctcgggatttttttttccttaagctcactttgaaaaaggaagaaaaatgttttgtatagtgaaccatgctctaactctgtaacactgctactcataattccttggcacggcatctcctgctagaggaaagaactcttctggtgttttgagcttttccaaggaggcagtctgatgtcactggtggcagatgcagtgtatatgtatctgtcttttgtctgcaccatctgtttttctccttacagtctattgttcagatttatgcttctctctttccaggaagtgtgcctttccataagagcacgggccttaggtgataaagggaccgacccaatattctaacacggtttccttctcttccttccctcctagaatcttatggcaagggccttatatgacaatgtcccagagtgtgccgaggaactggcctttcgcaagggagacatcctgaccgtcatagagcagaacacagggggactggaaggatggtggctgtgctcattacacggtcggcaaggcattgtcccaggcaaccgggtgaagcttctgattggtcccatgcaggagactgcctccagtcacgagcagcctgcctctggactgatgcagcagacctttggccaacagaagctctatcaagtgccaaacccacaggctgctccccgagacaccatctaccaagtgccaccttcctaccaaaatcagggaatttaccaagtccccactggccacggcacccaagaacaagaggtatatcaggtgccaccatcagtgcagagaagcattgggggaaccagtgggccccacgtgggtaaaaaggtgagtaaatgactaactaaatttttgttcctacttatttttttttcccattacacttggagcatttggaaatgttcccaaattaataacttgaagctgccaagaagtagatataaccaataccttagctcaggcatcatgtttgcatgattttgccattcatccatcattcagcaaaacttctttgaactaccatgtgctgagtacagttgatttccagccctcctaagttcctgtgtcatcctgggttacatgggttattaaactgtttctctccatctttctcatatatcagcttctaagccttcactctgtgctcagatcgtttcctatcttttctgtttcttcattgagtggaacaaacaccaaatctcgtacaagcctgatgatgcaacaaggatcctcccttggccaaaagctgaatcatgacctcagtggcctggctggacaaggaacccacccaaagtagcgagagtgaggaagctgggagtatgtcatgctgaccaactcgttctatagagttatcagcttagtttgactcatttaaaaatgcacagatactagtggaattggaatgaagccatcctcctgtccttcaagtcattcttataataatgcctgaggcagtgggtgaaaacagtggagcttggatatttaggaaggaattaatttaaaaatacagtgtggggagctctgcaacaccctgtgtaatcccaaatactttagcaatttgaggtcaatagaaattcactaattgaacaatgaatgttgagcatctaatatatttttgatgcttgtgatacagtgattaattaaagataaacaaagccctggtgatgcttacattgccgtgggggagacagaagcaaccaagagaatgctaggtagggacacgtgttatcaggaaaataatgtcagtggactgatcgggggtaacacccacaaccaaggtgatgcttatgtgagcatcacaaaggagggattttctctttcatttgctggcaaattccaatgggtcctacaaggtttggtattaggaatgaacaaatttaactggataagaagatatccctgaattacaagaggaaagatgcaattacataccagaaagagcttgttgacccttagaacactaactatagatgtgtcctgccccaagtaaatctaatatgaagtctgattttacaaacctctgtaaattagggaatatctatttgatgtattagaatcctctgttgaaaaaacaaaggattcctttaaacaatgaaagcactaatgcatttttgggtacatggaaagaggcagcctagagaccctgtggagagcccttagtgtttggctggggaggtgccagggccaccctcctgccctccccatcctggccatgtcaccaccccagaccctgaccctgtgtgggtagattcctttaaacaacaaagcactaatgcatttttaaatcacctttgatataaaaagtatgttttacaaaatacttctcaagagcacgcgtgtggcatgaactgagcgtaggttcgttaagagggattcctcaagggtggtgcacagcttttagacttgtactgcccacgacaacgatgctgcctagaggtgataaactgacttgtggcttttcagtcttccttgtcctaggaattgtagattcaaagggaaaacaaaacctggcttctatctccagaggggaaaaataacagttgaaaggtgtaactataaataagtaacttcactcattcttagtcctggttgtttgcaccttaaaaatagctctcccacatctgagccagtgtgaggcagaaggggaggccagagcaggaaatgcttggctgggaggtggtgggctctaaactttcatcacagttgactttggcaggaaggtagcgtgttttcctttttagacccaaccttttcagctccaagtcagagaagcctaagccttcagacttcttccccttgtatctgctgggactgccctgcaggctttccccatggctccccgtccttccagagggcagagatacggactcatcttcccttggattgatgtcaaagggctggggtgctggggtgaccctcgggcactcacattccatgttttgttttgctttttttaagtctacactcagtagaacattttctgtttagcaaaaggtagatgagtcctgcaggaggaaatcaacttctgaaaatgacctgtgccagcccttccaggagttgcagccagggctgaagagtaggccgtgcctaaagcatcacacagtcagggtctggggtagtgacatggccaggatggggagggcaagagggtggccctggcaccttccctgccaaataccaagggcttctccacagtatcctgatcctgggtctctaggctgcctctctccatgtaccccagagcagtggttcacatccatgggagtgtggttgcctcttcctttcttttcactcccttcctcacttctcttttctatctctctctctctctctctctctctctcccccccatccctccctccttccctctccctcccttcctcccttccttcctttctttcatagtggagatggcttagctgctaggaggtgattttagccttccaggcaattgcaactgctttaaaaaacatctgtcaacatcttcctgggtataggatattctcagtgggtgggaatcattctaatgacttaagcctaggccctaagagataatcccagcacactggggatcaggcgtggctttttcatttttctgagtttgcattttagtagttttactgactggcttaataaagcaatttgctcattttctctttaaatttttcatctgtaagataatatgagcccagaactagatatgcctggtagtttaagctatggtctttaaaagctcttgaataagaaaataaggaggcagtggaatcttattctgagccaccggggtggggtttaaaaatgttaatgggcatagaatcacccagagaggtagggcagtgagtttaaatgcagattcccaggtctttccctcagagaaattaatccagtaggtctggttgggggcccaggaatctgcatcttattgagctccttgcatagttttgtgggtggtggcctaggactagactttgagaaacactgtaaagggaccatgaaggggctgggacatgttccaatctgattatgatttgggactttccatagttcaaaattcccttgatattgctacagactgtgggcttccgaagttttacccagcactgcttttttctactaatgaatcacttaaggaaaaaaaaaaaaaaaaaaaaagacagtgaattctgccttctatcacttcaactttgctctcttggaaactccaacctctacccaccctcttgcatcccctccacactaactgacattcatcacatattaaatcagcatttagagaaagaaatatagtcataaaatccccacccttttaggaaacaagcagacagtgtgagaattgtggagagagtaaggccttcagggttcagctgatgctgggttgtttctccatagctgtatatcctttggtaagttactgaccatctctacgccttggtttcttcatctgtttaatgggaatgatactaactacttcataggctgtcgtgagaattaaacagaagcatacatagaaagtccctggctcagtgcttagcatggcaggggcttaaaagaatgcattcctctcaccttgcgtttcctttctcagagtttatttcctactacatcagccctgttgtgtttcttacgacacaccgaaggtacaagtgctttcttgctaacacatatgctgtgttttttgagtgtgtggctttctctttggttctgcaagaattctgcaaagggtggaaaaaaactctccaagttatctgaaaaccatatacgctgacacctttacttaatttcattggtctttttcactctgtgttttgtgcacagggccgttttatccattaggcgttgtaggcaatatgcccagtgcctataagaatgtttgggagctgaataaaagatcttttgactccaaaatatgaaacacaaaaactgcaaaatagaaattaataaacatttaggtcaatgtctaggaaaccatatcatgtctgccccattaattgttttatttagggcttataactatttcatcatattagaaaacagtatgtaggttatatttttctcactttgcaaagatttctaaatatgcatcatggttgccaagaacccacaggcaatcctaaattaaataagttactcatagtcgaataatttgaaaaactgaattataaaggaagaaaaaaagttttcaatttttaacagcaaaaattctacttaatatgggattatggtttggggtaaatgaaatctacaaatgttcaaaaccaaaagcctaaaaagatctaaaatagtctcatttctctgcttcaaagatcagtgaaattgctacctgagttcatccatttcacagttgatctgcatgggaaattatatgtgcttctctgatttttctttggatgtgtcgcttttattctaactgctggaactatttgttgtacctctttctgaagatcagtttggggctaaattacaagctccatcagcgcaggggccatggctgcctcctgactgctgtaggctgagcacttggtagagcatcagcccacagatagcagcccagtgaaccaatgaacaggtggaagcaagaatcaaagtgttaaatgagagttaacctttaattaactgaaaggtggttctgatcttatcacacatccaccctcacacgctgctgctcgaatcccatggttcagctcattaccatctggtatgagaggtgtcagattatatacagtcatttccctcgctgaaggaccttccagaatgtcactgcctgtgtcctgtaagggtaactattcatatacaatcaatgagcaccttgatgcaaagcatgagtgatgtaaagaagggcttatctgagagtttaacttctgtgcattttgcccaatttagacaagattagttaactcctctgtggtcacctaaggaggaaaactaggctttttttttttttttttgagtcagggtctcgctctgtcacccatgctgaagtgcggtggtgccatctcgggtcactgcaacttctggctcctgggttcaagcgattctcattcctcagcctgcccagtagctgggactataggcatgcgctaccaagcctggctaatttttgtgcttttagtagagacggggttttgccatgttggccaggctggtcttgaactcctggcctcaggtgatatgcccgcttcaggttcccaaagtgctgggataataggcatgagccactgcgcctggcctaactttttctactgaggggcagaacttcctttgcatatgttatgatttacctagaatgcctttcccttctattttccctgtgaactcctatccattctttaaaacccactccaaggttcatccccctcatgaagcttcctctctgcaacccagcagtttctcccttccctatggtcccagaatgtgttgtatattccattgatctcaagggcttcttaaaaatggaatggtctgccattgcaatgtgtgtgatggtctggactggggtaagtattgctttgaggtggcacttggaaaactgaagtaatattcagatttaccaagatcctatgacatcatctttaaggaccattttctaccttccaaaatgggtcacggccaaatgttggcaggaaatgattcaaaggttttagccaggtcttccaggcccattcctgaaaggtaatgtaagaaacagaaatagattagctacaatgtttgtaccttcctagacactgagtcatcacaaattacacacatacacgtacatacacatacacatacacacacacagacacccataagctgttggctaaggaacaaggacttcccttattggaatttgaggcattgtgcaatctggttgcccagagcgacactcagatactagccaactaagtgctatatattagcagcatgacttgtctaacaacaagcaaaaaataggtttagaggaaatgaaagcttccagaaaagttaaattctgacttcacctcactttctcctgttccttgcctatacacacacaaaatacgtacacacccaaaaaatactcctagggcagagggtacttcggtttcctcatttataaatcaataaagtacaactatgttccagaattgtacatttctacataaagataatcctaatgtatatgaattgtttgcctcgatacatgggttttggggctatgcagagaactgtacttgccatctaaaatgtcacccctgaagtttcaagatacattttaatattacacaaaactggaggtcattcagctcttgaagggcaggactttatgagctcactttgaaaatgagaagtatcttttctcagacaagtcacccgagccaaagcaatgagcaaactctaacacccctccttaaaaattaacaaaggtcctttttgtttggccagtgccaaagccttcaaactcagttgcacttcgttctaaattttatagataatgcatatttctaagagtgcattagtaacttcttataaacccacaccaaagcaaacagaggttaaccctcctttttcaatgatttcatgctaaatgactgtgcttatcagagtgaagaggtaagagactgctttaatatgatgtctggctaagtaggagaacactgtgagagagagaaaacagaataaatttatttatttaatttcatgataaacaatattcgttgaacacatctttttttttatttttgagatggagtttcactcttgttgtccaggctggaatgcaatggcgcaatcttggctcactgcaacctccgcctcccaggttcaagcgattctcctgtctccgcctcccaagtagctgggattacaggtgcccaccaccttgcccggctaatttttgtatttttagtagagacggggtttcatcatattggtcaggctggtctcaaactcctgatctcaggtgatctgcccacctcggcctcccaaagtgctgggattacagacatgagccatcacgcccggcctggttgtacaaatctttaaaaaaagacttgcttgactacattgtgcaaaatgcagaactagaaactgtcagcaatcaaaagcacttcattctaactagctgtgccttaaacgttgtcaagataacttctagagagatgtgctgctcctgtttaaagtgtgtcagtgccactcacataggacaatgtgtgttcctcaaaagtcggatgtaggtcgggcgcagtggcgcatgcctgtaattccagcactttggaaggccgaagtgggtagatcacctgaggtcaggagtttgcaaccagtctgactgataccatgaaaccccgtctccactaaatacaaaaaaattagccaggcatggtggtgcatgcctgttaatccgagttacttcggaggctgagacaggagaatcgcttgtacctgggaggcagaggttgcagtgagctgagatcacgccattgcactccagcctgggcaacaagagcaaaactctgtctcaaaaaaaaaaaaaagtaggatgtaactccagtaacatttgaagagtgccaaggagtcctctctttaaagggatcctacagtatatcagttttttgaagcaaagaagcctttagcaatgccacaatcgcctctgatttatttgattaatttttgtaatacttggttttcttaaagcatggcacacttaaaccagttatttattggaatagtttttgttttcaaagtcactaccaattgaatgtgcagccttcactggtgtcattaccccatgcttccgtctcattttgcaagatagtgttagaactaaagtgggggtgaccccaaggcgccttgagccttggctccatgttagggatcccatagaggtactaccacctgatcctctccacagcctcgtgaggtgcacctcacagcatttgctgttcagaggagggaactgaggtctgagaaggaaattcacttgctgaagttaacttgctgcctccagtgagaggcaggattgatatttgagcccacgtctgtctgactccaatgctaatgatttttacatcccggctgaaggatgatattgccaagcccttaaagaagaaggcatatttggacacctcattagcaatttgggcgctaaatcataccctgttggccaggaagaattaaagttgctgcccagggctcccacctcaggtccagggagtagcctcaatactgagggaatctgaattaaggagcttggaagttccccccacctagctgtagtgggcagtttcagagtgggctgatccaggagtcctgaccaggtcagtagggtgatgtctagactccagtaccactgagaatgttgctatgttggctttctctgccacacagaaaagtcttttctttccttttcttttctttctttctttcttttttttttttttttttgagacggaccctccctctgttgaccaggctggagtgcagtggcacaatctcggctcaccacaacctccgcctcctgggttcaagtgattctcctgccttagcctcccgagtagctgggactatgggtgcgcactaccatgcctggctaatttttgtatttttagtagagacaaagtttcactacgttggcaaggctggtctcgaactcctgacctcgtgatctgcccacctcggcctcccaaagtgctgggattataggcgtgagccaccacgcctggcctaagactgtctttccaaatgacttcaaattccttcaaatgggtaacttcatttaaccaggtgggggcacctcccaaaacacaagttacccagctttcaagttgtggctctcatataaggaagtaactttctttgagagtatttacttgtgaaattagaaaagtagtaaatttctggaaaatgtctaacatgtattgctagcgtaggccgcagggcattgagaaacgtataccgctgcactgctggcccagctaaccaagggtctccttcacttctttgtcattaatagcctgagtaactaactccactttagttccctcaactgtgaaatggcaagtgatgctagattatctctaatgatctttgctaaaattttatgatccagatatccttatctgattctttctcagaatcactttaacagtttaataaaaacggcctgacatcaagagtttttttttttttaaagaaaagatactcaagcattgattataaatttcaacttgacccttaagtttttgcaaatctttcctactcttcctttaggatccagcccaccatcccatccagaaccacagtgccctttggaagacagagctatgccaaaagacagcaggagcaggcagggacacaaggaggcagggactggagtgtgctgagccagtgagaatcagtgtttgacagacctgggtcctgtacccaaaaaaacttccagagttccccattaaggagcactctcatccctgttttgttaccaagagctaagacagcacttcatcctggaactcattgttttctgcccattttcccctatgtaatcctcttggattttgcagacgttttaggcctgttgtctctggacacgacaaccaccttcagagctggcaccgagttctgccttgtgagtggtttgccccatcagccactgcatcccttcttccaactaaacctgagcgttctcctctttaggaagaaatgataccaatcggcatttgggtcccaaaattctcatctctcacctcctcttcacagtccctttccccttagggcagtctgtgggcatctctctaaaatccatttcccaatctagatgtagcgctcagagtcctgttgaatttatttggacatcaaaagagccacaatacttgtgcttttttatagttttctttcaaagaacatttcagtccatgagacagaaaaaaaatggctttgctgtatccaacttgtcacaggcttgtatttggcattgttctgagaaagacctcaaccactcgtgaaacccagacgtcatttcccgtcgtgttctttcatgttaaatgcttctagctgctggctggtgcttggtcactctataactaaatattgctttagcactggctacacaaagagcttcctgaaagcagcaggggggacatgctaggggcttaacaataggggcactgtttccattgagcgggtttgctgcccaatgctgtgtcaaatgaaagtgacccaggagcaccactgctccacttctgagcttccacttgtgactttttcctcactggggaaagaagctggctgtgatttagatgtggctagcaaaaggtttagttctggcataaaatcaggcatcagaacgactttgaaagaaagtaattcaccttcagaaatacatggggaaaaaacttcatgagcaccagagaagcatttggaagagttaaccttggacatggcttacgagggtgtatttttaaggccagactcagttttcattatattgttgctatgcaagtaaataaatgagctcactgctacacccaagctgggcagaatgaatttacagagaattaataaatccagggtaggcaacatgtggcttttcttctggtcatagagaagcaactagtactcttggattttaagcaggcaaacctctgtagctttacagtttctgaaaattggatcccagttctaatgggcaggcagtgataatggtaatgtttcttttcctaaggttttctttaaagggaagggatcaaatagttcatttaagacaaagaggttattataaagtctaataaatactgtggtagctctgttaatgcttttcaagggcatttaagtgaaagaagccctttccaacaggcagttttggaaagctaaacactcttgttaattcatgaaacgcaaagagagataatataaataaatcaggggctggggaggaattagagatagacaggaagcagtcaaattttacttcccacatatgccaagaaaagtgcaaatacatggctgttacttagtaaaacctacttttaaattcagagaatcgtaggtactatgaatggtgaggttataaatctgtaatcattacagcacggggacactttttaacttctcatcaattacccattgttatttcctgagcacatcctgggttacctagctcctgactaggcattagggaaggacacaagaagctgactccacacattagtactctactaaattcatgggtaaactccactggtcaataatcaagtcactatctctatattggaggcaaaggattgcacaattcaggctatttgtaatgttgctttggattgtagagacttagactcagaggaatcacgggacatagaatctagaacaggtctgtgtcccatcattctcttaaaagaaaacctttcaagtaatatttcttattatcttttaaaatcttgttaaaatgacaaaatatatatatatttgtaatttttaaaattttgatgcatacaaagatagacatagatagatagataatgtagaagtataaataataataagtcactagagcatgactaactagtgaagttacccagtctcctctccatcccatctctctgtctcccatccactctacccaactcttcctttcaaagagtaggatttttctgcttcgtttttttactgctttgttcttacttagggttgctggaagcacatggaaggagggaagtagtcaaaacaagacagtgttgtgaggggagagatgagaagtcatgataagtaggtgggtgggtgacccacagggctggcatcagaaggaaacatagcaaaacatgatggatatgaggcttgctgtggggagggggattggcctttgtgagtggcagccgtctgctcccttcccgcttcccttagtgctccattgagctagcagcatgcagctgagaagttgaagttctgaccacatggcctctgctgccactgctctgccccatcccaggcacctagccagctctgcattaaggaggtgaagtggatgcccaaggaaagaagtgcccccaaggagacttgctgagaccttgaacaagtgacacaatgtgagcagaacttgtcttgacagaaaatgctttgtctctaggtgttccagagagatgggcaagtgtcctatttcttagtgagagcctctaaacaaaccagcttgtgaacctccactgaaaagatctcatctgatgagcattttaataaagtgtcctgagtttggaggcttgccgtctttctcttggataaatatcttcatctcctagacttggaaaaacacattttctcctggggtttcccattggcgtgtcttgagctgctctggtgataaccgtaataatgccaatactgatacgaacagcagaaaacagtaaccccaagaactctacagatgatcatcaaggaccactgtctcttaccatttgctgctttggtttgaaattctcactgcctcgtagatctcattttgagcactatacattcctaaagattgatttctttctatctgacttaaatttaggaatgattaaatcttcatttctcccatgatttgatcctaaaacattttgaaaggaaacagccttgagatctgtgattactaagacatacataacattcttatcacattagaaagcaagaattgactgttgcttgtcttgttcctgttgtcttgtcccctgaattcctgtttatctttgattgtatgtgggacattgtattttcagtacatttgtagaaataatgtgaagcctataaagatgttctctgcctccagagagaattttgtttccttctgccagcctcagaggcaagcatacatctgattccatgctttgagctgttctggcaaccctgatgtcttcagcctgtgcaagggtgggtttacttccagttaatccttattttggatacagtccttagggttccaacccaaagtcgggggtggtttggggtccctaccttggtgagccctatagtccaatgttcccccttacccaaagaagctgtagaaaacccagcacagcctcccaggcaccagtttcagatcagcaaaaaatagcaaatgcccccaggcttgaaaagcaatctcacctctattaactcttctcccaaagtttgacctagtaattctttattatccttgaactcttgacactattaagaagatcttttcggctgggcgcagtggctcacgcctgtaatcccagcactttcggaggccgaggcgggcggatcacgaggtcaggagatcgagatcgtcctggctaacacggtaaaaccccgtctctactaaaaatacaaaaaattagctgggcacggtggcgggcgcagtgggcgggtgcctgtagtcccagctactcggaaggctgaggcaggagaatggcgtgaactcaggaggcggagcttgcggtgagccgagatctcaccactgcactccagcctgggcgacagagtaagactctgtctcaaaaaaaaaaaaaaaaaaaaaaaaaaaaaaaaaaaaaaaaagatctttcctagcttttcttcatttttttaagttgtcttcagcaagatggttaatctcaattacctagtccatgatttctggaagtcaaagtcaaaaggtaaaatctatatagcctaggtgacaattacaataacaataacaatagctaaggcttattatggctttatgccaggtactttatgcacttgatctcatttaatactcatatagcctatgagggaagtataatttccattttacctatgagaaaacaggcttagaatggaacctttgttctcatagcttgtgagtggtagaaccgggatttagatccagctctgcctgagtccagcttctgtttgtcaattacttccctcttcagacctaattcttccaataagcaacagaaaaagacccagtggggccatggcctctggcacacagcttctcataaacgagcctatcacacatccccagaactaaagcaatcgtatgttccttctgatgttgaggtaaaaagcagggtttgttttggtttcccttttccaaaacactcccccacatgtttctggcttgtggttaagaagaacccaggtgttcatgtcacatacgagctcaactggggaaaaggaaaccatccagcagccctccttgcctgccaatagtggcttcacccaacttggggtgcattcttctacagtttctgatttctcaacttcacctaacattcccttgccttcttggatccctctcttgcccaacactaccatgcatggctgatagggcactgttctgccccatatcccatgggttctacttaacccagagctggcttacctggaaaccaagcttattctgtagtggcagacctcacgccatcttgcttaatagccttcagttttcctttagttgattaatgtatcactcaatagattatgcaagacctactctgctaggcactgtactaggccctgtggtttatatttaaatgaagagggaatgatctctgactttaaaatgctggaagaagagatgagatgcatcaagaccgtcaaaccacaagtgataagtgctgttagagatgtgtggatcactggctcagggagttccaaggatagagacatattatctgtttgggaagggcttggtgggggaaaggcattcagccgggccttgaaaatcaattaaagtttgaatatgaggaaagaaagaagagcatctcagacaaggacatggcatggatgaaggcacagaggtatgggcgtgcagggcatctgtggaaatggacagctcagttctcgccgagggagggagttggtgcagagcctgggggccctgccttcagaagatttccaagaggaaggagggcaaaaatacacagatgaaggcaaagactggcagcccggaggccaaagacgcgtttagtttggccaagacactgtttttaaaatttaagtcaattttgaaaaccaggtttcacataaaattccaaatttctggcttctgaaaacgtgaaagatctggcaacacagggcgcaatgtcttccctctttcggtagaaggagttctgtctccccggcaccaaagcctggcttgtttcttccctacaccctgcttgctcggtccgtgagcatctgagtataggacccttgctctgctatgggtaccagctcagggaacacagatgcagaaacatcagaaagagtcccaagggcctctcatccaacttgctgactgtcatcatgctggttctcagacctccctatctctctctgctatccaaacacagaccctcctctttaaaatttcagcatacatggctttcaaaattatgaggcatgaaagtgtcaaaagcatctccagaaactcatgccgccaggatctgagactcaaaacagtgtggatcaaacaccatcaaagtgtggggtggggcaattcgagtttgtttccttgtttttatgtaagcagattaattagagaactaacataacgccagtctttgggcttttgatcctatcctgccaggacccagacttggagatgtattaaatggattcttccttttctaaatggaagaatctgcccttctcggcttcatagctcttctcaaagtctctgtcttggaccctcccgttagttactgagaatggtatactaacatctgagaaaggttggattcctcctagggacagaaaatccacatatggaaagtgcaaatcctgtgccgggtaatcacgaaagcagttgcagtagcattggatcatagagccccaggagacctcacaattcagcccccttcctggcaacactaatgaattaagaggtcagtttggtaattccaaaggctaagcctttgtaactataaataaatgcacagaatgaaaggaatgtagaaaaaaaaaaaagcaaacagagggggaaaggaaatgaaaaacctgacttgatttcattgagaaaattagtttaaaaatgtcctttgtgtagcaattcctttaatgcctcaccgaacaaatgcctaggagaattcttccaaacttgaggtccccttaaccagaccttggtgtgcgtcttcagctgaaattcagcagttctgggaggtggaatgaggagagatcgttggaaggtttttgtgtacttatgtcacgcagcaagaaaaagccttaatgaaccacaaaactggagactttgtaaggtacagctcagtcagcacttttcctccgaggagaggacacacaattggcatgaaagtgacccaagcaacaggtcgaggcagagaatgtccaaaagtagaagacttcgagctccctgatcttccacacgtcacaatgcggattgctgcactggacttggcatttaaatgggaccagcattttgcatcctggtcccatttaaatgccatttgtggaccaacgtgaattagatggtaatgtcaggaaggctggaatcggtggtggcgggcggggggtgctgtattcggttggcgtttcccccctgtggttttcaccatctgtttctttgaatgcataaacaaggaaaatgactggtttggaatgcagagttttaaaaaaccagaagaccacaggcatcctctaaatgagaaagagagagcaagttggggttctgtgacatttgtcaggaagtgaaatgttaaataccgggaagcattagcgctttctgccagggaagatccacaaaggcaaggaaacactttagcggtgaacctgccttccttttctgaggtcgtgctatgtgtttatatgtcacctagtgctattttcagacaccaacgccacccactctagctcccaatccccttctgggttttttgtttgtttgtttgttttgttttgttttgagacagagtctctctctgtcacccaggctggagtgcagtggaacgatcttggctcactgcaagctcctcctcccaggttcacgccattctcctgcctcagcctcccaagtagctgggactacaggcgcccaccaccacacctggctaattttgtgtatttttagtagagatggggtttcactgtgttagccaggatggtctcgatctcctgacctcgtgatccgcgatccttgccctcccaaagcgctgggattacaagcgtgagccaccacgcccagcctgtttgtttgattgtttgtttgttttttgagacggagtttcactctttttgcctaggctggagtgcagtggcaagatctcagcccactgcaacctccgcctctcgaattcaagtgattctcctgcctcagcctcccgagtagctgggattacaggcacatgtcaccacacccggctaattttatatttttagtaaagacggagtttcaccatgttggccaggctggtctccaactcctgaccttaggtgattctcccgccttggcctcccaaagtgctgggattacaggcatgagccactgcgcccgacatgcccgcttctgttttttaaacgaaagatgaacagttaagctggacttagccttggttttccattagcattattgctaagttggcaaccttggataaaatccactcttggaaacttttaagctgaacaaaagctgcactatgagcaggtgctatgataaagccaagacagcgctctaagtagaggggctgatgaaatagactaaggggagatcttcatttctctcctggacaatagcgagtaaaaaaaaaaaaacaatcatataagggcattaggaacacattgtgtttttctttagcaaagggcatcctgctttgaaaaggaaggtttgctatgcacaatacagtggccattctataaagtggttccgtatgctccatgccaacagacctcaaagcaataggttccttttttaaacccaagacagtggagagacttgatggaaattttgagtgcatactaatctcttttacttcgttgcaagaaacaatcagttgtaagcactagggattaaaagccaaattgaactcaggcattttgagagcgcctggggagaaggcattggtgcatttggctgagttccacccatttcagcataagatggacgtggagcatttttcacatagttctgtaggcagcctgacgccagagttttcacttcagagaaaggataaaagttgacggtttcttagggaacaaccaactcttcctcatttgcaatgtctgttctcctcaaagatgtcgtgggcaacgcttgagatgggcactcaatgactcaaagggtgggggttaggcagaaacaagaccctgggcatttagaagcccttggacgattacatatatttcaaaatgagttaagttcaaataattttttgctggtgcttagcacaccaatgaagtatgtagatatgaaaacaggaggctgctaggtaagattcattttattggcactggttccagatgccagcatcgtgatgaacgctatttgacttctgatatcccttgacgtaggtactgttggggatgttttctttcctggtggaaatgggaaaatgattagagaccagaggtcaggagacctgaattctgttcctggtgcctccctgactcagtattttgtttgtttgatacgttagaatgaaagctcccagaggtttctaaggacagcacagtttgagcattggctttgtaaaagtactctggtgacctgtggaattacagttataatcatcataataatgtccaatgaagaggcatactgaggaaggcatgagaggaattttaagtggctaaactctatttgcattattcattttacaaattgtttcagagccttaaagcaaatttcagtatgcggtactttagatgcaaaatgctcctctaggactttcataagttacacacaagtatcccttaaagtatatttcagaaatatgcttgcagtgcatcaactctatctgatgaactttgagatgatcacaattaagggtgatagagatattttagggattttttttctcattgggattcaagagggatttaaaagtttactaacctgggccagatgcagtggctcacacctgtaatccctgcacttttgggggctgaggtgggtggatcacctgaggtcaggagtttgagaccagccaacatgatgaaaccctgtctctactaaaaatacaaaaaattagctgggcatggtggcgtgcacctgtaatctcaactactcaggaggctgaggcaggaaaatcacttgaacccgggaggcagaggttgctgtaagctgagattgtgccactgtactccagcctggggagcaagagcaaaactccatttcaaaaaaaaaaaaaaaagtttactaacgtggtgtctacttgtctccttcctgttatgtcttctttctttggtttctttctatctttttatgagggagagttgagggatgagtgcttagttaggaggcaaggagattcaaggactcaggcttggaaatttacacctctgtgccttctctcccacaggtgataacccccgtgaggacaggccatggctacgtatacgagtacccatccagataccaaaaggacgtctatgatatccctccttctcataccactcaaggggtgcgtaccagaacatggtcacaagaggagaagcgcttctaagggtagcattccttcagggctgtagagaaaagggagttcacaaattatgcattaatatatgtcatatgaagctttgtttaggttgtctacccagtagccactttagccaatgctatttaaattatgttttctggatttgctttatcaggaaatcctagtatttcacccaagagagcttatgttcttctacaattttgcttcagaaagtagatttttcttttttcttttttttttttttaagacagaatctcactttgttgcccaggctggagtgcagtggctctatctcagctcactgcaacctccacctcccaggctcaagcaactctcctgcccctgcctcagcttcccaagtagctgggactacaggcacacacaccaccatacctgactaatttttgtattttgtagggacaggcttttgccatggtggccaggctggttttgaactcctaactgcaagtggtctgcccacctcggccttccaaagtgctgggattacaggtgtgagccacggcccccagctggaaagtagaaaatttaaactacactttaaagtacagacagcgtagatatttcacataagatctttttttttttttttttttttttttttgagacagagtcttgttctgtcaccaggctgggagtgcagtggcacgatctcagctcactgcaacctctgcctcccgggttcaggcgattctcctgtctcagcctcccaagtagctgggactacaggtgtgcaccaccacacccagctaatttttgtatttttagtagagatggggttttaccatgttggccaggatggtctcgatttcttgaccttgtgatctgcccacctcagcctcccaaagtgctgggattacaggcgtgagccaccgtgcctggccaaaatcatttttatattaaatgtaagttaaaaaccataaaatgtattaaaaaaaaaaaaggcaataaatctgttataacatggagcactgccaaagatcaagcttgtacataacctggtaaataaatccataattaagtgcttaggagcataaaaaatgaccaagtataagacatttccattctgggtaactcacgggtttctcttcaggtatacgacatccctccctcatcagcaaaaggccctgtgttttcagttccagtgggagagataaaacctcaaggggtgtatgacatcccgcctacaaaaggggtaagtgagtgactacaaagcagcaaaaaggagtgtgtgtgtgtgtctgtgtgtcaggggggtgcagggttgggagggtgggtaagtagttcactcgaataaaacaagaaaggcaaacccaaaaggggaaaatgtagtcttggtgagagtaaaggaaggaagcaaaaaaggaaaggcactaattaaagatagctctagggatttcatattgagaagccccaactaaaaaacactaggtggccaataaggataaccctttggcagggaagataattagttcagtttggcaagtactaatatatatttgtagagggtttgttttgttttgttacattttgtttgagacagggtctcgctctgtcacccaggctggagtgcagtggcgcaaccacagctcattgcagtctttacttcccaggctcaagcaatcctcccacctcaggctcccaagtagctgggaccacaggtgcacgccaccatgactggataaattttattttttgtagagacggtgtctccctatgttgcccaggcttgttttgaacatatgggcttaaatgatcctactaccttggcctcccaaagtgctgagattacaggctgagccgcgcctggcctgtagagggtttgacagtttcctcagtgtgtatgtttgagtgaactcgtttgactcactctgttaccctatggggtatgcctgcacaggaggcacagtaatccctactttacagacaaggggactgtgtttcagacgcctatgcagctcattcagcatcacacagctggtgtgataaccgaaaagaccgggggagaactctggtcttactctgcctctcggcacagatcagcagagaaaggatacccaggaggtggtcagaaacacaggactggaaacacagggtgagcaatttagccaggagggttgcacatacgagtctgcaccaagaacgtggggttggacacacttggcaaaggacaagggaagtgacagcagaataacggggaaccttggaagtgcctaacattggggcgggggagggcgaccgaaaaagtgccagcaaataggactgagcacatgggaccacaggttcccatgagccaactcaataaatagcatttcgctttctacttgctttgcaggtatatgccattccgccctctgcttgccgggatgaagcagggcttagggaaaaagactatgacttcccccctcccatgagacaagctggaaggccggacctcagaccggagggggtttatgacattcctccaacctgcaccaagccagcagggaaggaccttcatgtaaaatacaactgtgacattccaggagctgcagaaccggtggctcgaaggcaccagagcctgtccccgaatcacccacccccgcaactcggacagtcagtgggctctcagaacgacgcatatgatgtcccccgaggcgttcagtttcttgagccaccagcagaaaccagtgagaaagcaaacccccaggaaagggatggtgtttatgatgtccctctgcataacccgccagatgctaaaggctctcgggacttggtggatgggatcaaccgattgtctttctccagtacaggcagcacccggagtaacatgtccacgtcttccacctcctccaaggagtcctcactgtcagcctccccagctcaggacaaaaggctcttcctggatccagacacagctattgagagacttcagcggctccagcaggcccttgagatgggtgtctccagcctaatggcactggtcactaccgactggcggtgttacggatatatggaaagacacatcaatgaaatacgcacagcagtggacaaggtggagctgttcctgaaggagtacctccactttgtcaagggagctgttgcaaatgctgcctgcctcccggaactcatcctccacaacaagatgaagcgggagctgcaacgagtcgaagactcccaccagatcctgagtcaaaccagccatgacttaaatgagtgcagctggtccctgaatatcttggccatcaacaagccccagaacaagtgtgacgatctggaccggtttgtgatggtggcaaagacggtgcccgatgacgccaagcagctcaccacaaccatcaacaccaacgcagaggccctcttcagacccggccctggcagcttgcatctgaagaatgggccggagagcatcatgaactcaacggagtacccacacggtggctcccagggacagctgctgcatcctggtgaccacaaggcccaggcccacaacaaggcactgcccccaggcctgagcaaggagcaggcccctgactgtagcagcagtgatggttctgagaggagctggatggatgactacgattacgtccacctacaggtaaaacagcggaactcataaaacacctacactcactcacatgcagggagcctgagaaagatgcctataaggatgtcgggttggactgccaaaggagagaacataattaatgttaatctacatggttcacaaattggagggagtgtcgtagagtagtaagaacgctgggctgagagtcctgagtactcactcagatctagccctttctctgacgtttactgtgtgaccaacttattcaacctccttgggccttaatttcctcatttgcaaaatgaatggggtaaggggttggattagatcccgttgatatacctcaggtaagaggagactcaccaagtaggataataggccctctaataataataccagctccacttctatttgtgttttatgtatagttccatgcaatattttatttgaaaaaaaagttttcgtcattaagaaaaagaatagaagacctttgcaccagagaatttctaaggcccctgctagccctactctgtgtatgtgtgtgtataattgctttaaaacttagccccatctcagacttacctagaggaccactgggcattagctagttgtcctaggagcttaatctgtgtatgggacattggatagtcacagttggcctcctacaattgggaattctaccaagctccaagttgacctgggattccgacagctttcccttccactttgagggattaaaacattctactggctgggcgcagtggctcacgcctgtaatcccagcactttgggaggctgaagcaggtggatcacaaggtcaggagttcaagaccagcctggccaatatggtgaaaccccatctctactaaaagtacgaaaattagccaggcatggtgatgcacgcctgtagtcccagctacttgggaggccgaggcagaagaatcacttgaacctgggaggcggaggttgcagtgagctaagatcgtgccactggactccagcctgggcgacagagcgagactctgtctcagaaaaaaaaaaaaaaaaatctaccaagatccattgtttaggactaggcttactatcttattctgccattcttttaatttgactgagagtcacagattatactgagaactacgtaactattatgccaaattccctcaagcgcaagaaagtgtggcaaggagaactgagccccacctgatgctgaggaaggaagtggagagagagaggatggaggcattgaacattcatcttactggttgtctgaccctgcacagtgggaaatactgccttggagcagaaatctatagatgatttgagggaactagaagtgagaggtggaccacatttagacctgcatttgggggtttacaggttcacatataatctatgagaaaagaacccagagactataaaaagaacatttatatatgagatttgaagggaatcatgagtagctctccgaaaattttaaggtgccccagaaagctggcaccctatatggcaatgggctttatttttctgccacccctgtcgtctagggttcacagtgcctcactgggcatttgagatgttgccaaggcagtggaaaataaagagtatttactcatccgtcaatgaaattgttagcataagtgaatcacagtgatgacataatatgttctttatgttgaaaattaacagggtaaggaggagtttgagaggcaacagaaagagctattggaaaaagagaatatcatgaaacagaacaagatgcagctggaacatcatcaggtaagttcaatcagagcaaaaactgcttggcattggaaagatttcccacctagcactaaggaaaggtatcacttcaagagattatgattttgattcttccagctcactggcaggaatcagctccaaagcacggaatggggtttaaaagcaaagagaaggtttatgaccttgttagttcaactgggtgtacctgggttccatctaaacggcaatttttttaaaggctaaacctgcatatctaacatatgaggactatttgggttaaggcatttggtctcaagaaacaagacccattcaagctagcctaagcaagcaggtttatagtaaagccacagtaggggaattcagtaacagaaagtgaagatagagccaggtctggggagaactagaactgtaaattatctctccttcttgtagttcctttgcttctttctatcaatctacttcactctcccctattttctggttttctctaattatctactcatttggctcccctgtaactttgcagaacccataaatggccactcagaacttctatagatggcttttcatctcggcttcctcttccgatggttagctcccttctcttgttcatcagattcccaagaaagagtctgattgggccacgttgattgggccatttctctttctctctctctctctctctttctgtctctacctcgctatttgtctctctttcgccagcaacacaagcctatggtttgcctggccttggtccaatctaaaggtaggagagcagaattcaatgttttcaacatatatccaggcctatctactgaggactttgggcagggcatgttcattcaaaagctgggtatgagtaggggagataatgacgactattgctagaacaagggcatacaaataaagagagatggattgaggatttatttacaagccttttaagatgaaatgaagtgaaatggcatgtaatgacatgaaatggcatgctatatttaggaaatctgagttctaatcctttctggccaaccaactatgtcaagtcaggtaacctccccgagcttcagttacttccctataaaatgggaaagtaccccccccatctaatgacatgatatattgatgaacatatttgcataaagcctaagatatataaaatataatccattatgattaaataccttggaatatcaccttgtacctatttatgtttgccttggcatctggcaaggtaagactgcagggctttggggaacttgtagaaaccatagcaatcgctaagaagaaaacagattctagaaaagtaaagctgttgaaggctgggcacggtggctcacacctgtaatcccagcactttgggaggccgagacgggcggatcatgaggtcaggagatcgagaccatcctggctaacacaatgaaaccccgtctcactaaaaatacaaaaaattagccaggcatggtggcgggcgcctgtagtcccagctacttgggaggctgaggcaggagaatggtgtgaacctgggaggcggagcttgcagtgagccgagatcgtgccactgcactccagcctgggtgacagagcaagactctgtctcaaaaaaaaagaaaagtaaagtaaagctggctgtgcatctctcagagaagctggggaagctgggtgaggtgatcactgctccagctcatccctacgtccaggtgggagattaactgagtctgaagctcaggtcacagatagtccttatctgcagaagagaggtctctcttgagtcttagtggaatccctagaaattattataattgcaatttaaataatacaccatttggtagcaatgaggaaagaaggaagaaagccagcacctgatgcatctgactctgggtaaaacccccttcttttaacagctctgggggactaaatattatgatgcacaattcccattcagactgccttagaaactttttttccttaagtgctcatatatttatatgcattaatcttcctgtagtgctggatcataacatgtctatcaatcttgacagaaagagtaggataaacagaaaggggtcatgaatggtcatttcatctgagcatcctgagatagtcgaggctttctccgagaaggagcaaactgtcagtgacttacttgacaaggaggtcactacatttggttttcccttgccacccctcaacattaataaacatttacatagagcctactacataccaaactattataagcactttataaacgttaactcatttaacctccataaaggtgtaggtaacagggctgcggtttaaacactatgctaccttctagccagagggtacaagtgaccagtagtccaatcatagaaggtctgagcttgaggatcatctttcccaacgtctacattttacaatttaggaaagcaaggcagcttgacccaggctttacagctcacatgcatctgacagttactagcgactaaaatccctgtcttttaactccaaggcctagtgaatttccattgcaacacactcccttgctctaatgagatctgctttcgtcttccttgcagctgagccagttccagctgttggaacaagagattacaaagcccgtggagaatgacatctcgaagtggaagccctctcagagcctacccaccacaaacagtggcgtgagtgctcaggatcggcagttgctgtgcttctactatgaccaatgtgagacccatttcatttcccttctcaacgccattgacgcactcttcagttgtgtcagctcagcccagcccccgcgaatcttcgtggcacacagcaagtttgtcatcctcagtgcacacaaactggtgttcattggagacacgctgacacggcaggtgactgcccaggacattcgcaacaaagtcatgaactccagcaaccagctctgcgagcagctcaagaccatagtcatggcaaccaagatggccgccctccattaccccagcaccacggccctgcaggaaatggtgcaccaagtgacagacctttctagaaatgcccagctgttcaagcgctctttgctggagatggcaacgttctgagaagaaaaaaaagaggaaggggactgcgttaacggttactaaggaaaactggaaatactgtctggtttttgtaaatgttatctatttttgtagatattttatataaaaatgaaatattttaacattttatgggtcagacaactttcagaaattcagggagctggagagggaaatctttttttttccccctgagtggttcttatgtatacatagaagtatctgagacataaactgtacagaaaacttgtccacgtgcttttgtatgcccatgtattcatgtttgtttgtagatgtttgtctgatgcatttcattaaaaaaaaaaccatgaattacgaagcaccttagtaagcaccttctaatgctgcattttttttgttgttgttaaaaacataccagctggttataatattgttctccacgtccttgtgatgattctgagcctggcactcccaaatctgggaagcatagtttatttgcaagtgttcaccttccaaatcatgaggcatagcatgacttattcttgttttgaaaactcttttcaaaactgaccatcttaaacacatgatggccaagtgcccaaaagccctcttgcggagcaaatttcagaatatatatgtggatccaagctctgatagttcaggtgctggagggaagagagacctgtgtgtttagaggccaggaccacagttaggattgggttgtttcaatactgagagacagctacaataaaaggagagcaattgcctccctggggctgttcaatcttctgcatttgtgagtggttcagtcatgaggttttccaaaagatgtttttagagttgtaaaaaccatatttgcagcaaagatttacaaaggcgtatcagactatgattgttcaccaaaataggggaatggtttgatccgccagttgcaagtagaggcctttctgactcttaatattcactttggtgctactacccccattacctgagggaaactggccaggtccttgatcatggaactatagagctaccaggacatatcctgctctctaagggaatttattgctatcttgcaccttctttaaaactcacatatgcagacctgacactcaagagtggctagctacacagagtccatctaatttttgcaacttcctgtggccagtgtgtataaccccttccactatctcacagatagtcacagcgtccattccatagtctgtctcctcacatctgttagtattgacacagcacagacaccacaagccatcaggttcttcatggggcaggtgaaatacttctaccccatgggtaaatgtattcacatattaccaagagaagaagcacattatctatgatcttttggcccagttcttatttagcatttttattccagcctacttggaaacatgtttttatttgcaatatatgcctgactgaattaagcttgcttgttttaaacaaccaaatcattggaacagaaaaggatttaaaaaacaagaatgcatgatctcagcgtgattaaaaaaaaatcagtggaaataaatgatcatagaaggtgcttttcaaaacaactgctattataattctcaaagtcctactctgccaaaagaagattaaaagtcatacattacattacaaggaaatgttcatgtgggaagagggttgctgaaaatcaacaacgcttgaagttaaaaagtgtgtctttgtagatttcattgtataatgtgtatttcttaggagatggctgacttgattgatctacgctaagtggagacatttcacatttttaaaaccaaatgttcaatctgtattactctttgccgtcttgtatgtagaggctatttttaaatcattaaatttttagatctctgttttcatagccactgggttttctttttcatactcctctgtcacagaattaaatattggcttactttggtactcctaatataaaaagttaaattatgattattttagcaatgctataggtctggatttttttaggaaaattgagggtttggttttttctgtatatgtgtcacttccaagtgtatttgcattcaaagaaaattctagaatctgtgaacattatcaaattcaaatatctggaacaagacttgtgttcaccaaaaaacccatacactcagtaacatataggatgatttgttttcataatatggatgttaccagtcatgtggtttttagaatcaaagaaaatttttctatttgttttggaatagtcataaagaaataatttaaagcaaactatatttaatgaaaataagagatttgtaatcatgtaattatcatttttaatggttggcccactcttttattcaggtatcccactgagatttacagacaaattatttaaatgtatcatgtaccattttgcccacacatataagcattaacttatttttgacaaaatgtcaaggcacttcaaggagggaatgaaaactcttccgaaaaaaaaagtggtgcgggaacaactagatctatgaaataaaatgaatgtgtaccttacgttctacccaaagattaacccaaatggatcatagacctaaatgtaaaacttaaaactcctagaagaaaacacaggagaaaatctttgttatcttaggtagacaaaatttccatatttgaaacactttaaaaacttaactcagaaaaaaaatgatttattggactttgtcaacattaaaaactcttattcttctgaggataccattaaaaaaccaaaagtcaagccagaaaatgggagaaaatacatcacatctatcagccaaggacttacatcagacttaggagacaaaaaactaaatttttttaactcggcaaaaatttggagaagaaacttcataaaagaagacttatgtaggtaaatggaaaaagtaaataaacaccacaccaaatagaatcactaaaattaaaaagacaaatgataccctgtgttggtgcaagaaaggggagcaaacattgctcttgtatatcactggtaagaatgttaaacagtacaaacactatggaaaacagattggcgatttcctaaaaagttaaacctatgtctaccctatgacctagcaatttctcttctaggtatttacccagaagaaataaaagcatatgtccatacaaagacttacataaaaatatttatagcagctctatttgtaatagcaaaagctagaaagaacccagatgtttgttcatctatatgaatgaataaaatcactgcggtatatccacacaatggaatactacacagaaatcaaaaggaaaaatattgcaacaaatagccaacatgaatgaacttcaaaatcattatgacgcaaaaaagaagcaagacaaaaagaatacatatgctatgtttccatttatacaaaattttagaaaattcaaactaacctatagggacagaaagcacataagtggttgcctagagagaaatggtggaaggaatggattccaaagaagtccatggaaacttgggaatgaaagcagtgtccattgtcttgattgtggtgatggtttcacagatgtatgcatgccaaacctcttcagattgtacactttaaatatgtacagtttattctttgttaattttttcaaagtaaatggtctaggcactcccattaaaagttagagattctcagcctggattttaaaatgcaagaccaactatatgctatttaaaagatgctcgcttgaaataaaaatacacagataaattaaaaacaaggggatagaaagagatgtaccatgtgcattctatttttttcttaaaaagccggagcagctatattattaacagacagagtagaattcagaacaagggcaaagagaggcatttcatgataaagggattaattcataaaaaagacaaaacattcctaaatgtgtatgtaccaatcacgaagtctcaaaatacatgaagctgaaactgatataactgaaaggacaaatagaaaatctataatgataggtagagatttcaatacttgtctctcagtaattaatagaacaagcaaacaaaacaaaataaaaccagtaataattggtaagaatggaactctcttccgttgctgataggagtgtaaaatggtacaatcgttttagaaaatggtttggtaacctctaataaagttaaacatatgctttcaacataacccagcaatcccaatcatagatatttaccccccaaaaaatgaaaacatatatccatatgaaaagctaatttctttattcataattgtgccaaatagaaacaacccaaatgtcatcaacaggtgagtagataagtaaattgtggtctatatatacaatggaatactattgagcaatgaaaaggagtgaacaaattagacatgtaacaacatgagcagatcaacctcagaaacatgctgaatgaaagccaggcaaataaagaggaattctgtatgaagctccagaaggcaggaatctaatctgtagtgacaaaaattagacctgtgatttcctaaggccaggggtaggggttggcgattatttgggaaagagcacgaaggagccttttggtaggatggatatgttttatatcatcactgtccaacactgcagaactttctgcaatggtaaaaatgtcttccatttgcactgtctaatatgctgaataacagtcacatatggctactgaggatttgaaacatacctagtacaactgaggacgtttttcattttaattttagctcattagacttgaaatagccacatgtgtttagtggctattctactggacagcacggtatctatatcttgattgttgcagtaattgtgtgcatggataaatttgtcaaaacttattataaaatacactaaaaataggtgcattttattgtatataagccttacctgaataaagttgattttaaaaagaggcaaagcatttcccaactaactctaatgctccaatttttcaagtcaatattatcagcagttcacagaaacattggcggttccatagaaagagaacaaaccggaaagccaagcttctaaatccatagcaggctactgctttagagtcaatgatactgagctcgttcatgtcccaccaggaagacaaatgtggcttcctaaccctgagttggtaaaagcctgtctgggttttagatgcttccccataaaccacatctacattctttatatttttgagggattatgacaaaagaaatattgtcattcaccaaagaacataaaaaacaacaaggattcacttattcattgaacatttcctgcctggccggccagagcaggcaaatctgccctgcgtatcaatagaaccccagctgtctccgccagaggagctggccccacctcacagccagtgtctctgtgtgctcagcaacgtgctgtggaccaaagggacaggagaagaagggagacgtggattctgcctccctttgtttgaaataaaaagtaaacatgtcctttaaacaattgaaggcagattatagacaaatgtttaagtaatttacaggcaaagactttaaagtagagagaatgagaaaaatcaaagtgatctagctggtgagaaagagctttttgccaagggtggggttgaagaggttgatcataaagaaaggtgtctttgtctgtactgtgctgctatcacagaataccaaacactgggtaatgtataaagaacagaaatgtatttctcacagttctggaacctgagaagttcaaggttgagggctcacatccagtgagggccttcttgctgcatcatcccatgatggaaggtagaaaggcaagagagcatgagagagcaagggattgaaccggcagcctcaagcccaaaattttataatccccattaaccatgcatgagggtggagctctccatacttcccattaggccccacctccaaatgctgttgcaagggggattacgtttccaacacacgctttttgggagatacattcagactataccagaaaggctaactggacggcacaggaaagcctggcaaaggctggtggccaggacggcgtgctgcagagatgcagtggagagtttaggtgatgaggggctctctagaatcacactgcagcgactttggctttgcattttgtaccttcagagaattcattcagaatagacataccaaatattcgttggcctaatgaaactgggcattagatggcatcatatcctttcaaagaagagaaaggagagaaagcaggatggggagcctggatgagacaaagatgatacagatagtgaagactatgaaaggataaaagggaggggatggagagcagaggagaggaaagagcagaggagagagacagagagaagaagcaagaaagaccctgacacagggtgattagaaaagagtcagtgaaacaagtaacagactgcaagagatacacagtatatgctaaagcaaaatgctatgttcttaggtcatctaggttctcaagatatagtcagaaacaaacagtcagtacatattacttgaaaacagggctgcattgtcattttgaaaaatacaacatcgtatatcagtctcttggagagacttaatactcgtgagcatgtaaaaggctctaggccgggtttggtggctcacgcctgtaatcccagcactttgggaggctgaggtgggtggatcacctgaggtcaggagttcaagaccagcctggccaacatggcaaaacctcatatctactaaaaatacaaaaattagccaggcttggtggcgggcgcctgtaattccggctactcggaagactgagacaggagaatcacttgaacccgggaggcggaagttgcagtgagctgagatcacgccactgcattccagcctgggcaacagagtgagactctgtctcaaaaaaaaaaaaaagaaaaagaaaaaaaaagggctccaagaagtcttacaatataaaaacttgccttgtctactacttcacaaaattattttgaccctaaaagctgttttctctcttaacatttataaaaacctggtctaggatattcagatagttttcgttttcctcccccaacaaaagggtgaggcccgccaatgtgactcagctcacagaatcattattgttctcgactacattcatcaaggtcaagtcctctgtctttaacagtcttttagaaccaataggctacggggcagcacctgttctgatctttagcacccatactcaccctgaatctgtacaaagcttctaaataagtatgtgaagatactttattatttcccccattcatttctgattatctgaatatttgtcttagaataaacatggaggaaacaaaccaataattaatttggatgagctttcccaaatcatcaactccttgggaccaggatttttttgtagaaatgctttggaaagcccaattttatatgaagaattttaaaataaaaatatctctcagaagagaaccaaaaaagtgaaagaaaaataaaatacatacaaatgggaagataaatagagtcagagacacattgtctggcccatctagaaatttaatctaagaagaggtgcttgatgcatggaaaggcttttgaaggtggcaagaatgataaggacaaatacatactttgaaaaaatatgatttaagtggttaaaccctggctatgttaaggcataagatcaatagatgtgctagtgtataaatgacatcaatcgccaccatttattggtgtctagtttgagtcagcagacactacatcaagcacattatctttgccctcatagcaaacctcttatagatagttcttattttcactttacagaggaggaggctgaagctagaagggaattaaacaacttggcccaagtttcaaggctggaaaatggaagtagccctttccctataccacacaagcactctgggagctgcaggtagaaaagtgtacaaaggatattctctgggtaattgcattacagtcatgacctgagcagggtttagctggtagctttaccccaaatcaggtaagaggcatggacaaaagatattcgcgtgcaattttaaatattatgacatttgtatgtgattttgaatatggtcctctttgcaattaattttcctaatagtaaaatactcacattatttattaattcatataactagtctctttctccccacaaagactaaggtgcatacaatattttcgttttagaagaagacaactgaataaaaagaaaataaaggtaaaaaaaataagacgtagctgttaacatagttcatacacaaaatgcatgttgcaaaggcctgtgaactttggccttgagttttctggacagcccatgagataaagaaaatgagatccggccgggtgcggtggctcacgcctgtaatcccaacactttgggaggccaaggtgggcagatcacctgaggtcaggagttcacgaccagactggccaacatggtgaaaccccatctctactaaaaaatacaaaaattagctgggcgtggtggtgggagcctgtaatcccagctactctcgggaggctgaggcaggagaattgcttgaacctgggaggcggaggttgtagtaagccaagatcacgccactgcactccagcctgggcgactaagcaaggctccatctcaaaaaagaaaaagaaaaagaaagaaagaaggaaggaaggaaggaaaatgaaatccgttatatgatttataagtatccataaaatgaaatcaagcccactgtttcccatactgggacctcagagagatttctcaccagggtcttcataacgggttatataacacagtaaatcatacagcatcatgacatatcatctttacagtaaatatagtgagaccacagcttgtttctagtacagcatcacttatgtgctattattctttctctaaagtctaacactttaaagtatatgatgtggcttttaaggcccatcatgatctaaccccaaatggctctttcactctcatttcctactatatcctttcatgaattctcctgaacagcctctctgggccactcagtcattcctgagtatctttgatttttctgttctttcatcctatttactcattgttattcaccttcatctctgacattcaaaatacaagtcaggaaaggcagagagtaagttatacacacctggtgggtggtatattttggacaggctttattagcctctcctccaagtttgcactactatcaatacaacttcaatcattcatttgttctgcaaatatttattgaacacctattatgtacctggcactgagggtacaagggaagcaataaaaatttaatacatcccttgctttatgaaacttccaatctggtgagtgaaaaaaaaatgttggttttgtcaaaaaagaaaagaaaagcgcaactctatgaaacactatgaagtcaagatacatagctccataagagggaatattggcgcatcctaaagtagtgtggggagcagggatggctttcttctggaaaagatgtttgatgtgagatctgatgagtgaatggactttatctaagcaaagctgggaaaggacattccaagcagaagtaggagtaaggacaaaggccctgagaaccccaggatcctgctgtgttctaggaccaggaagagtccagtgtgcctggcgcacagcagagaagtgggagaatggtgagaaatgaggctgaagaagtggcaggtacctggccatgcaaggccttcaaggccacattaaatgattgaaagattatttatttatttatttatttatttatttattttgagacaaaagctctgtcacccaggctggagtgcagtggtgtgatcttggctcactgcaacctccacctcccaggctcaagtgattctcctgcctcagcctcccgagtagctgcgaccacaggcctacaccaccacgcccggctaatttttctgtttttagtagagatggggtttcaccatgttggccaggctggtcttgaactcctgaccttgtgatccgccatctcagcctcccaaagtgctgggattacaggcgtgagccagcacgcctggccctatttttattctttaagagacaagtcttgctctattgcccaggctgaagtgcaatggcaagaccctagttcacagcagcctgaactcctgggctcaagcaatcctcccatctcagcctcccaagtagctaggattacaggtgtatgacactatgcccagctaattttttttttttttttttttttttttggagagacagatatctgtgttgcccaggcttgtctcaaactcctagctttgagagatcctccaccctcagcctcccaaaatgttgggcttataagtgtgagccactgcacctggcctaattaaagaattttaaacagctatatgacaccatcatatttttgctctgaaaatagctccctggctgcagtgtggagagtggtgaagaggggccatgtggatcctggcagttcagttaggagggcattgaatcagttctaggagaagcagtgaagatacgttggattagaatggaggagtggagatggggagatgcagataggttccagggacgtgggagggcaagtccgtaggaaaagtgatgaacagcacctggtgcatgatgatgaggagcccggggaagggcttcttggctgggcatctggatggatgtggatccattcatgagctaggatgtgccaacgctatttccatctccatggaaccagcctggggtgcaatccacacttactgcactccccctccctggcactgagcaaagcgcatgagggaggagcaacattgggcaagaacctccagactcttatctggaggaggctaagttaagcccactttacttcctcctagggcgtggatgtgtaggcacatgcttattttatggttgggaaaaaagaaggaaaagaaaagagaaaaacagccttgaaatagttctaggccaggcacggtggctcacgcctataatcccagcactttgggaggccaaggcggggggatcatgaggtcaggagttcaagaccagcctggctaacatagtgaaatctgtctctactaaaaatacaaaaattagccaggcatggtggcgggagcttgtagtcccagctactcaggaggctgaggcaggaggatcgcttgaacctgggagacgaaggttgcagtgagccaagatcgcaccactgcactccagcctgggcaacagagtgagactcagaaaaaaaaaaaaaaaaaaaaaaggaacgaacgaacgaaggaaagaagaaaagaaagaaaaaaagagagaaagaaaagaaagaaagaaagaaagaaaaaggaaaagaaagaaggaaggaaagaaacaaagaaagaaagaaaaggttttaatgagtagaggccagcctgcagggggagaaacctctacaagggcaactgaaaagcttcagcacactgactgaccttcatctcagactcaactattaccaatctctaaagcaaattcctctgcagcctgggagggggcattgaggggcaggaaccaccaccatacctcacagcatgatttaagtcatctcccaacaactataattaagaaaactgagttaacagaaagggcaccttactttgtctcctaactgtcaattttccagagagacaagagtcagcagggaatgatgttaaatgaaaacatacccctaattttctctggcctgcctggcagtcaggagaccaccagacaccagacattgtctatcccccacacagcccctcacccagtcatcatccaagcgcagtttatgagccttctttatgacccaggcagcctaacgggtttttttttcagaaccatctgggccctttgtgacttaaattcctattaaagaagttgaagtctccaagaacaatggttgtgaatgagacattttaaacagtggtcagagaagtaacttatttcagccttgcccaatgttaaaatatcaagacaaagggctggtgtgggtgtatttttagaatgatgtaaagatgtaaatggacaacttagtgaaggctgtccttgcccttgggcaattatttctacctctctgtctagacatccagtctacactggaaaggacctacgatttgacaaaagaaggttttggataaataatgggtcccccaatcctgtttgcaaaagaaaaatcaacaagcaagaaaacaaaagatctgcaaagagcactgagaaggggacatgtaggacctgtatgcagaggagagcgctctagagaaaagttactaggtcctctgccccttgcaaaggggagtgaacttgtgggtgtttacacgtaccaggtggcttcccgttgaaagggggcccccagaaatcctttagagcgctgacagtgcaaatagctagcacctattcagctcaggcaacaaggtctttgggcaccacctaggatgttttgaagcccctcacgcagcgaccagcattttgcagatctaaggctgtgttcgcctcgcacggcgcccccttgtggtctgatgggaaatgaaaggtggaggacaattggtttttacaaccgatttcatctctaacgtgcctgggaaataggaatgctagtgcagacctgattcgctgttgtgaaaataagcattcaaaataattcttaagcgctccacaaccacgtagcagtacgattacttccttgctgcacatctccctagcctcttgtatatttcagacacagggcatcttggaccatgagttcatctttcccatctcactacctaactaacacaaagagttcaattcatgtttgttgactggctaactgaacccaaaggaatgaatccacctccaagctcctccacccccatcccacattggaggatcctttttttttttttttaaacggagtctgcctcagacactcaagactggactgcagtggagctgtgtccggaattggtgggttcttggtctcactgacttcaaaaatgaagccgcggatcctcgcggtgagtgttacagttcttaaaggcagcgtgtctggaatttgttccttctgatgttcggatgtgttcagagcttcttccctctggtggggtttgtggtctcactggcgcatgagtgaagctgtggaccttcgcagtgagtgttacagctcttaaggctgcccgtctggagttgctcgttcctcccagtaggttcgtggtcttgctggtttcaggagtgaagctgcagaccttcacagtgagtgttatagctcataaaggcagtgtggacccaaagactgagcagtagcaaacttcactgcaaaaagcaaaagaacaaagcttccacagcgtggaaagacacccgtacagaaaagtacccgagcgggttaccactgctggtgcaggcagcctgcttttattctcttatctggccacacccacatcctgctgattggtccattttacagagagccgagtggtctgttttgacagggcgctgattggtgcgtttacaatccctgagctagacacaaaggttctccacctccccactagattagctagatacagagtgtggacacaaaggttctccaagtccccacaagagtagctagatacagagtgccgattggtgtatttacaatcccttagctagacataaaggttctccaagtcccgcccagactcaggagcccagctggcgtcacccagtggatcccgcacggggccgcaggtggagctacctgccagtcccgtgcggtgtgcgcgcactcctcagcccttgggtggtcgatgggactgggcgccgtggagcaggggcgccgctcgtcggggaggctcggccgcacaggagctcacgggcgtgggggagaggctcaggcatggcaggctgcaggtcccgagccctgccccgcagggaggcagctaaggcccggcgagaaatcgagaacagcgccggtgggccagcactgctgggggacccagcacaccctccgcagccgctggcccgggtgctgagcccctcattgcccggggctggcaggccgctccgagtgcggggcccaccgagcccacacccacccggaactcacgctggcccgcaagcaccgcgcgcagccccggttcccgcccgcccctctccctccacacctccctgcaagctaagggagccggctcccgcctcggctagcccaggaaggggctcccacagtgcagcggtgggctgaagggctcctcgagtgccgccgaagtgggcgccaaggccgaggaggtgctgagagtgagcgagggctgtgagggctgccagcaggctgtcacctctcagcgccatctcggctcaccgcaacttgtgcctcctcactgctttagcctcccgagtagcttggattacaggctcctgccaccacgtccccctgatttttgtatttttagtagagacggggtttcaccatgttggccaggctggtcttgaactcctgacctcaagtgatccgcctgcctcggcctcccaaagtgctggcattacaggcgtgagccaccacgcctggcttggaggagccctttaaaggaaaaagaacattgcaggatccttaacaataactaaaaataaaattccttcaaaaggcaggatgtagtgcccatgagttactgttgtattgtttcccctttatataacctttttccacaattactttagtaactttggttgttctcgttgaatgtctatgtgatttctctgctgtaagctcctgaggttggatttgcgctgcacagcagatccctacaagtccccttctcagtgttccttgaagatcttttgttttattgcttgtttcatagttccccgggtgatctcagctgcaatatactcctttgcaaagttgctgtaaccaggccaaaacctgtccctagatttagaatccatggtttgggatgactgtgacgttaatcaccccatgctctctgtcaacatgacccaacactttcagtacatcccatcctcatcctcagatcctcatcctcagatcttcagcacttacagcatctataggcctttcaaccattgcaccagcaagcaaaacaacaattatagagaaaatggacagaaggcgaaacaaaagaaaagttttatgatcaatgagcaaattataggcaaacgtattcatatttaagcatcaggggatatttcatttgtcctgagtaattgatatgctttttctcatggaaacaagatttttgcaattaactgatcatgttttcctttactgtaaaggtcagagacaaatttgatgcccaatatcagtaactagtaacttatgggtccatctgggttttacattttctctccataccatcttttctacctaaattattcctcaaaattattcctcatcctctcttttttagctactatcttttttttttttttttcctgagatggagtctcactctgtcgcccagactggagtacagtggcacgatcttggctcactgcaacctctgcctccagggttcaagcgattctcttgcctcagcttcccaagtagctgggactacaggtgcacaccaccacacccagctaatttttaaaaaaatatttttggtagagacagggtttcactatgttggccaggctggtctcaaacttctgacctcaagtgatccgcccacctcagcctcccaaagtgctgggattacaggcatgagtcactgcgcccagcctttagctactatctttgattacatgtgattagccacatgtgagagctctgatgctctctgaatgtataaagaagcatgggctctgctcctccgtgtgctgagccaatatgttccacagtagaaagggaggggctccagaactgcggctcatagcaagttttcttccatatacatccaccaccagggtgccaggtggaacaacttcatctgttggcaatttcacaccctaaatcaatctttccttgcaacttccccctgcctctggtgtgaaactggcccagacttccatctctgccattatcaatctcccctccagaaaccaatgcccttcccagaaatccggcatcagacatgtttttatatgtttgaccctcaaagacagaagtcagggttaggattccatttctttttcattcaggaggcacctctgccactttgtaatatcatcaatgcaagcttgacttattggtgcctgaaaacatccaagcccgaaatactctacctggagcctggtccaggccctacccaaagccctgcaacatccatctgtaagcttcatcactgaaaggcgcacagactttccagctgcaggtggaggaagtgcaccctccactctcctcacgttcccctagaagggaagggcttctctccatcctcacacacacacactgctccttatgaccgtgcctccacctggcaagaaacatatttcaggctccccacaggctgcttattagatgcaaaggaaaactagtaatttacaccatggggaaatcagtcaacgccctggaggggaggaatgatcaaaatcaacaccgccaatgaggtgagaaggacatcagtgtctccagaaatgagaccttttttgagacggatgcaggatcacttacgcagtatttcattttctcgcctcatcgtgaggaaacatcagacaaacacaatgaagaacatttgttctgtctttaaaaggcacagggaaacttattctgctgcctgtcattgttatgaaagataaaggaaggctgtgggaatgtttctgattaaaggaggccagagagacatgacaactagatccaaatgtcgggccctagactggatcccatcccagaggaaataagaaagggcattattgggtcaactgtcatcatggaaatacagactaccattgaataaattaaatcaatgttaaatttactcaagtggataaatactcggtggttctgtaagagaatattcctattcttagcaaagatgcactcaagtattctagggtaaaggtgactatataggcatgcgtgttttagaaaagcaattttatctgtgttaacagtaagtggatctcagtaaagggtgtgtgctattgttagtctcaaagcttttctgaaaatttggaattatttccaaatgaaaagtcaaaacaacaacaacagcagttcaatctcatctagaagagtttggcctcagtaatagaacctgggtttaaatctcatctctggctcttcaatgagctacttcactctctgcagatcttgatctcctcaccaataaaatgggcataatcatagtcgctgtatcacagacttgttagaagactgaaaattacaaattaaactttacaaagcattgagaacagggtctggcacatagtcagcttcatataaatgtttaacaaatatattgccaccattctgaaattgaaaacaaaagaagcacacaaaaattttccaaatctaagaatttcctcttgggatctgctgactgactaaaataatgttaagtcaacgttttcatagatcgagcatgaagtgtgtgttaattgttgggtgaccaagcagaatcaagtacagttgatcaagcagggttggaaacgtgggcgagcttaagctactcacgcatttcacttttgcaaaagccgtgagatatattaagtagatattgagttaaaataagcacagataaaataactactcggtaatcttccaaacacatctttggtataatactgagctttcaggaaatcaaggggggaaatatgataatatcctatatggcctagccttgctataggatgcaaagtaattaaacctcacaggagaatgacttattacataccaaacacgtggaaaaggaaaggcaaaaactgcctatctttggcttctacagtaattttttcctggaggagagcagagttggggcaactaagagtttcttttgaaagctcccaaagtctctggccatttggccgggaaagccttcctgtcggcagggcctgagtgagcactgtcttcaaacctcccagggtcaggtagctgcaggcatctttgggaagccacatggttaaacctccagattccaggaagattactacctaaagcatccaggtggatggcaggtcaaggtgactgcatcgaagaagtgtgatgaacgttcacagaggtttctgcaaagatttacaactcatccatccctctagctatgctaagctttatcctgatcaagccaatccacccatgagtttgcacctggaccacactgtcttggcctcttaaatctcatagaattcctcttactctctgacatgatatgacagccctgctcctgttataagaaatagtttcactgttctgttgataaagtgatgaacttttttatattattactttaaacaagaaatggatttaaacagcaagacacttgacttgaaggaaagctatctaggatcatttattttagagaaatttatcccaccttaaaaactgattgccgtacatgtaacagctgtgtacaaaaagtcatgagtctccttgatttcacaatgataattgaaacatattggaattctctaatcaaataagtatgcagaggagtctgttgttgtcattgctattgtttgtcaaacaatgaaagtaaaaaactaaatgggaaacaaaaataaaagtggaacaagcacaccactaatgcattctttttttttttttccaagacagagtcttgctctgtcacccaggctggagtgcagtggtgcgatctcggctcactgaaacctctgcctcccgggttcgagtgattctgctgcctcagcctcctgagaagatgggattacaagagcacaccatcatgcctggctaatttttggatttttagtagagacggggtttcaccatgttggccgggctggtctcaaactcctgatctcaggtgatctgcccatctcggcctcccaaagtgctaggattacaggcatgagccaccatgcccggcctaaggggttctttcataagaaggtttttctctacctcattttcttttattgtctatatcactagccatttagttaaaaaaataataatagtgttatacaatagatctgatcacatatgtcagttacttgatgtacagtgaagggagagaacaaatgatgggatagagagaattatgtgtacaagtcaggatgggctgggctccaactgtaatttgctaactgagagtgtttttgtgtctgtgggttctggtgtaaggtagtgaatcatgtgcattttctttttttttttgaaacggagtctcactctatcgcccaggctggagtgcagtggtgcagtctcggctcatcacaacctccacctaccaggctcaagcgattctcctgtctcagcctcccaagtagctgggatgacaggtgcgctccactacacctggctaatttttgtatttttagtagagacgcggtttcaccatgttggccaggctggtctcgaactcctgacctcaaatgatccacctgcctcggcctcccaaagtgctgggattacagacgtgagctaccgctcccggcctatcatgtgcattttcatccttcatttccaactgtgcaggtgcatctgtttcattgattatccgcccaccaaattagaatatgatcagcctcggtgacaaatcctggccttcacactaggtttatatttagtcactagtgctctgtgtctcctcttcaacagaatgatcccatcctacctccttctaatgaatttgatgtcatttcctgttttgaccctccttgggttttgcatcagtcgtggtgacggctgaggactccttggttgccacgccacaaaagatatgtcaggtctgcaccccacgagcatgggagaagccgaggaaggtgcagcaggaagaagggaggagggagtgatgcttttaagtattcagctacacaccagtgtctctttctaaggatccccttgagaaattaaagccaagctctcctgaatggctgtgttggttgctgcagggcccaaggcttgcttctgtggccccttctgttctccctaagggagcttacctagtccaccagcctgctccaaactgctggcgtctctgtcctcgacagtagccaaggcctttcacctggactccttgtttccccacttgccggatacaatgcaagtcccacacagcagccaggagagcctttacaaacacgaaccacatcccacgcctcacctgctcaatgccagccagtcctcctctttgccctttgcctcgctgacatctgacctcagctcaacctcgcctcccacattccagccacgggggcatcttcttggtctctcagataagccaaaggcattcccctcaagacctttgcaccagctaccctgctgccctgcggctcccctcccggccactcaggagcccccttatcgtcacgcaaagcccagccacctacacttcccagtccaaagtaccccccagccacctcgcagcacacagtggtctccagagtctctcagaatgctcatcgcttgcctttttctctcttccttcttccacctaaaatgtgatctcacgagagaagaaaacttgcctgtcttatccactgctgtgttctcacagacaaaaagtgcctggaataggatatctgctaacaagcatttattgaatgagtcttatgagcatggtagatttaatttccatgtgtgattttctcattgctatgatccctaggacactcagggtcaaaggcaaggctcacttctcctacttgcacaagaccttacgctgtgcattggagggacccatcgcagctctggcctgatgtttccctcctatgttcctcttgtaccgatttgctcatcttaagaaatatttataaaaggctgaatgcatcattgagcctttctcagcccttaataaaatgtggtggtgtgtaaatacattggcaggtggcttttgctaaatagcacaagatagatttctgcagggaacaagaggaatcagtcctccatgtcattcaccaactacaagtggggagagcaaacccagatgctctccctatttgagtcagtgctgcagtggccacagaaaacatcctgtcctctgcaggaggcaggtgtgaattcccaggtcacgggtaaagtcggtcaacagatgacaggagagcagacatcaggctgagccagcctcaggaccacagtgaaggcaaacaaggtgagagggaagcagactatccactcagaggcattcataggacacttttaattttttttaaattttatttattcattcattttatttatttatttactttttctgagatggactcttgctctgtctcccaggctagagtgcagtggtgcaatctctgctcactgcaacctccgcctcccgggttcaagtgattctcctgcctcagcctcctgagtagctgggactacaggtgaatgccaccatgcccagctaatttttgtatttttagtaaagacagggtttcaccctgttggccaggctggtcccaaactcctaacctcagttgatccacctgccgcagcctcccaaagtgctgggattacaggcatgagccaccgcacccggcccattcattcattttaaagattggtctccctctgtcaccagactggagtgcagtggcacaatcatagctcactgcagcctcagactcccaggttcaaaagatcctcttgcctcagcctcctgagtagttgtaagtcaagctaaacttctttattgcttatagcatgt

SEQ ID NO: 399 - DNA, 702 bp, Homo sapiens
aggagaggaaaggacacctcacctggcagagcagcacaaaggtcaggcatgtttccctcctgacctggaagctgggtcctgctccttcacatgaactgtccagggcttggtcatatacccaggtccccctcagtcctgcccagagtgactccactggtctccccagaaaacaccaacagcagagagaaatgaagtgtgtctgttttctggtttcatattgcagctcctcttgctcttcttaggacagaaataacatctgcaatgccagagacacttgaaggaaagagctagaagtcagtaatgatgtgttatgacttgcatggcttcaggtagttcagaacctgcaacctgtagttcagattacaggagaagaactcagacgataaattggcttccaaagaaggccaaatagaaaaaaaaaaggcttcttcagaccaatagctgagtgacctaccttccaaaatgggtcacggccaaatgttggcaggaaatgattcaaaggttttagccaggtcttccaggcccattcctcctttctagaaatgcccagctgttcaagcgctctttgctggagatggcaacgtttttgtctcctaactgtcaattttccagagagacaagagtcagcagggaatgatgttaaatgaaaacatacccctaattttctctggcctgcctggcagtcaggagaccaccagacac

SEQ ID NO: 400 - protein, 79 aa, Homo sapiens
ERKGHLTWQSSTKVRHVSLLTWKLGPAPSHELSRAWSYTQVPLSPAQSDSTGLPRKHQQQREMKCVCFLVSYCSSSCSS

SEQ ID NO: 401 - DNA, 268 bp, Homo sapiens
cttgagggaggcgctgcgactgacaagcggctctgcccgggaccttctcgctttcatctagcgctgcactcaatggaggggcgggcaccgcagtgcttaatgctgtcttaactagtgtaggaaaacggctcaacccaccgctgccgaaatgaagtataaggtaggtgataacccccgtgaggacaggccatggctacgtatacgagtacccatccagataccaaaaggacgtctatgatatccctccttctcataccactcaaggggt

SEQ ID NO: 402 - protein, 42 aa, Homo sapiens
QAALPGTFSLSSSAALNGGAGTAVLNAVLTSVGKRLNPPLPK

SEQ ID NO: 403 - DNA, 3796 bp, Homo sapiens
agagacttgagggaggcgctgcgactgacaagcggctctgcccgggaccttctcgctttcatctagcgctgcactcaatggaggggcgggcaccgcagtgcttaatgctgtcttaactagtgtaggaaaacggctcaacccaccgctgccgaaatgaagtataagaatcttatggcaagggccttatatgacaatgtcccagagtgtgccgaggaactggcctttcgcaagggagacatcctgaccgtcatagagcagaacacagggggactggaaggatggtggctgtgctcattacacggtcggcaaggcattgtcccaggcaaccgggtgaagcttctgattggtcccatgcaggagactgcctccagtcacgagcagcctgcctctggactgatgcagcagacctttggccaacagaagctctatcaagtgccaaacccacaggctgctccccgagacaccatctaccaagtgccaccttcctaccaaaatcagggaatttaccaagtccccactggccacggcacccaagaacaagaggtatatcaggtgccaccatcagtgcagagaagcattgggggaaccagtgggccccacgtgggtaaaaaggtgataacccccgtgaggacaggccatggctacgtatacgagtacccatccagataccaaaaggacgtctatgatatccctccttctcataccactcaaggggtatacgacatccctccctcatcagcaaaaggccctgtgttttcagttccagtgggagagataaaacctcaaggggtgtatgacatcccgcctacaaaaggggtatatgccattccgccctctgcttgccgggatgaagcagggcttagggaaaaagactatgacttcccccctcccatgagacaagctggaaggccggacctcagaccggagggggtttatgacattcctccaacctgcaccaagccagcagggaaggaccttcatgtaaaatacaactgtgacattccaggagctgcagaaccggtggctcgaaggcaccagagcctgtccccgaatcacccacccccgcaactcggacagtcagtgggctctcagaacgacgcatatgatgtcccccgaggcgttcagtttcttgagccaccagcagaaaccagtgagaaagcaaacccccaggaaagggatggtgtttatgatgtccctctgcataacccgccagatgctaaaggctctcgggacttggtggatgggatcaaccgattgtctttctccagtacaggcagcacccggagtaacatgtccacgtcttccacctcctccaaggagtcctcactgtcagcctccccagctcaggacaaaaggctcttcctggatccagacacagctattgagagacttcagcggctccagcaggcccttgagatgggtgtctccagcctaatggcactggtcactaccgactggcggtgttacggatatatggaaagacacatcaatgaaatacgcacagcagtggacaaggtggagctgttcctgaaggagtacctccactttgtcaagggagctgttgcaaatgctgcctgcctcccggaactcatcctccacaacaagatgaagcgggagctgcaacgagtcgaagactcccaccagatcctgagtcaaaccagccatgacttaaatgagtgcagctggtccctgaatatcttggccatcaacaagccccagaacaagtgtgacgatctggaccggtttgtgatggtggcaaagacggtgcccgatgacgccaagcagctcaccacaaccatcaacaccaacgcagaggccctcttcagacccggccctggcagcttgcatctgaagaatgggccggagagcatcatgaactcaacggagtacccacacggtggctcccagggacagctgctgcatcctggtgaccacaaggcccaggcccacaacaaggcactgcccccaggcctgagcaaggagcaggcccctgactgtagcagcagtgatggttctgagaggagctggatggatgactacgattacgtccacctacagggtaaggaggagtttgagaggcaacagaaagagctattggaaaaagagaatatcatgaaacagaacaagatgcagctggaacatcatcagctgagccagttccagctgttggaacaagagattacaaagcccgtggagaatgacatctcgaagtggaagccctctcagagcctacccaccacaaacagtggcgtgagtgctcaggatcggcagttgctgtgcttctactatgaccaatgtgagacccatttcatttcccttctcaacgccattgacgcactcttcagttgtgtcagctcagcccagcccccgcgaatcttcgtggcacacagcaagtttgtcatcctcagtgcacacaaactggtgttcattggagacacgctgacacggcaggtgactgcccaggacattcgcaacaaagtcatgaactccagcaaccagctctgcgagcagctcaagaccatagtcatggcaaccaagatggccgccctccattaccccagcaccacggccctgcaggaaatggtgcaccaagtgacagacctttctagaaatgcccagctgttcaagcgctctttgctggagatggcaacgttctgagaagaaaaaaaagaggaaggggactgcgttaacggttactaaggaaaactggaaatactgtctggtttttgtaaatgttatctatttttgtagatattttatataaaaatgaaatattttaacattttatgggtcagacaactttcagaaattcagggagctggagagggaaatctttttttttccccctgagtggttcttatgtatacatagaagtatctgagacataaactgtacagaaaacttgtccacgtgcttttgtatgcccatgtattcatgtttgtttgtagatgtttgtctgatgcatttcattaaaaaaaaaaccatgaattacgaagcaccttagtaagcaccttctaatgctgcattttttttgttgttgttaaaaacataccagctggttataatattgttctccacgtccttgtgatgattctgagcctggcactcccaaatctgggaagcatagtttatttgcaagtgttcaccttccaaatcatgaggcatagcatgacttattcttgttttgaaaactcttttcaaaactgaccatcttaaacacatgatggccaagtgcccaaaagccctcttgcggagcaaatttcagaatatatatgtggatccaagctctgatagttcaggtgctggagggaagagagacctgtgtgtttagaggccaggaccacagttaggattgggttgtttcaatactgagagacagctacaataaaaggagagcaattgcctccctggggctgttcaatcttctgcatttgtgagtggttcagtcatgaggttttccaaaagatgtttttagagttgtaaaaaccatatttgcagcaaagatttacaaaggcgtatcagactatgattgttcaccaaaataggggaatggtttgatccgccagttgcaagtagaggcctttctgactcttaatattcactttggtgctactacccccattacctgagggaaactggccaggtccttgatcatggaactatagagctaccaggacatatcctgctctctaagggaatttattgctatcttgcaccttctttaaaactcacatatgcagacctgacactcaagagtggctagctacacagagtccatctaatttttgcaacttcc

SEQ ID NO: 404 - protein, 830 aa, Homo sapiens
MKYKNLMARALYDNVPECAEELAFRKGDILTVIEQNTGGLEGWWLCSLHGRQGIVPGNRVKLLIGPMQETASSHEQPASGLMQQTFGQQKLYQVPNPQAAPRDTIYQVPPSYQNQGIYQVPTGHGTQEQEVYQVPPSVQRSIGGTSGPHVGKKVITPVRTGHGYVYEYPSRYQKDVYDIPPSHTTQGVYDIPPSSAKGPVFSVPVGEIKPQGVYDIPPTKGVYAIPPSACRDEAGLREKDYDFPPPMRQAGRPDLRPEGVYDIPPTCTKPAGKDLHVKYNCDIPGAAEPVARRHQSLSPNHPPPQLGQSVGSQNDAYDVPRGVQFLEPPAETSEKANPQERDGVYDVPLHNPPDAKGSRDLVDGINRLSFSSTGSTRSNMSTSSTSSKESSLSDAQDKRLFLDPDTAIERLQRLQQALEMGVSSLMALVTTDWRCYGYMERHINEIRTAVDKVELFLKEYLHFVKGAVANAACLPELILHNKMKRELQRVEDSHQILSQTSHDLNECSWSLNILAINKPQNKCDDLDRFVMVAKTVPDDAKQLTTTINTNAEALFRPGPGSLHLKNGPESIMNSTEYPHGGSQGQLLHPGDHKAQAHNKALPPGLSKEQAPDCSSSDGSSWMDDYDYVHLQGKEEFERQQKELLEKENIMKQNKMQLEHHQLSQFQLLEQEITKPVENDISKWKPSQSLPTTNSGVSAQDRQLLCFYYDQCETHFISLLNAIDALFSCVSSAQPPRIFVAHSKFVILSAHKLVFIGDTLTRQVTAQDIRNKVMNSSNQLCEQLKTIVMATKMAALHYPSTTALQEMVHQVTDLSRNAQLFKRSLLEMATF

SEQ ID NO: 405 - DNA, 4663 bp, Homo sapiens
agcaagtccgctcgctgcatggagagggaaacatgagcatgcagcaggactagctgtcacctcccgcccgcctgcccagagagggccagagcgtcggggaggcaagatgatccaccagcggttccatcctacacttgggattcagtaagctgtgaggtccgtaatgtcagacactggcaaacatcatatgttcttcaagtagagttatgaaaacgaagaaactggtcagaagagtaaaacgccggaattgtcctttccaacatccagagctgcatcattccttggggcaaaatgtggacaaggaatcttatggcaagggccttatatgacaatgtcccagagtgtgccgaggaactggcctttcgcaagggagacatcctgaccgtcatagagcagaacacagggggactggaaggatggtggctgtgctcattacacggtcggcaaggcattgtcccaggcaaccgggtgaagcttctgattggtcccatgcaggagactgcctccagtcacgagcagcctgcctctggactgatgcagcagacctttggccaacagaagctctatcaagtgccaaacccacaggctgctccccgagacaccatctaccaagtgccaccttcctaccaaaatcagggaatttaccaagtccccactggccacggcacccaagaacaagaggtatatcaggtgccaccatcagtgcagagaagcattgggggaaccagtgggccccacgtgggtaaaaaggtgataacccccgtgaggacaggccatggctacgtatacgagtacccatccagataccaaaaggacgtctatgatatccctccttctcataccactcaaggggtatacgacatccctccctcatcagcaaaaggccctgtgttttcagttccagtgggagagataaaacctcaaggggtgtatgacatcccgcctacaaaaggggtatatgccattccgccctctgcttgccgggatgaagcagggcttagggaaaaagactatgacttcccccctcccatgagacaagctggaaggccggacctcagaccggagggggtttatgacattcctccaacctgcaccaagccagcagggaaggaccttcatgtaaaatacaactgtgacattccaggagctgcagaaccggtggctcgaaggcaccagagcctgtccccgaatcacccacccccgcaactcggacagtcagtgggctctcagaacgacgcatatgatgtcccccgaggcgttcagtttcttgagccaccagcagaaaccagtgagaaagcaaacccccaggaaagggatggtgtttatgatgtccctctgcataacccgccagatgctaaaggctctcgggacttggtggatgggatcaaccgattgtctttctccagtacaggcagcacccggagtaacatgtccacgtcttccacctcctccaaggagtcctcactgtcagcctccccagctcaggacaaaaggctcttcctggatccagacacagctattgagagacttcagcggctccagcaggcccttgagatgggtgtctccagcctaatggcactggtcactaccgactggcggtgttacggatatatggaaagacacatcaatgaaatacgcacagcagtggacaaggtggagctgttcctgaaggagtacctccactttgtcaagggagctgttgcaaatgctgcctgcctcccggaactcatcctccacaacaagatgaagcgggagctgcaacgagtcgaagactcccaccagatcctgagtcaaaccagccatgacttaaatgagtgcagctggtccctgaatatcttggccatcaacaagccccagaacaagtgtgacgatctggaccggtttgtgatggtggcaaagacggtgcccgatgacgccaagcagctcaccacaaccatcaacaccaacgcagaggccctcttcagacccggccctggcagcttgcatctgaagaatgggccggagagcatcatgaactcaacggagtacccacacggtggctcccagggacagctgctgcatcctggtgaccacaaggcccaggcccacaacaaggcactgcccccaggcctgagcaaggagcaggcccctgactgtagcagcagtgatggttctgagaggagctggatggatgactacgattacgtccacctacagggtaaggaggagtttgagaggcaacagaaagagctattggaaaaagagaatatcatgaaacagaacaagatgcagctggaacatcatcagctgagccagttccagctgttggaacaagagattacaaagcccgtggagaatgacatctcgaagtggaagccctctcagagcctacccaccacaaacagtggcgtgagtgctcaggatcggcagttgctgtgcttctactatgaccaatgtgagacccatttcatttcccttctcaacgccattgacgcactcttcagttgtgtcagctcagcccagcccccgcgaatcttcgtggcacacagcaagtttgtcatcctcagtgcacacaaactggtgttcattggagacacgctgacacggcaggtgactgcccaggacattcgcaacaaagtcatgaactccagcaaccagctctgcgagcagctcaagaccatagtcatggcaaccaagatggccgccctccattaccccagcaccacggccctgcaggaaatggtgcaccaagtgacagacctttctagaaatgcccagctgttcaagcgctctttgctggagatggcaacgttctgagaagaaaaaaaagaggaaggggactgcgttaacggttactaaggaaaactggaaatactgtctggtttttgtaaatgttatctatttttgtagatattttatataaaaatgaaatattttaacattttatgggtcagacaactttcagaaattcagggagctggagagggaaatctttttttttccccctgagtggttcttatgtatacatagaagtatctgagacataaactgtacagaaaacttgtccacgtgcttttgtatgcccatgtattcatgtttgtttgtagatgtttgtctgatgcatttcattaaaaaaaaaaccatgaattacgaagcaccttagtaagcaccttctaatgctgcattttttttgttgttgttaaaaacataccagctggttataatattgttctccacgtccttgtgatgattctgagcctggcactcccaaatctgggaagcatagtttatttgcaagtgttcaccttccaaatcatgaggcatagcatgacttattcttgttttgaaaactcttttcaaaactgaccatcttaaacacatgatggccaagtgcccaaaagccctcttgcggagcaaatttcagaatatatatgtggatccaagctctgatagttcaggtgctggagggaagagagacctgtgtgtttagaggccaggaccacagttaggattgggttgtttcaatactgagagacagctacaataaaaggagagcaattgcctccctggggctgttcaatcttctgcatttgtgagtggttcagtcatgaggttttccaaaagatgtttttagagttgtaaaaaccatatttgcagcaaagatttacaaaggcgtatcagactatgattgttcaccaaaataggggaatggtttgatccgccagttgcaagtagaggcctttctgactcttaatattcactttggtgctactacccccattacctgagggaaactggccaggtccttgatcatggaactatagagctaccaggacatatcctgctctctaagggaatttattgctatcttgcaccttctttaaaactcacatatgcagacctgacactcaagagtggctagctacacagagtccatctaatttttgcaacttcctgtggccagtgtgtataaccccttccactatctcacagatagtcacagcgtccattccatagtctgtctcctcacatctgttagtattgacacagcacagacaccacaagccatcaggttcttcatggggcaggtgaaatacttctaccccatgggtaaatgtattcacatattaccaagagaagaagcacattatctatgatcttttggcccagttcttatttagcatttttattccagcctacttggaaacatgtttttatttgcaatatatgcctgactgaattaagcttgcttgttttaaacaaccaaatcattggaacagaaaaggatttaaaaaacaagaatgcatgatctcagcgtgattaaaaaaaaatcagtggaaataaatgatcatagaaggtgcttttcaaaacaactgctattataattctcaaagtcctactctgccaaaagaagattaaaagtcatacattacattacaaggaaatgttcatgtgggaagagggttgctgaaaatcaacaacgcttgaagttaaaaagtgtgtctttgtagatttcattgtataatgtgtatttcttaggagatggctgacttgattgatctacgctaagtggagacatttcacatttttaaaaccaaatgttcaatctgtattactctttgccgtcttgtatgtagaggctatttttaaatcattaaatttttagatctctgttttcatagcc

SEQ ID NO: 406 - protein, 830 aa, Homo sapiens
MWTRNLMARALYDNVPECAEELAFRKGDILTVIEQNTGGLEGWWLCSLHGRQGIVPGNRVKLLIGPMQETASSHEQPASGLMQQTFGQQKLYQVPNPQAAPRDTIYQVPPSYQNQGIYQVPTGHGTQEQEVYQVPPSVQRSIGGTSGPHVGKKVITPVRTGHGYVYEYPSRYQKDVYDIPPSHTTQGVYDIPPSSAKGPVFSVPVGEIKPQGVYDIPPTKGVYAIPPSACRDEAGLREKDYDFPPPMRQAGRPDLRPEGVYDIPPTCTKPAGKDLHVKYNCDIPGAAEPVARRHQSLSPNHPPPQLGQSVGSQNDAYDVPRGVQFLEPPAETSEKANPQERDGVYDVPLHNPPDAKGSRDLVDGINRLSFSSTGSTRSNMSTSSTSSKESSLSDAQDKRLFLDPDTAIERLQRLQQALEMGVSSLMALVTTDWRCYGYMERHINEIRTAVDKVELFLKEYLHFVKGAVANAACLPELILHNKMKRELQRVEDSHQILSQTSHDLNECSWSLNILAINKPQNKCDDLDRFVMVAKTVPDDAKQLTTTINTNAEALFRPGPGSLHLKNGPESIMNSTEYPHGGSQGQLLHPGDHKAQAHNKALPPGLSKEQAPDCSSSDGSSWMDDYDYVHLQGKEEFERQQKELLEKENIMKQNKMQLEHHQLSQFQLLEQEITKPVENDISKWKPSQSLPTTNSGVSAQDRQLLCFYYDQCETHFISLLNAIDALFSCVSSAQPPRIFVAHSKFVILSAHKLVFIGDTLTRQVTAQDIRNKVMNSSNQLCEQLKTIVMATKMAALHYPSTTALQEMVHQVTDLSRNAQLFKRSLLEMATF

SEQ ID NO: 407 - DNA, 208765 bp, Mus musculus
  misc_feature (1)...(208765): n = A,T,C or G
tctggggattgaacccacagttgaagttgtcaggcttgtgtggccagagctgagtcaccttcctggctttgttgtgtgtttgggggacatgactttatgtggtacagatctgacttgcactgtgtagtggaggatggccaggatttctgatcctcctgcctccacaggcagagtgatgggactataagattatgccatccagttgagctggcctctccatttatttactaagtgcttatcatctctgatagtctgtgggaatgggttgagggggcagggttgctccaagtagccctgcctggcctggtactcactacggaagcaaaggctggctccaaaatcatggagatctgtctgcttctgcctttcaagatatgtaccactccacctggcttttcccagaatatagagaagggtgacaaaacccatagaactggagttacacacagtgtgagcaaatatgtgggtgcaaggaatcgaactcaggtcctctggaagaacagcatgtgctcctaattactgagccatctctccagccctgctaacttaatctttttttttgttgttgttgttggttttgttttgttttgtttttgagacagggtttctctgtgtagccaggctgtcctggaactcactttgtagaataggctggcctcaaactcagaaatttgcctgcctctgcctcccaagtgctgggcttaaaggcatgaaccactactgcctggctctgctaacttaatcttaaacacatgaattttcttttcagtgctgtggactggacccagagcctttagcatataagcaccatgccactaagctacattcttagtccaagttttatttgtttgtttgtttgtttgagatagagtttctctgtgtaatagccctggctgtcctggaactggatctgtagcctaggctgtccttgaattcagatactgggattaaatgcatgtgctaccaccaaccagcttttccaaataataaaaacaaaatctttttattttcaggagtgccagaccactgttattgtattaattaacctcacttctttgggtattttttgtttgtttttgagacagggtctaactttgtagttcaggctgtcctgaaactcactatgtagaccaagctggcctcaaaagaacagaggtcatcctgcctctgcctcaggagggcttaaaggcatgtgacattatacttagctaggacctctttttttttttttttttttttttttttttttttgagacaaggtctcattatgtaattctgggtggcccggaaatcacagagacctagctcctttcctctgcctccaaaatactaagaataaaaaacgtgtcataccactacaaattgttgggccccttttttgcaatctgttgagatgggtacttcctactggccaaccctttgttgagagcagggtggttcctttccacattcaaatagtttccctacttcctcattctcctccaaccccattgtcacccagagagaccctggtgtgctcctcaggcggtcgatcctggagccccacccagagggcccctctttgttactcaacatttctttcaccttggccttgagaaattcatggtgtgttctatgccttggaggaacagatctgctgtgattttacatccctagtaaacatccaacttctttttattcaaggaatcgttgacaatggaaacacaaagaagttgtaaatgaataatctatggagtttagacacagagtgaccaccaaggttggagtcttcttcattctactgtgtgcccatccacttatagaagggagatggttttggaagatggactgtaaactttataaatgtcacagatttggcaagagacagtttttgctctccctgatcagtgtagggaattcatagaatcagtcgacattatggttgagggactgggtctggatggagatggttcagtagttaagaagctgactggtcttcctgaagactggggatttcatccccagcatctacactgggcttcccaatagtctctaaccccaggactggaagatccaacaccctcttcccctgcctaagggtaccaggagatgcaatggacaggtgatatacactgatgtacattcaggcaaacagtcactccataaaataaaaagaaatacaatctaaaaacaagcaagcaagcaagcaaacaaacaaaagagcagccttatattctaaaagagtaatcccaaatgaactgccttaatctggtgtgccctgactcccaagggtctgattgctggaaggttctgatagagaagaaataattacttgggtgatggacagtgattgctggtgcattttctatctagccagaatacttttgtttctttccctcaccctttaggaagcattttgtgtagcgcaggctggcctcaagtcactaagtaactgaggaaaactttgaaggcttcatcttcctgcctcttccttcccagggataggactatggacaggcccacgtcattacaccctgctttccctccctctggataactaagtgggttcagtccatctcttggttgggagaggcgtttctttggggttatcttttctggctgctgggagatagaagtactgaggtgacagaaagaaaaacgggaatgctccacttctgcttcagggactgccctcaccttttccagtaaacactttcatctgcattttcttcttcttttcgttttttattcgagacagggtttctctgtgtagccctggctgtcctggaactcactctgtagaccaggctggcctcaaactctgaaatccgcctgcctctgcctcccgagtgctgggattataggcgtgcgccaccactgcctgactcatcctcattaaaaaaaaaaaaaaaaaaaaaagtatgctgtcgcttcagacacaccagaagagggcatttgatcctgttacaaatggttatgagccaccatgaggttgctggaaattgaactcaggatcttgggacaagcagtcagtgctcttagggtctgagccatctctccggtcccgaatgtccatttttaacttgcaacccaaggtgaacccagatacaacttctttgccctctttccctggctactgagaactgtgaaatatatatatatatgccttagctacctcatcatgatcccccaaggatgattcgctggtggctgagaagttccttgctgtgtgtttatggaagtaacatgagtttgagaaactgcacattttccctcttggctgcctctcccgggttcctgaatgaggaccaactcttttcagcaacactggatacaatctagttagaatagcaatgttttttgtttgtttgttttaaaattttaattcctttttattactccttgctgtggtcaatgggctattagcagagatcagttctctccttccaccatgtgggggtccaaagattgaaaccagggcatcaggtttgtacctttacccactggggcacttgctggccctgagagtttaaagatcttctgtctaaagatagggccatatgtaaatgagttaaatacctaataaaaaatggaaaaaaaaaaaaaaaaaaagatagggcctttcagtgacttttaccagtgaggtttacagaaaacagattttaaaacgtcattgggtttgtgctgtgatatcttactgaagcttgacaagtaagactgtaaattcaagggctgacaaaaagagctgcctcattgccttgacatcaccacggactccatatttaagatggctgtttacttctggggttacctcctggtgtgttttaaaatactcttgcaaatctcagtcagcttgaaatagctgctctaccctttttcaacagaggctcccaccttctgagtacactggctcataggtatttataaacctgatgtcagtcaaagatgacttttttttatatccctcctcctcattctcttcctccacacgtgaagatagacctacataaaatgagaaactgcataaggtacccagtcacctacgtacgttcagcaatcctttaagatcgcatacattctttctttggaactttttctcctttgagacagggtctcacatactctggcacttgatatatagaccaagataaccttgaacttctcatccccttgctaccaccataccctactacaccgtcagtttttctcttagagtttaaaaatacttaatcagcttatattattgttattttttcccccacttttttcttatgtctgcttggttttgtgtcttttttttttttttttttttttttttgagacagggtttctctttatagcccgaactcagaaatccgcctgcctctctctctcaagtgctggcattaaagacatgcgccaccatgcccggcttggttttgtgtttttcattgttgctgttgtttgttttttgtttttcaagataggattgctctgtatgcctctggctgtctctagaacttagtatgtagactaggctggctttgaactcaacagagatccacttgcctctatctcccaagtgctgggattgcaccatgactatattattgttagttttgagatctaggaggcccttttgttaggaagtggtggaggttgtctttgaactcctaattttattctcttcatcttccctgagccatatttccttgagattgggtctcccaccagtatgcctatctcatctctggcccccacctccaaagctggagttatgtatggcacaccctgcaattcctggctttttctgtgggatggacatgggaaactcagcttaggtcctagaggtttcacagtaagtgttcttgcccactgggccatctacccagccccagatttttttgtaaaatctaagaatctttttctttattttttggctctccacaactatgtaaaagacctggatcactgagctcacagacatccccctgcctcttcttcctgagtgttggcaacaaaggtattcattactactgcatgctctaagaacacttttctttccagctacacctagtattattttatggaataatgtttattagatcacagtttggagaacatagagtgttgatctgtacaaagttggtggaataggatgcacaactttttttttttgggtttttggagacagggtttctctgtatagccctggctatcctggaactcactttgtagaccaggctggcctcaaactcagaaatccgcctgcctctgcctcccaagtactgggattaaagatgtgcgccaccatgcccgacgaggatgcaggacttgaaaaaaaaaatctaggcgacagtggtggtggttatcctcgtatatttccagtactcgggggccagaggcaagcagatttcgcgagttcaaggccagcctggtctgcaaagcaagttccaggacagccatggctacacaaagaaactgtctcaaaaaaaaacccaactgaataaaacaacataaccccacccccgcaaaacaaacaaccaacccaaaacaggaaacacactttaatacttcattttcatattgaagtggtgaaattgataaagcttattttgatccacgttattttatgtgttagttaaggttattatacccccccccccacatatatatatatatatatatatatatgtatgtgtgtgtgtatatatatatataaaatctgcctgcttctgcctcttgagagctgagattaaaactgttcaccactgtgtccttccttaaggtccaagtgttttaacaagtatacaaagatattcatatgaaaagttaggcctagctgggcttggtggcccatgcctttaatcccagcactcgggaggcagaggcaggtggatttctgagttcaaggccagcctggtctgcaaagtgagttccaggacagccagaggtatacagagaaaccctgtctcacaaaaaaagaaagaaagaaagaaagaaagaaagaaagaaagaaagaaagaaagaaagaaagaaagaaagaaaagttaggcctttagtcccagcacaaaggcaggtggaactctgtgaattcaaggccagccttgtctacatagcaaattccaggccagcccaggttacacaatgactacttacctcaaaaaacaaaacaaaacaaaacaaaaaccccaaaaaccaaagaggaagatcttaattggtgtgctgggcaactggtaacagccagaagattgtgctaacaattcttacacagcagtctgcatttaagcctgattgtggccagcaaacaacacagaggtcaagttagaattagatcaggtgagatccagaggtgtctttggtgaagactgaattaagccctttcattttatagatgaaacacctgacatccaggttggctaaagcagtcaggtgtgttagcactgccttctatcacagcaattgggaggcagaggcatgtgggtctttctgagttctacacagttccaggccagctacatagaaagacgcacctgattcatgttgattcaatgatttgcctaaaggttgtctcaatacgagatcatgggtccttgaactttttgatataattaaggataagtcatagaagtaacacaatcaggacatataaaactaagatgttaaggtcaaaagctttatcaacgggcttttgagatggttcaggggataaaaatgcttgctaccaaatttgatctgagttcaatttctgccacaggaatcacatgttggagggagaggaatagcttcgggagatttttctccaattccttcacatccacacataaataatttaaaggtggttcaaaagaaaattaggaacttgatacacagagattctcaaaaagggggagtgggtgtggaagtggggagagagctgggcagttaagaatgctcttcaaagcaccagacctcatttcctagaatacaggacaggtggttcaaaaccttcaataactccagttccagggaatcctatgcctctggcctctgtgggcatccacactcaccaggacacacacacacacacacacagacaccaacagttaacgacatttaaaaaaccttttaaaagattgtgttttaaaagaagtagctgaaatatcaagggacactcaggggtgagtaggttaagcagccaggcttaactgagcactgtatgatactaaaatggatttggttcatacaaaagtaaaaatagctctgtgccaaacgtggcatgggagatgataacagctgcttaattgtctgtcaatagtctaaatgttgcccattagagtttgtgtgaggtattaaaaaatgacaccttttcaattctatcaagttccagaggctctgaagagaatataaaaaattatgtctgggcttggtggcacatgcttttaatcccctcacccaggaggcatagtcatgctaatttctgagttcatggacagccaagggaacttccagattgcctagttaaaaaaaaaataaaggaaggaagaagaaaggtagacaatactaccactgaccctggaaagtttccttttttttttttttttttttttaaagagtctcaagtattctaggctgttctttaccaggcctgcacttaccaggttgagtcctgtgctaatttagagaggattctgcatcctcagagaggacgtcagtgctagcatgtggttcaaaggaatccattcctagttctctcaggagttaaaaaaaatcacaaggaaaagcaaattagacctcctaacaaaataaaagatgggaagcaaagctaatacttggcctggcctggagggtggaggttggaagtcatcaggagatagttattcccacagcagggaagactgtcaaccacaaaggacaatccattttccttttcaaggaaaacaacaccagcattatctaagccttatggaaatgagcaaattcctcctctaccacccccttaggcctcaactaacaatggtttttcacacttgcctgggacttggagttggtagtctagcaggagacttcacaggcctaggactgagaaccccaaacttgtccagagaaaccaccagaaactcacctttgttcttatttaattgactggggtctgacagatatgacattacatttgcacaaagctgtttaaaataataacgacgtggagaaacagacacctctagtgtacaggtcgtaatgatccgaatgggtttggaaagcaccttgtgtcaagacgaccataaagtcacttgggtggtcaaaactgaactgtaaaatagaaatgtattcgatcattccaaccaaacggaaacagtgaacaatttgtgcattatttaagacacacaggcaattaatttttctgcttgtaaaatgaacatgagttttagaaacttaaaaaataagacaaataatgaggtataactttttaaaaataagggtgtcttatgtcaactcatgaaacagtccaataacctgcatggttctaaactagggttttgttactttataatcctctccataagctttggccggaatcaacttgcagatgtggaaactgagcagcttaggaaagccatcgctcaacttgtctgaagtggccactgtgacctctgaatccataggtgttaactcgcttttttagaaccttctagacaccatgactaagttgccctgttgcgactaacagtggaatggtcgtgactcgggagtgcttgttttgggaaccgactgcccgggaggagagagaggaagaagccaatgtgtgtctgcaggtggatgggagaggctccaagccttttcgcttccctgaggctagccagtcagatttgaaaagcaggaccttgaagaccataggttagaaccaggaaattagcgccgaggctgggagccgtgctaaagttcctgcgaatgcccccgagagcgacagcagggcctgcgatccattgatctgagcgactggcgagcctgggcagggcaggggctggggcaggtaaggctgcggggcacagaccattgggctctcgggcactcagtgttcgagacgcttccttacgggctgcctgtgttggggggtcggtctccatttttccgttcacggtttcacctcggcgttgggagtctcggtcgcggacagccctagtcctgagggtaaagacccccttcaccgtctccagggacggcggggcttcacctcggagccaccggcgacggcctagggtcgcgtcggccccggggacaggggcgggcacgcgggccggcgaccacgaggccgcgagctttcgccgggaggctgccccagccgcgtctgcctcgcgcgtggggtcgcgtgcggccgcgggccggcttggagccgtgacctcggaccaccccggcggccgagcggccgcccgcttgctcggcacacgggcgcttgtcctgaggtgacaccgccggcaacggctgaagcaagcgggcgctgccgatcagcgagttcgcaccgagcgaggatccctcttggtgcgtggcccagtttggctnnnnnnnnnnnnnnnnnnnnnnnnnnnnnnnnnnnnnnnnnnnnnnnnnnnnnnnnnnnnnnnnnnnnnnnnnnnnnnnnnnnnnnnnnnnnnnnnnnnnnnnnnnnnnnnnnnnnnnnnnnnnnnnnnnnnnnnnnnnnnnnnnnnnnnnnnnnnnnnnnnnnnnnnnnnnnnnnnnnnnnnnnnnnnnnnnnnnnnnnagggccctcgggggcggggccggcgtggggagttcctcgctcccggaccacacgctccgcgggccaatcccgagccagcctctagcagtgtcgcacgcgggacacgtccaagcgtttgttggcagggcccggggaagggggagggggaagcgatcggggaaaagggagttgagtgacaggaggcgtggggcacgctgggaattgtagttcttcgcttccgtggccatagccattttgtagtcaagggactacaacttccagaagatcaaggggactattctaaggtgccccgggaataggcggctctcccccgggccgggcgtcctggggcactggtacccagctgcccggctgcaggtagacgtgagggcagtggcgaaggtttgcatgcggcgactgttgggtgagcggactgcgggtggggggggggggggggaaggggctgaggtggagcgaccgagcgtgccatgcattgagctagggagcctctctcaattccacgactgggctcggcgtgggagaggcgcctgacgggcggcccgcagaggcttcgtggaggcctttccggggtctcgtcgacggggctgcgggagttctccgcaccgggccggggcttgtgggcagaggttaggcaggcgtgcggggggctcagctgtgggagttttcggctggcgggaggtggcgaattagccgaggagccctaacttgtataaaagcagagtccatttaaagttgggctggctagcctctctctcattggttaaggggcttggaaaaaagagactcggcgagccctccgctgtggtgctgccgccgccaccgccgccgctggagttgactcttctgctcgcactgctgctgcagcacaaacgtgacttccaacattttaaatttatcttttccttttttcttcttcaagatgtaactacagatcagatactaaggaccttcacgtttcgctgatgtagtttttggaagaaaaagggggggagtgaagggcgtcggtttttttttttttcttctttttttttcttttctttttttgtgtctgttgtatgtttcgggggaaattttccattatgagtgttttactaaagtgaatttttcttgtttgcttcgctcgtctttggctctttttatattttttcttttatccttctcaatttcggatttatttcaaggcgaatctggttttgggggaagaggaagaaaagtcggattacaagatcaaccaccaccaacaacaataaaaaccaccaggatatttttttgcaaatttctgacggctttaaattcatgaagcaattgtccccttttgcaatcagcatttggatctcagaatgagcaaggaaagacccaagaggaatatcattcagaagaaatacgtaagtgctcttaacaacacatcctttggcttgcagttttaagcgatggttgtgaatgtcaagtttatagataattctgcagctgaaaggttttaaacagcgtccgataaagctctttcttttccgaaagggcttttcaggcaaagtcgtgtctgcctagtttggttgagaaaacagactggtgtagagatacctcaagtatataaattgacctcgaatgacacaacgttgatgtagttttggtgaaaggcaaggggttttggtggaggttggggttctgtgtgtgggggcccccgcagtgatctaactgcattctcgggcggatttggtcccatattgcactttgcatacaaatgagcctgttattagtgttatttggaaaatcgtgtaaggtatgtgtgttggaagctaagttgcaatccagagtacgattatggcgatcttctagcactggcacatcatttaatatatgtggcccttttggcttatctagcttgcaacatgacccagttgggaatcatgttactgggaatgcatttattggtattgacttttataaagaggctggttttggttctaaagattcatggtttctagtttgaggggaaaaacatagctcatgtaaaagtatatgtgtgcctgagtgaatgcatgttaatacgaataatttctccctgaaaactgggtttctgagattgggttgtgatggttaggtttgttttgtgcacagtatagcagcgtcttgcttggcatagggagtgtttttgttttgtgtagtggcttttttttttttttttttttttttgtaagtttggggggagggagtagagagggaaaccaggggattaaccaaatatgcactcgagtgatccggtggttagctgcgtatgctttagagcaaagtacacttttttcccccagaaaaaaaaaaggcccttgaagataaataaagaacaatgcgaccctatgagaaagttttatttaactagggtcgatgatttggtcttaatatttttcctttttggttagagaggagtgtataatgggagatgaccttctgggcagtggttttgttaaatgtgtacacacacacacatttaatggaaaacctgaatttctcccggagagctgatcctaatctatacacgtaaacttaacttgaaagaaacgtaagattaaatgaagctcaacttacaaagcctactccataaggaatttaagaattaaaatacatccgcattgcagtgggccgggtaaagcgcaaaggactagtttaaactcgatgtgtagaaactgcatggacacacagccttgccttggagcgtggactccttcccagagcatgtctcctgacgtagccacaaaggatatggggtagaacttgggacgagaacccccaccctatcccggaccccgataagttggagaacaccgtgggtaggcattttgtttttttgtttttttttgctggaggccagcggaccctgtggagtctggacatccggccgcaagccggcggtggctgtgcgaggcagagcgtgagttgctgctgcgggagccgagtctgctcacgcggtgctccggacgcagccggccgggagggtgcacggggcccacagcgctttgggccgtagcccgggctcgggccgcgggcgcgcgggcggcctgtagggggcagactccgggttgtgctctggctgggcgggtgggtggggctcgcgggtggctcggcgtgctgactcggggcgggacgggctgggtgagtgaggctagggggtggtggtggtgggggtgaggaagggaaagatgcctcgggcgccccccgccgcgcgtaaggctcagctcttacgccgccctgcccgcgggctccagcgcagtctcgagcaacaggttaagcaggagagacgtcagcgcgccccctcccctccccgcggccttcttttgccttgcgcctttgcaccccccatccgggccgtcacgtcctctctccgccccttgcccccagtggctttgagtcctcggttctcccccttcgcgagctgccgctgtctgttgtcattgtgacgtcacaaagggacagcccagtggaaccttcctttcctccgtgctgtcaaaagtcgggcgggaggttccaggcgctgcctgagtaggagctccgggagtgcggtgctgtgctgtgcggtgcggggcgtgggaggaggcaagggcctgtgagggatgtgcccgacctggaccttccgctctgagtcagtgttccaggtcccagcaggtgagcattgggaagccttttacccctcaccgagtgcccttgaaccttctcaaactacttaggggcaggagagcaggggtgaggctccttaacaggaatattttcactccacagttctaggtcttttgattgtgggacgtatcactgtaattcccactcacacccatgctagtgaaaggaaagaaaattgcatttaggaagagctttttttaaccttctatatggttggagtttgaggattttgttactttgttgcgttggggtgcctttccaggaggtggcatgataactttgaaggggatgttgcatagcatcagctgttgccttaagcttttccttgtttttgggcaagagctgtcttgtctgtgcccagtcatctgctccttactgtatcttggggactccggagaggaaggactccaaagagcacttgatttagagatccactgggcttagttcttaacagaatcagtggttcaaagtggaaagtcacagctgcttttgtcactttactaagttactgagattatgtgggcggaagatagaaaacagtgtgccgctgtaagtggaaggtggcattattacttgagctggctggtggaaggtagcatgcttcctgcaattggtctcaaaagctttacatgccttcgatttagtttattgccttagccaagagtttgagtgtgattgtagatggaaggctttgggagaaactagtattatatttcttattaaatgacatccttgagaacctcataaattgaaatataatcctgtcttaattgtgttgggcatgactcccactacagtaccttagataactggaaaagggtgcctttcagagccccaattcacttggacaataaaacagttgcatgtttcccccagtgtgtattttctgccatcattcctgtagatggttattcttaggggaagtaggggatgataaccaggccatttgatcttagcttgataccagataggagcagacacttcaaaatccaatgatcagactggtgttcaggatgactttagcagaatttgtacccctgagttataataatgttaaaaatagcacatgccatgacatcctcacatgtggaaatcacaggacaatgctgactctgcactttcatctttacttggtgttgaattcagaacttaaggcttgtttggaagactttacctttccctgtggacagagttgtgtcaccagcttaacctaatctgtttagggatcaagtttttcaaattcctctaattccagacttgtaaagtggagacagttaaaggtcatctttagttacatatccagtcccagttcatgcccttctgggctccataaaaaaccttctcaaacattccctgctccctgtgtggctcagttgttttgtcttagcaaacaggaattcctgttttcagtccctatctccaaatacactgggcccgatggtattgaattaggaggtttaaggaggagggtcaggagttcaaggtcatcctgttacatagcatgtagaaggccagcagctggaaatatgagaccctctctaaaacatacccaagactaccccaagaccgcagaaagggagttaacctcataaagttcagaaacagagttgtactacaattatagctgcaaataggtagctcagtgctggagtgctttcttggcatggacaaagtctcagggggttagatctctagcacaaaaaatggtcaaatgaaatgattgctgtcttctgtcatggttggtacacacctttaacccccagcactgggaggcagaggcagaggtgggcatgcatatcttagtttgaggccatcttggtttatacaggaagttccaggccagccaggactaggtagtgagaatgtctccaagagttagcttgcttttcctttgttaaataaacatggtggtattttacagctctgaagggagaattgaagttgttagttgccttgtttttccttttcccacatttataatactttacttgtcttggaaaatcctttcctttcccaaggagtctagggtggaaatgctttatatttggtagaatttagggtcttgcatgtgctaggaaagctgtggtaccaaacaaccccagttgtaggtggcagcaacgttggacacccactataagaatggcatacagaagcaaagccaggttgatgatgcgttaaatttaaaatggataataatatatgttcaggtgggttcttattttctgggttgtttataattaatatttcatgcccattgatgttttgcctgcatgcctctgtggatatcctgaaactggaattaacaggatgccatgtaggtgctgcaatgtaggtgctgggaattgaacccaagtcctggaagagcagcctctgctcttaaactctgaaccatctttcccgcctttattactcttttttaaagggctgatatttctacagatatatccacacaatctttttttttttttttttttttcctagacaggtttttctctgtatccctggctgtcctggaactcactctgtaaaccaggctgtcctcgaactcagaaatccacttgcctctgcctcccaagtgctgggtgtgttctaccactgccccccccccccaaaaaaaaattaaattatttgtatgtgtatgtgaggtggctctggatgctacctcacacataaggatgctagggcacagcttggaggagctggttctaccatgtggattacttgctgagccttctttgttgggagttgaatatttttgtctatagccactggcccaaataaccagctagaaatattttgtagttaagagggttactagatagatatttcagttcacatggttagaactgctcccctccctcccccatactgggtttgtctagggatctgagaggcccctgtaagtgtcctgattatttaaacttcaaaaggaggacatcttttagagtttctgtctggtttctgttctattaacaatagaactgtctcgaaagaggatgaggggaaaattatattaagtcaagtatataaacacttgttaaaggccaaactgggatgttttgaatttgttactttgtcttggtcatggtagtatttggaattaagctctggccatgttaatttaaagttagttgcagtgttcaaaccctactgatattattggcccagatctccccaaaacttgttagttctcctaactaacctgcttgcctagcctcctggccataggtgcagaacattctggttattaatctgcagcttctgcccagtgggcagctgtggggtgtgcctctgtcccctttggcttctacccagaaggcttgccaagtgtcagttgtttgttcccaaatctggttattccagttgggcttattcatgtaattacaattaaatcttatgtaaaccttgaaatgactgtgaaaacagttggttcaactttaagttgaatgctttggaggagacgtgataaaaatgctaggaaaaaagatgttagctatagatagatacgctggatgttttgacattgtggattcttcaggaacatggcattccactttggtggtggtatggtggactaagtcacacctccagtctccaggtcgatccctaaatgcccaggttctcttaatcaaaacatgtggcacaagtctgaaaggaaatttgtactcagaaataagactaattggatggaaagattaactgagatcccagcattgggaggctgagacatgagaattgcaatgattttaaaggtagcaagggctaataaagtgagagatactatctcaataaaagaaaacgattagagagaaaagtgtgttttatttatctttttagcaatacccctactattctgtaaattttttcctcctatattgtttcatgtaggcaagctggagtggaatttaccgtgtagttaacgatgaccttgaattcttgatcctcaagcttttggctcccaaagcaggaattacaggcactcactatcatgcagctaaaaaaaaaatttttttttttaaattttatatttctccctacctgtacacacatgagacaagtggtgcttggttggtgacaagtgtctttactcactgaatcatctttctggtcacatgcttatgtcctgtgttatagcaactttactgtctgtcccattagatactactgaccgtcttttccatttcaaatgcttaaaaatgtacatctgtgtttttaatttccttttgaatcagggtctcattctgtactccacacgggcctcaaactcatggtgagcctgtcttgattctaaatcctgggcttagaggcctggctttttgaaaagctaaacaccttcataaagattagtttagttttgatttgggatgaatcctttaggaagtgacttgttttgcttctggtgccataatcttgtctgcttccagtacttctcttcccgtctccccctttaagctagcttttctgtgtgttgtatgtatgtatgtatgtatgtatgcatgcgtgtatgcgtgtatgcgtgtatgcgtgtatgcgtgtatgtgtgtatgtgtgtgtgtctttaagctagcttctctgtgtgttgtatgtatgtatgtatgtatgcatgcgtgtatgtgtgtatgtgtgtgtgtctttgggtgtgagctatggcatatgtggagatcagaggccaacttggcagagctgtgttctttcctcctatgatgtggatcctgaggatttgaattcaggttgtcaggcttggaggcaaaaaccacctttacagtcttgccagtttagaaaacacttctagacaatcacaacacccacttttcttgaaagttttatggagagaaaacctagttaattctggagtaaacgtctcacattcatggtttatatagcaagctcacaagagaaaagaagcttttttgggagggtgtggggtggtttgtagacagggtttctctgtgtagccctggctgtcctggaactcactctgtagaccaggctggcctcacacttagagatctgcctgcttctgcctcccaagtgctgagattaaaggcgtgcgccaccactgccccacgaaaaggagcttttgaagccattttatagaagagaataccaaagccaaaacattgttcatatggtttaaaactgtcttcttgtgtttcaattcagatgaaatcgatattagatgattagtcagtactgctctgaagggaagaacagccatgaaaagagctgtcagcttctgaggaaaaggcctgtgccagtgtgcagtgggtttgtgcttgatgtttcttaggcactagatggtggagctaccttattgtcccctgtgtctgagtcctcattggaagatcacactcttacgtgtacctgaggaccatcgttggcagcagttctgcaggcttctagaaaccgcattggtgtcttgaggccctcacaaatcacccttggtaccatacctttccttgcacttgtactgttgatcctgacttttattactcatggcagcttgagtaataacaggaacattgggctggtgagatggctcagtgggtaagagcacccgactgctcttccaaaggtccagagttcaaatcccagcaaccacatggtggctcacaaccatctgtaatgagatctgactccctcttctggagtgtctgaagacagctacagtgtacttacatataatgaataaataaatctttaaaaaaaataacaggaacattactcaaggaatcataacataatgatgtgtgacttactgcattagaggaaaaccctactgtagagttctttcgttactgctcttttggccctgaactcctggtcctgtaggctcttgccagtgctggcattacaggtgggatcactaacctaaatggtaattaagtctctagtttagtaagtccatcaagctctgcagagaaaaattgaaatgtttagatagccgtgttaggaagttacttgtactgttatggctttgcctaccctccaggcggactggttttatgtcaacttgacccaaactagagtcatctgagaggagggaacctcaactgaaaatgctcccataagatcaaggatataggcaaccttgcaagggcattttctgattggttggggtggggcaattgtgggtgatgccaatcctgggctgatggtcttgggtgctacatgaaaccaggctgaagcaagccatgaagaataagccaatgtactctttcccatggcctctgcatcaggctcttgccttcaggtttctgccctgcttgagttcctgtcctgaccttcaatgatgaagtgtgtgtaagccaaataaaccctttcttaagttgctttggtgtttgatcagacaccaggtaaggcacttccattgtgtacactggtcttgagtacacacggggcttttccctagctttttaggaggttgggtggcagatagggtgtattgaaatagataggtttgtaggtattattgtcattaggagatgaccctctggctttctggcatagcaacccaggtatttctgtatttctctaattgaattggccagaaaatataggaagcctcttgacatctatcttactgctttcggtgttcccccaccccctccattattttctaatcaccattttgaagaaggctctgttctcaatgattagctaatttcttagttctcatctctaccagctgttaagtagtgcctgtttggggcagcactggtgccagggagaaatgaagggattggttagaactgagtatgtgtttcttgtagtcataccttccataggcgtgcagaccaagagaggctaaatgagtgaatgctcattctgtcaggcagcagtgttggctcttttatatgagttgttactagtatatgctggcttcagtcatgaacagcctggaatttggacaggcctactttgaatatatagggcacttagataatgggcaaatttgggaatatcaactgagttcaaattccagctcttaacctggttgtatgaccctgggcaagctacactacatggctgagttcttttctcatctggaacattgttgagtgtacttcataggctgttgctgggagagtcagggagatttttgatgtggaagcattttataaactgcatactgctgcacaaatggtcaaggtattattacacagttggaaatcaccaacttggagatatcaggcctgccagcagccttcctagctgactcagaaataaatctagtaaattcatagtgaacaatatatttagagtaaggctttttttttttttttgtatgtgagtacacatcagaagagtgcattggatcccattacagatgcttgtgagccaccatgtggttgctgggaattgaactcagtgcttggaagagcagtcagttcttaaactcttgagccatgtctccagccctaaagcaaggctttaaagatgatgtaacaatcccctagcccccattaccactttgcttttgaatgtctgttgtatcaggccaatcagcaaggatagattgagaattaagatcagagcagcacaaacatgtttaaaaggaatgtatgttccttgaacttgaaaatctgatcatggttcatccttctggtgactgctttcggtctcttgcatcaaatataaaccaacagaataagaaacctttcttgtttacaccatccagttaccttgcacctgtgcattatattctgcgtttagcaaagctgagcctcttaactttgcaagctctcatccatgcttaggcaggtggatttcctgaggagcccactatgttccctatggcctttaagctagactgccatattccaagaaactgactctgtctttccttgctgatgtctgggtgtgtgcctgttaggggctgagttttgtagatgctttggaccagcatatagttagtattcaaagaatttctttgtatagttcttttaaaaattttttttctttttctttttttttataacgtattttcttcaattacatttccaatgctatcccaaaagtccccccccccttttaaaaaatttattggtatatgtaagtacactgtagctgtcttcagacataccagaagtgggtgtcagattgcattatggatggttgtgagccagcacgtggttgctggggtatgaactcaggaccttcggaagagctgtcaatgcttttaactgctgagccatctcaccagccctatttgtgtagttctggaactttctgtataccaggctggtcttgaacttacagaggtacagactgtctctacctcctgagagctgagattaaagatgtgcagcttcacacagcattctttaattaaagcttaatgatggaatgtatccagtatctctgagaaggaatagatgtggaaaaagtggaaaaggaattcacaaattagaatttcagacccattattttaaagctgggaacctgtctattgacttaatgtcgtagaccccacactctagccagtacttgagagtggacagcttcttctgttgcttttggaaaagtgctccggataatttctcttcttccaggtgcattcttagtcatccacggtagctgaagtaagtgattcattttcatggaaaaataaaaattcatatgtaatccccttagctaattataagccagtagcattttttaccttgtgaaaaatggcttttctccttcatatgaaatcattccaatcagacaagtactcaaagataaaaattactgaaatcgcataccggatattctcccacttgtaggtgtataggctcattatgtgctttttgcacttctctcttacatcagttatcaaaatacaatgatttttaatgggtgtagacacaccattgacatggcttcacttgacctgttgcccccttgatggattttccacaggtttagtattgtaaaataaatgttttgtgtagcatgctttgtgtgtgtttagattcctcagtgttgtagaattactgactgaagtgtactctattgtcttctgggaggggctctgccaatttagggttctatgtaagggtgcgtgttaggcttttacaaagcaatatgggcctttgtaagtagtaaagatgtcagttgacttttatttaagtttctgttttcttgtctcagggcatttaggactaagaaatgtgaaatcactttgtaaaacaaaattactctaagaacacaatgtgttattagacagaaaggctttcttactgaagggaaggaggagagagcttgtataattgtacattttgagcatttatgaggttcttttctttgtgaatacgttggagatacttaagtaataaaatgacctggagtcatgttatttgtacctgtgatttttgttcctgtttctaaggtgggctttgtaccattaacagtggtcccttagggttgaggcttcctagcttgctcagttaaatacaactgagagagagagagcttttaatgtcttgctgtttgctctcatcctaagaaaatgtatcctttactaggaagcaagcatgtaaaacactaggaagagaacactggctttggagtcagattgaagctgaagatcttggctgtgtttagatgttggtgaccttggtcagattgtttactgctgagttctctgcttcccagtagggaggaagagtctcttcagcattagaggagggggatgggttaggaatatgtgtcagtgtatatacacgggagggacaggtaatctaagttctacaggtctgtagggcgcaactctacaaagattgtgtttctgagtcatcttcagctcttacaggatgctccagttgtttgaggaagaggatggaaattaatgtggctatttagcacttgcctttttcactaaggtgtgctttttccttaagtaatgggaaaattctgtgattgaatttttcttgctcctgcaggtttttgaggttgagataagtagctaagaagcaacattttttttttcttggtgtgtgtctgtgcccatgtccccagtcctattggactttttatatggaatctaattcctattccgttttacccaagttgctccctttctcattcttacactgcccaaagcagtaaagctctgtttgttctattttcagtcttgatgttggaggatgaaagagccaatgtgaatggaaagcatttaataagtagtcatggtctgggttcctatttaaattagtagcacatgcttttatctgccttgaagggttttggttatgttgcctggttgtggctggagctgtgacatcacacagcttggccctttacagatgctacatgattgattcctaatcagatgaggccctggcggacctggaacttgatctgaagatcaggttggcctgcctctgctcccccaagtgctgggattaaggtgcatgccacgactttaatgccagagacactgtggattccgttccttaatattgcaaggtttgtgaaaacagttaattgccgtgcagttacgattgcaggagtgttggtaagaaacagacagaccttcttatgagtgatcctcattattcctagttttgttgttgaacattaggttttgttcacttttcagctgtttacctgaagttttcttaaatttaagtagctttttttttttaaaaaaattattttttgtgattggggcttctgagtagccctgtctgtctgtcctagaactctgtagtctgggctggtcttaaatgaaagagattttcctttctgtgtctcctgagtgctgggattaattagtggctttcaataccaccgactgcttttgcttaccaattttttgtattgaaggctctgctgccacatctggctgaattacatacacttttctttgtgtgtgggtgtgtaagtggttgtctggtgcctgcagttgtgcaggtcggtcaaaggacagcttttgggaggagttggttctccttttgtgtgctttctcacctgggcactgaactcaggttgttaggcttgctggtatttagttgctttcacccaacttttacttagtaacagactatcaaccaacctacctttctttctttctttctttctttctttctttctttctttctttctttctttctttctttctttctttctttcgatgtacaatgttactctgtcctcttgagtgctgggaatgtaggtgtatgtatgccaaatactaagatgtttgcctctttttttttggatatattttatatcagaatggtagttttatttatttatgtatttatttattttagttttttcgaggcagggtttctctgtatagctctggctttcctggaactccctttgtagactaggctggcctcgaactcagaaatccgcctgcctctgtctcccgagtgctgggattaaaggcttgtgcgaccatgcccagctagttttattattttttttatgtatttcctacatgtcacacattttccctaaaagactgtacaacaaacacagtgagttgtcatcccaggaacaatttcttttttcttaacctgacaagttcacttgacatgcaaatgtgacacaagattaaaatgtggatcaggagcaacagttgccctcaaacagtagtattggtgctgagcagctttaaacgttttcttttcttttttagttgagaactggactgtgtttaacttcagctgtccttgaacttactatgtagactaagctggcttgaaacttgcatccatccacctgcctctggctggaagcaaagacagtgccaccacacctggtcccatttataagtttttgagatagtctttactggtttgaaactcattttgtagctcaggttgctctccagactcgcaggctcccctaagagcctgctttacaagcatgggccactgcacttggctagctttgaattctgacctacaaactttgctaagtagtattggtattgacaccctgacagcatttttaatcttcaagaattttaaagattcatgaaagtaatccttagtgattatctcctgagggcagagatcagatttccgtttaaatgctgaagcggtttatcactctccctcccccacccccccaatgcagggggccaggctggatctggatttaataatgaacttctgaagtccttttagcttggctgatgttagtaatgttttgtgtctttaaaaatgttttcaatactcaactctgtattgtaatcttcagaactactgttaggattccaaaccactgtggtttgaagctaggttggaatctgaaaggtggccaatgagagtgagaagaaaacttcctttaaatacaagatgtgtttggcttgagcttttctgagtctgggctctgggcacagcttagctttaggtcaagtcccatggttgaagaaatcaggggatacgttctctttaccctctgctcccctaagcaaagcaaaactaaaactatgactacatcactcatttttgtgagttagttgtgcagaacttcaacttgatgagcttggtgatgctatatgggatttttgtctagatcataactaataaaatgggttttcttttgggtttggtaactggagaggatcaagatgtttgaggaaaatgcatctgatttggaagtatctactctaaagctttgcttttttttcttttcttttttcttttttttttttaattccccgttcttattccactgcctgctctaattaagtgatgtctggcaatccccaaactgacgagactgggatgaaacatagtctctactcatttagcctattttcctctttcttccaggagactcgctgaacttgtcatgtgcttcttagcagagtttattggagcagtaggcaaagcttcctgggaatataaataatgatgattataaagaacagtcagtttaccagggaaggccattatctttgacttgcaaacctcttacagctagtgttttgcttccagttgtttaatacaaataagcactgtagccttacctcttttaaggaggtgtccttttccccctttgtacatagaggtcattcctgtaaagaacagaagatgtcaccttggccaagcaaacagcttgtttttctggacagacattatataagaaggctttgctaagtgcttttcaaggaacaagtgtctgggtgccttcttgcctgctgtcacagcagcaaagaatcttctgtgtgttgaatgctaaaagatttgtaatgccgataagtaggaatttactttaacagttaaaaataaaaattcaggatggttttaagttaatctgaggcttgttagagtaggccccgaatgactctctgtgacaggtagactcccctgctctttatgtttagcacagattacaacttttgagtaatagactaaagttgctgcttactaaaatactttcgttaatttaggccaaggcacagctttcaggagtccattttgtccttcttccactgtgtgggtcctgggaatcaaaccttaggtccctcggttccagtttgggaaaaaaaaaattttttttttaaacctgggaagccatttcttttgtctctgtaaaattgcagtttttgttggggctgggggatacgtttttcctggtccttgtttgcttttctgttgctctaaaaacaaacaaactgaccagaagtaaatttggggggagaaaactcatttggcttctatctagcttctcctatctccaccttcccagtagctgggagtgtaggtatgcagctgagctggggtgtcagcaacagctttacatttaaactttctgttagcactgagaatgtaatccagggcccaccttctgctgggcaagaaaagaacccttagcgctgaatatcaccccacctcccgctcagttctctttttaggctttccttagcccagaggatggactcctgattcttcctcccgaccgggaggtgatctgatcgggttgcagacatatgacagatgttggggatggaacccagggctttcttgcatttgaggtagccattctttcatctgagagccctaggccagcactttgagtactagactgacctttgcttgctgtgtcttttacaaattgccaactcttaagcttttcttttgtcttgtacacagttctgggcagtcttggtcctgcccccatgtctgtggtattttaaaccaagatgaggcatctcagtcttttcctatataattttatgtgagtgtaatgtcttttaaaacaattctgtggtttgttagtatattcagttatacaagtgtcagtgtggtcaattttagaacattgcagcactccacactagtgcttacttcccacccacttcactgagtttcccagcctctgacaaccactaatcttttctgactctgaggagcatctccgcgccccccccccccccccgccccccaatacttgacatgaatgtgtcaagtatgtggcttttgtgatgggctggcttttttcatgtaataaagatgaatctcacactgttgagtattcttcaaggtttgatcccattcatagtgtggatagatacaccacatgtttattcaactgtgctgattggtttttatttgtttgttttgtttttttggtcaattttacacaagctaggattcactatttacctgcctctcccctccacccccattttctttctattcttttttttttttgggatgaatcattatgtaaggctgtcccattgtgagcggccccacctctgcacaggtggttctgggaaccatgagcctgagagcattcctcccccatttttgcagttgccttctccagcagatgtcctgtgacctgtaaagtaaaagaaccctttcctctcttatgttgttgttggttttttttttttttttttttttaatcacaacaccagaaaccagactaggaggatacatttggggttatgtacacctttttcctgttgtgtgcaagcttttatgtggcaataagattgatagcatttgttagaaaatgcagtaaatggttagaaaaagtacaaaaatgctcattatcactaagtctatttactacagataagttatttctatacttgccttaaggccctccacctctggggttcagtgggggtcctttttctgattggctgccactgttttttcttaaattaactaattcattcatttattgagtgtacagtggaagaggggaagtgggtcaagggagagggagggccggtgggcagtccacccttccatgctgggagaatctttgggaaggaaggcagccagtccctccaaatggtgcttcatcaaaatagactttggttctggcctccatttgattcccaaagggcagcctgggaaccctgtctcactgtggtctaaacccagcgcacattccctattaattggtgagtgcttggtgaattctgcttcacaatgatagaggaactgacatcaaaggatcaaaaagctacgttgctatgggcacttggccaccattagccaattatccctgtggcaacttttctgacacctcctaccttgttcaacatgccagagcttaaatttaatttttatttcatgcgcattagtgtctgagggtgctggatcctctggaagtggagtcagacaggtgtgaactgtcatgtgggtgctggaaattgaatgtgagtcctctagaagagcagccagtgctcgcctctccatccctcttcactctcctccaaaacagggcatctatctctgtgtacctctgtatatccttgaaggcaattgtagaccaggctggcttcagactcagatccaccttcctcttcttcccaagagctgggattaaaggtgtgttccctacttggctggttgtcacttttgatttagccattattacttcctctgcccatttgtgactttttaaatttattatgtatacagatttctgcctggatgtacactggcataccagaagagggtattaggtcacattatagatactgtgagccatcatttggttgctgagaattgaactcagaacctctggaagagaagaagccttaagctctgagccatctctgcagcccctcttctgtccatttgtaaactagtgccatttacatgtttatgtagaagaagccctatattcccttgcttagtggtggagtttcatggttcatcatgggatgatttgcttcatgtggctcagatttttttgtcctgtagtaggttttcaaatgagtagttacctcaaatttctggttttcaggtcttccttcctaaacggtcctactttgggtaaaggacggacacacccacccctcaacacacaaagaaaacacacaaagtttctttatgtacctctggtctcctggaacttgttttgtagaccaggctgaccccagggagatccttctgaatactgagattaaaggttaaaaatgtgtgttaaattttcttggtcctaggctggcctcagatttatccagttgtgggttaacaggcataagccaccacactggtctcatttacatttttatgtgggtagtgtcaatgtgctttgggatgaagagttaactactaagaatctctgagaaaatgtgtgtgcgcgtgagagtgagtgatagccttaaacaggccatcctgcctctacctcccagcctgctaaacactaagtgcttttcatgataaatgtaaaatgaaagatctttgaagaggtctggaacataattctttaaaattctatcttctgtatgtgggtgttttgcctgcatgtatgtgtgtgcctgtagaggccaaaagagggcatgggattccctaggattgaaatgacagacagtattgagcttccatgtgggtgctggggattggacccaggtcctctggaagatcagctagtgagagcttagctactgagccatcctggctgctctttaaaaaaaaaaatacttctgatttgttagatttattcttatgtgaagttgtttagatgatatagttagttgcttattggaaatgtgggttttgctcatttttaagcactcagaaactaaactaaagcaggggcaacaagagaagtggagtgggaaatttgcagatgactggtagagtgacccccatgagattggttgggtagcattctgtcaaggttggagggtacctagtgtccatggtgctaaggatgtccactctttttctcaggattcttgttggtaggaagccaaacactaatgggtctatgtttggaaagttacatgttatacagagtttaagttcattgtcaaagtattttttttctttctaatgatgttaactaacttcacatactcccctttgtctgtaatgacttatattgagttctgttggaaggccattaatttagcttacctatttattgggtgcccacttcaacttagaagttagtgtgtccctgggtgtttgtgtgtctaagaagttagtattttaagctgcgttaactggaaattatgttctgctgtgctgcttttgtgtggcgtacctatatacatagttgtatcatctggaaaacagccgctacatccctcccactaaaattaaaattgcttattagagctaattttagaattgagttagaactgccctataatgtaatgcagactatttcccaataatgcctaggttaacaatgatagtcttgctgtattgtgcaaaaaaggcttctgttcagacccagctgggtttcaggcttaattcattgctctatggtgggatcaccacagctgctgtggggcctttacaaatgcaaaaaagctgtcagtgtttgtttcatcagctgcataagtgatgaggccaagttgaggaatccattccagtgcgcagtgtgcaggctgtagccattattgtttacagaattagtgtgttggagctttaaaatagttggcacatcatctgccctttaagaggcgtagactaaggaacctgggacagttggttgtccttgtagtgcttgtgggtcccggtcctggtcttttaacagggctcttgtcttaaccccttcccatgcagttagagtgctcaatttttgtcctagatttaaaaggcatttatctagaattttgcaattgacttttaaagtcttaatcatctcacagctccaagtaggtatgactgtcagccgaagcttaaatagtactcaagatttagccttgtgagattgaatttgtgatgtgagacagctttgggaattgctttcttttcagcaatctagaagttaggaccacttgacatcagacccacttggtcaggacggtttctcttagttacattgacttcttcaagtcctgatagaactatgggtccacgtccagtttttgtttggcaaggaggccttagggaccagtatacatagtttttcattgatatttctttcacatgacagtaaatgttcctccttatcttcctgtgtctctgccccttgaaggcctgagccttgctatgcagccttgctttgggtttgagaccctccagccctgtggtattgggttgaccataggacttcatacattccagaccaacctttaacccattcaacccattcagttctctagtctttgtaaatgttggagggcatggctactctgccccaactgtaagaatatagctttttaagcctcttaagccaactaggatgaagaactgtgtttctatattttattcccagttgggaaggccacaatagtgctctcccacattacagaaggatgtcacaatcttgaggggctccaaaggaaaggtcagttatcccactgagctttatctggaataacgatcactcctgcttaccaaataaaccatagctatacccaggatctgacctattcagtgggttttcctacagtcaagtgaccctagtttctggattcctgagcagagaccgtcttaatctctttgattctaggaagtgtttgaagcctaaaaggacagttccacatggtgggctgattaagcagggtttggggtaagtaagtccgtgcttggccataaagtattccttaaggtggtatatatgacatgtatttatttacctctcagtcatagacaacttccaacagagaacaaatacagatagccttctaacaccctttctcatgtgctcactctgaacagcagtgatagaaacagtgctggccacatctcccccaggggaaggactaattttacagggccccagaagggaacagcagtttcatggtcattgttgttagcccctgtgcagtacttggttgcacttcccttgcttgacccgtttctcctgctttgggtgtttcgattatatttttggggttcagaattcttatcaaaagcccctacttttttgagtcattttgagacaagtcattttcttgtgatggcttgaaaagttgttgtacatctttggtggtttaaatcttctggtgaggtaagcaaactgagtgtgtgtgtctgtgttctggtaagtgggcagtttcttcttaggagcacagatctccctggtggcttgcttcctagaaaaatgtgctgctataaatgacaaccttagtccctgtcaacttaatttctgcgtgtccatgaagtatgttatctttgacttagattttggagtggggcctccatccctgacagaggtgctctgaagcatccaactgacctccaccttcttcagcagctggtttcttttctttttcttttaaaagatttatttattatatgtaagtacactgtagttatcgtcagatactcaagaaaagggcatcagatttatggatggttgtgagctactatgtggttgctgggatttgaactcgggaccttcggaagagcagtcggtgctcttaaccactgagccatcttgccagccccagcagctggtttcttaaagctgctttgattggtgtggtttactgcttgttggatggcaaaccttatatataaatcctccttgcctataggcagaaacagtaagttgagtactctgcatataaacaataatacccagaagatattcttgtttcttggaggttacatctttgctaactcacaagagggcaggtttcctattccttcattcttgttgtgtgaagtagtctgaggtccatttgtggggaaacaagaggtcggggcatgtggtctgcagtggttgcttgagaggagcccgaatgtgagctagctggttgtaagacacagtaggtgctcagtagaaaagtgtgctactctgggcggcagcggtggtgcacggctttaattccagcactcgggaggcagaggcaggcggatttctgaggccagcctggtctaccaagtgagttccaggacagccagggctatgcagagaaaccctgtccaaaaaaaaaaaaagtgtgctactccttggagggacatttgttgtaaaaattagttcaggtacacagttgttaaatcagattttaaactatatagtacattgcagatgaagttggaactctgctgattgtagtcagtgcctcccgagtacaggtcaatcaggtgggctgctaagggtacaccttggttgtgtggtagcgaggatcttaggaaggttccagctggggagccagcccacaagctcttcactctccacttacctgaatgcgtgatttctatctaggctgtgtgtacaatgatcctaccacttgtgcattttatttacattcttgagggtgtgtatgtgttccttgggtgcaagaataaactgaaattcactaaattctgtaggagagaggcaagttggtttcctgagatacacattggtagcctttcaaagtgttgatggcttagaatttctaagtttctcagaggggatgtttagtagatggaatatacaatgtataaagcagagtcctccctgctgcagagggtggctgggtagctcatgggacacttgtttctaaggagcctttttactagaaattagtggtggctaccttttccctctggaaaaactagcacttaaaccctcacagacaacatatcttgacctaaatgagttttctataaaagaatagagctagacttttttttctgatagctttcaaaacatctgaaaagctcatctctgaactttcagctgttgacagtggcagttatcctgctactgctaatagaaaataaaaagttcatttgccacagtgattgtcatttccttcttaggagcgcagcttaactccaggacttcatttagtcggaggaaaatggttgctacctccctgttaagctgttttccattctccagttgtagcagaaagactgttggggaggcctggggagctgggggtcacataaaggaagactaagaagggctgctgcagaatgtgttcttctgtctggaagcctgtgtggagagggtggtagctttagaaaagggggtgaagtaggagggggcagcagtcgctgaagcatgacaagcttccaaaggccccgggacttgaacacaaaaaagagagctttttgcagctctttcactgcacttgtctccctcagctccatccattctcccctgctgttttgtaaatctcccagttggaaatttctaacctgggagagcttcttcccggcttcacttggcaggatgctcacacgcagctgcaaggaatttgcttttccttttcacagcagctctcatttaaaagcattagcgagactacaaaacaaaatacaaacttgaggatttttcagaagtggaagccaagtttaattaaagtcaaggaagttgggggctataactcttttgtgaagcctcttaaagtcagatgtgagcgtgtgccagtggaaggcaggcaaggtgggaaatacccacgctggtcttcgttaagaaatttaaagccttgcttgtttggggtatgcttgagggatatcctagaatttatcaaaggatatgcagagccatcatctggcctaagaaagaatatttactagtgggtcagtagtggtttctcccttcttgttggaggaagaacgcctgtaatatctttgtatttcttagccctctaaaaaacctcctaattaggtcctccccttccatatgatcaaaccactgggctggaaaaaggtctaataaaacatcatcaaaattttctcccttgccatggtggttaagctcattgtctgcatttgggtctctaccagtgtgctaggccgacctcaaactagtaatcctcctgcctctcagtgctgggatttggtaggtgccaccattcatatattcatatatatattaaatctgatagtgtttgggagtacccgagtcctctattttggaaggcagtttcttaatctaataagagacagcatagttcattaggtcccaagaaaattacttcactgggcaggaggcggatctcagtggtatacagaagcttgtgctacttgcagggttcagttccctgaaaaccattgatgaaggcacctgtaccagaaatttagcccttgggtcagtcagtatctggaaatgtcttagttgtgttagatgcttggtatctcatggacagaagatgagtagtcttttgagtatttgttgaaattgcctggagtttagttttgacacgaaattggttagtgttattaacattccttttatgagtaaacatcggtagctagatacttgtgtttgcagaagggaacatcagtgtgtttagatccttgtacctgaggtttaggatttgttaagggtaatttttggattctaaacttgatcctgcttgttaggtaggcacattaaaaacaaatcaaaacaaaaaaacaaaaaacaaacaggtgtagaattgattcctttattctaggcaagcatggtaccaaggcatccttaatccttgtttgtctcttttgttggtaggtcactcattgggtcttctttcccatgtttgcctcaaccagagcatctttgtattaattattagcaggggttggtgttcctaatgagacttttggaggtttttgaagtagttgaaggtgcagtctggtgtatttttgcacatttgatcaataccatttagaatcaggttcttgactggagggagattctgaaattagacattggttttgaaagaatcatttgtcaaataagagtaacgaaagtgagattaaaaaaaaaaaaatagaggccaggcagtcgtggtgcacgcctttgatcccagaacttgggaggcagaggcaggcggatttccaagttagaggccagcctggtctgcagagtgagttccaggatagctggggctacacagagaaaccctgtctccaaaaaccaataaataaataaaacaaaaaggcaatgtaagggtgtcaaaacccatattggattgcaaggcctaaggattgtttttgaagccctcttttggaaaccagatgtcctagttagttgtgtgtattgtagtgttgttgtaatgtccttttcctagcattctgtgtaatctcgttggacatacacagctagcaatataaaacttcctcagacagtctgtctgccagatacttcctatcatgggtttgaatgtgcattttgtaaatacattaaaagttaaattttaccactaactattcatggcttaccattatctctgacttacctatttcccttacattacagttgtggaaacaaggctaaggaaaggtgtttgtcgccctgtggtagtttcttaatgtgtctgtacgaggattccattggcttggaaacattacagtgttttggtcacctcataccttgggtttttttttttttctttcttttttttttttttttaaagttttataaaacttctgccaagtgcttaagattgtcttttaaaatttctgtttctttcatgtgtttgagtgttttgcctgtatgaatgaaagtctgtgcatcacaggcctggtgccctaagaggccaaaaaagagggtgttagataccccagaaatggaggtacagatggttgtgagccactatgtggctcttgcttcaccctgctcgctctgcgccccccaaccccccctcccgctccagcccaaaggtttcttatttcttattataggtggttgtgagccatgtgtggttgctgggatttgaactcaggacgtctggaagagcagttagtgctcttaaccattgagccatctcaccagcgagtacttttaaccactgaggagcttttcagtcccacaattttgcaatctttactctcaaactttgccgaatatctgaagatggttttgaacacctgtctctacttccatgagctggaattagaacatgggctgttatgttcataatgtttgtgtttaaaccaggtgcagagaagcaggtgggtcccacctagaaagtttgatgctactttgatttatattggccagaaaggaacccataatgagactgtccctgcccccaaatcctagagaaacaaaaccccaaacttttatcagggtacatttcctgaagggtgttttttttttagaacttgggtaaattagtcagggcctgggctttgagtccttaaagatgtggtttttactttgataatatgctcaaaaaataaattattgttccaagcaccacacacacctatgcgcatattctcattgatataacatgcatctctttctctctctctctctctctctctctctctctctctctctctctctctctctctctctctctctctctctctctctctctctctctaacataatctgatttgtgggcagggatggcttggagttgacagagagagatctacctgcctctgctgatgtacctctggcttgtgcttgctgaggccagaagagggcatcagatgctcaggaactagacacacttactgacagctgggaatctgctctttgggtggctgggagtagaagagtaggagaggcaagtaagtattcttaaccacagaggtaaggtgctagatgatccctggcactcgggtttgggtggacctagggagaggtttccactctgcctttccccaaaactgattgcattctgagatctcagcattgagacccttaaaaagctccacctgcagttagttagaaacttgttgtcctgtgggagtcagggagaatcctccaccctaaaatattgaaatttttattaaaatatataaatatttaaaattttgaaatagtggtctctgggaactggcattaggttacaagttgctagtattggattgcatgaacctttctagtagtgtcttatgtgatagaataaaaaatgggttttctgggttacttgtctgactttggttaatagaccagaagaacacagaatgtttgcttggtgcctgctaggagtttggaccaccccaggacttgggacagtagggaaactggcgcttggggtgacaggtgaagagaagaaaaccttacccaaaaggaagtatcactcttgtttgtgctcccctccagatgtgtgtgtttgtgtgttgggggggtggtattatatttgtgcaagccagagatcaacattggtcgagtgtctctagccatcagttttatttttagagattatgatctcattgagcttagatagagctcattggttaacaagattggcttgctagccagttggagtactttgccccaatttctccccagcatcttagttacagcaccctagactgtccaatctgtgtgggcactgggggtctgaactcagatcctcacactttcaaagcaagaactttttactgactgagctctttcagttctgaacatagagctgttggtgggaaatttacctgcacagcttcttcattagacactgatacttgttaatttaaaatccgctgtaataattggaagcagctgttgtttccctgctgactaggtgggtgctggagtcatgcttttgaattagctggacttggactgttcgtattttaattaaagtcccattttatcactttctaccgcagtttttgcctctccagtgacctggattctacagtaatagatttgaattatatgaatatctcagtagaaaggtatataatcttaagttcaaggacttgcagttgatgttcttattaaatagtgaatataatagcatggtgattcccttttcttctctgaaccttgcttctatatctatttagtctttctatttagttgatactgtcttatgtggggatattgatgtattaacctaattgcttctgtcactgctaccagggaagtcactgtgtgaaacgggacagatgattttctgcttctctttgcctaatagagtttgtacattaagttatgaataatggggtttaggggtagtggggatactttttttttttggttttcgagacagggtttctgacagtgctgagattaaaggcgtgcgccaccacgcccggcttggatgcttcctttcttaaatggagaaaacccccaattgttggagagaagctgcggttgagagctgtgatgcgtcctctgtttaccccgcagcttaggtgggaaggttggctggaaagttgcatgcactctttctccatgacacgagcagggaagggatgtgctgccttctcttcctcttggatctaagaaccgatcctgggtgaaagttatgaggaagtggttctggttaattttgttcttccttttcccttgagttttgcttttgcagacttgtaggttagagcagtacagatacattaggatccatgtggctgttttgaccaggaatcaaggattcctggtctatgctccatataggagaggtctatggtctaatggtttggcactgctctatactgagcgctgggagtggaactggagaaactctgagccctgcttatatataggtttagtcagttgcaacagtgcagcaggccctgcacactgctctactagaagaagttgctcaatggtgcacaaactgattgattgctatgcttaagtagaggacatgtggtgtgtcttgtgctgtatggaatcctgttctgagtctaaatcagcagtccttgactacttataacagcctcttggaactcttatgaaccatgaggtcagaaaactactactacaaaaaagtcatggccaatgtttcatataggagagcttttgagtagagttaatactgtagcacctcaaaaaataaataaaacagaaaacagcagtaaaaacttgagcaaatggaggaaggaagctccatcatgacactgttactggccagtgaaagaaacagtgtacagatgaggagggagaaggtctggggtcccttgactttaggagtggttggactaggagtcgattaactcctttgtgtagagctctaccttaggacttaagtttagacctgcttgaatggccttattttgcttgagattttcgtatagaactgaccatgaaatgggctaggtagggtggaaaatagtaaaagttatttttttttcttttttctttttctttctttttttttttaaacatggaaacaagagctggtctctcagtgcagagacccagaattatataaagctatttttttttaaagatttatttatttattatatgtaagtatactgtagctgtcttcagacactccagaagagggagtcagatcttgttacagatggttgtgagccaccatgtggttgctgggatttgaactccggaccttaagagcagtcgggtgctcttacccactgagccatctcaccagccctatataaagctatttttattggatattttctttatttacatttcaaatgttatccccattccgcccctccccacaaccccatccctcctccctttgcttctgtgagggcgttcccccaccaatccacccactccagcctcctgatcctcgattcccccacactgggggccttcataggaccaaggaccgaccttttctcccattgatcccccgacaaggcgtatgcagctggagccatgtgtactccttgattggtggcttagtccctggcagtgaaaggtatttcagctctagtatagagagggctttccttgaagaagactcttaccctagagtaaggatcccagacttgctttttactgggaagaatgccaccccaatgaagcatgaactggaggtttctagctgtcgttcttaagtcttggctggggctaggattccccctatggtgtgggttatttttaactttttataatcttaggaccacacaataagtaaagggggtaggggcattcacaaaagccatgtcaaggacgaggaagcagaaatctcagatctgcaaagaaagtgtgaagagggaaattgctttaattcaacccccctcctcaacaaatgatgctacatacataatgtaatctgcctgtctgtctgcctgtctgcctgcctgttttagacaaggtcttaatatgtacctatggttgtccaaggactcactatatagactagtattacagaaaagcgctaagccattaggccctgactacctgtttattatggacaatagcctccttttctcccctccactattcatttaaacaccttagctgtggccctaaatgtttgttttctggtgcatataaaagaagttctctagtatacagacttaacatttaaagttcctggtcctgggatgtgtgtgtacacttcaacattagcaaccaccagaatgacttgtgaaatcacttgaatcctgctagttgaagcacttgaatcctgctaggtaatacacatctttgcctaccgtgtgagtgtgtgagtgtgtgagtgtgtgagtgtgtgagtgtgtgagtgtgtgagtgtgtgtgtgtgtgtgcgcacacgcacgcacacacgtgcacacacgtgcacgcacgcacgcacgcgcatagtgtataaatttgttagagacagatacttctttgtcgtcctgggtagtttggagcttgcttccatcctgctgctactgggtcctaagggctgagatataggagtgccacctccatccattttctatggtagtctgggctctgaagtcatgaatatttatgccttaaagtttcttcactgcaaatttaagagagcatcacttgcactgatgcactgcctaagacactactacgtatgcagcagttctgtctcctaccccgtgtgtatgtctgtgtatcaatctcctgcatgctttgctgtctgcagagaccagagaggaaatcagatttcctggaaccagggttagagttgggtagccgcagtttgggtgctgggccttagttatgcacactagcactcatccacctgcctcttgtagacttgactaagctcactcacagagacctgcctgcctgcctctgcctctgcctctgcctcctgagtgatggatcaaaggtgcagaccaccatgcctggctggactgctcccccccaccccccaaagtaaatgtaggtctcagctgcagtcatgctgagtctgtttgcttaagttaaattcccacctgagaaactcgatcctcctttaaaaggaggaaaaaaacgtcacaaatttccacttcagggaaaaaaaaagatttaggttttagagactcttgttcctatagggtttttccttttttcctttttttgtcttatatgctaaatatgatcataaagattaagatatcagtgaagaaaacatacatattattcatattcatcatagtgataatagtgacacttcttgaaatttcttctcagtcaaaaaaatggccagtcaaggtggcaccttcttttctttctttttttttttttttttaagatttatttattgattatatgtaagtacactgtagctgtcttcagacacaccagaagagggagtcagatctcattacagatggttgtgagccaccatgtggttgctgggatttgaactccggaccttcggaagagcagtcgggtgctcttacccactgagccatctcaccggcccaaggtggcaccttcttaatacttgtgtattaccaggtagaaaatccaagctggctcatagaaggtactgaggaagtgctgttcttgttttgttgtgcattagctggtgttaaagttgtcagggtcagtgaactgtgaggatatctctggtttgtgtcaaatcgagaaagagtagcatacaaataccacatttggggaggcacagacagcttgggtgcatggtttgcaaaccactaattattccattaagaaaactttgtttgtttttgttcatttgtttttttttttgtacacagtttatctgtcctggaccaggctggccttgagctctcaagagactggctctatgtgggattgaaggggtttgctaccaccacctggcatcttcttttctattttctattcaaaactttcttattaaaagtctctggtttgctctggtttgggccgggcgtggcggctcacgcctttaaccccagcactctggaggcagaggcaggtggatttctgagttggaggccagcctggtctacaaagtgtaccacacaacccccccccctcccccaagctgaggaccgaacccagggcctcgtacttgctaggcaagtgctctaccactgagctaaaatctccaccccgtcttggtgtacttttaagaagtttaattcataggatatggtttaagatatagctttgtttgaaagaaatcagttgggaactcattatgaaatgaattaattttaaagttgaatccactatcaatttacaaaggttcagagcaaaatgtacattgaatgttctgtactccattcctttctcaagagtagtttgcctactctcctgcatacttttgttgtgtttaaagagcatgctcacaggtttttgttttggagatagcctcaaattcagatctacccgcgtctttctcccagtgttggttccaatggtgtgctccaccacccctggcagaagcagtttgtctttgtggacacacacacacacacacacacacacatacacacttgtctgaaattgtagggcattggtctgttttagctttgtctcactagtatcctgaggcttcttcatgtcattgtttttcctgctgtgtagtgtctgattggacactacacatttggagtgtatttaaggacttaatggtttctttcctaaggacttttctaagtccctgcatataggacatttagattgtttgcactgtttggattaccttaaaaatgaaaacagacatcttccttttttcacacacgatatgaacataggtttaattgtaagtacagattcttttctcaattgaagatttaagcagtctacatattcactaacttctctctttaattttttttaaaaaagatttgcattgtgtagctctggatggtatagaactggccttgaactcacaagagattgctgcctgcctctaccacttgaatgtaaggcacgaccatgattggtccagtgttcactagtattaaaggagagtctttttctccttgtcatcatctactgttttacagctttttcagaaaacagatttgatatttgtgtgtgtgagttggtcagttgtgagtcagttctgtgctacctgtcagttctggggaatcagactcaggctgtcaggctcagaagtgagcacccactcctgtttagctacctttatgaccctgttctgtatttttgagatagggttttatatagccaggcaataaccctttatttttctgcctgtgcctcctgagtgctggcattgtagacattcaacactgtaaactttgacaaccatctttatgctgaatacatattcaaatagtcttaagttttcaatagttaaaacttttatattgtttttgtctttgcttagggctactgttcttatcatgaggatataaaatattccttagagaatttctcataatttttcctatttatgtagataacacattacatggaaatttatttatagacgggtctcactatgtagccctaactagtagctgggtgaacagaactttgctagcacatcaggacttgtggtccttcctcagcaggtgtggtggagccacttgagaattggcttagatagagccccactcatgggccacacttggtgaagtctgctgtatgtgttgaatgtagcaatactaaggtgtatatatagaggactaaccctgagttcagcgatacaaagtatgcttagcatgaacaggaccctggatttggaccctagtaccgattccaaccccaaaacaaaactccctttatccatgatatttcagaaaaataacacttatggatgctgctattaacctaacctttctctcccccccccccctttttttttttttccccagacagagtttctctgtatagccctggctgtcctggaactcactttgtagaccagcctctgcttcccaagtgctgggattaaaggcgtgcgccaccaccacccggctttttttcttttcttttcttttcttttcttttcttttcttttctttcttttcttttcttttctttctttctttcttttttttttgccatttactgttgtcagttttcctttcctttcctttcctttcctttcctttcctttcctttcctttccttctttaaagaattatttacttattttatgtaatgagtatataagacacaacagaagaggacatcggatcccattacagatggttgggagccaccatgtggttgttgggaattgaactcaggacatctgggtgctcttaccactgtgctatctctccagccctgtcagtttattttcatcatgtgattaattataatacaggaggtggttgtatggtgctattctccaagcataactgctgtcatcttcatcaaagcagctcaagatgtggcctgttgattcataaaaagaggggcgggctggtgagatggctcagtgggtaagagcacccgactgctcttctgaaggtccagagttcaaatcccagcaaccacatggtggctcacaaccatccgtaacaagatctgactccctcttctggtatgtctgaagacagctacagtgtacttacatatagtaataaataaatctttaaataaaataaaataaaaagaggggcaggagaatggtcaccgaatcctcctcacccaggtctttcttaaccccgtgccttccatcttgctgtatataatgttgcgctaattgcccatggtctcaaagtctttttagtgctatgctttggagtggctctgactccttagtcgcccctcactcatgctctgtaagtgagcccattcaactcaatagttttccaagtttttctcagttgagtcatgttggtcccctaaggaaagagtttctacaacagaaacttcttagctagacttactgtgaagcaaagctaagcttcccctgatagaggctgctgtctctaccttcacatacggacctgggaactgctttgatccctcagaagccagttttagttctctaacttactttctagtaaatgatgtcacagaattctaggataatttgtgatttttcactttggccatcaggttggaacagggctgtgtatagtctcagttgctgtaccttcttgcatacaacaaatgttatttctagctacacatccctcttcaagtagatcttatggcaacaaaacaattcttaagcctttaggattgcttgtaatggattgttgcggtcataaaatatacgttaggcttcagccatgcatttaaaccctcttgagtgaacaggaagcaggtggacactatttgattcattctctctgagcaagaaatttcagggtctcccagtccagggtttcataatgtagcctagatcacaggcgatcttcctgctgtagcttcctgtaagtgcttaagctgaaagtctggggagatgaaggaagtcagtgaaggaagcttactgtgcaagcatgagaaatagaatttgaacctctagtaccgatggacaaaaagctaaagctggggttaacagggcttccctatattttagttcttggagagatgcagaagtatcgcacgtttgttgggcagtcagtctagctaggtttgtaaagcgagttccaggacagccaggacacagaccagtctcaaaaaacaacaaaatacaatttgtttttgtgagcatgtgtgcatcatatgcaagcaggagcccacagtttagcaaaaggcatctgatcccctgcacctggagttaaaggtgattatgagtagctatatgggcgctgtgctcctaatcaccaagcagtgtttccagtctcagactttaccagtttcaggctcactgagtactttggcctggttatatgtgtcatggcatttggctacttcctatactaggcgaggaggccagactccatgatttggagcaccaagtaagctgagcctgtctgttgctgtttgttgtctgcatagcaagatgtagtagtcaggttttctcaaacttgtgtaatgtgatcagaaatattcataaagaggatgccctatagcttaggaaggaaaatcactctattcaagggatgaagctagctaaaaggcctgcacttgcaaggatcagaataaacactaaaggaagaggagagagagagagagagagcaagagagagagagagagggaggaagggagggagagagagagaagagagagagaagagagaggagagagagagagaagagagagaggagagagagaacaggaggttctggagcaagtagtatgtggtctaggactctagctaacccaacagcttgtaaagctgccagtgggaggtgctttgttgagaacctcaacctgatgcttgcttttgagtgctttttacttacttaatgaccctgatggtctgtaataagtttggagaaggtctagggttgaatttgaagcctcaggtagtttaccttgagagttgacaattgatttgtgcttagttaggcctgcataacatgtcatttgatcttggttcctttctctagtgaggggactgcagatggccttgctacacagttgccagagcaattgcttagccaaaagtgattgaggttactgctgtttgttttttcacatcaaacgagtgaggtttgggtatggctattttgcatcattttctttttgtgccggcagtaatgaaaattttgcctcctttgcccgctatgggtatcctgtttgtccccgtgagcatgggcttctgagaatctgttgattttttttttttttttaagatttatttatttttatttatatgaatgcacagtagctgcctacacaccagaagagggcatcagatctcattacagatggttgtgagccaccatgtggttgctgggatttgaactcaggacttccagaagagcagtcagcgctcttaaccactgagccatctctctagcccctctgagtttctaactgccttttctaccctaaagatgttaagttttctctagtctttttttttttttttttgacggactaaagtggggttctatgtatgtcctaaatgctggtgagaataaatgagagactcagtatatctttgtctccctgtttgtggttcatatggtgtagtgatatgcaggctggaatctgtcagcatttcagtagtgaaaaaaaaaaaaactgaatgatgatctttctatccacattttgttggtttggagccagggttttccaaccagtcctccaactggcaattctcttgccttacttctcaagtgccagggttataggtatgtactgcctcatccagatgtgttgttaactctgactactacatatttccttttgtaagcatttaagaaacttccttttaaaggcaagtaagaaatttgtgcagtgtgtttggtgtatacttcccttctgctttagagctgtgctcctggcattccattgtgattggacaagtgatgtttaagcttcatctatagagaagcatcttgtcttgggaaacttttcttatttccagcttttttgggagcttattcataaactacatttgtaattcatgagctctggagttgtcttcaactctctgcagccaagagagtaatgagaaagtttaaaattacaattgttgccagtcatagtgacacacaccctttaatcctagtgttcattgttaaggtggatctttgagagtctgaagctagcctcagaggtaggtaggtctttgggaatgaagggtagcctggtctgtctacacagccagttgcaggccacctgttgtaagcaagcagataccaaatcactcattttggaatatttgaagactgaaatgtcttaattactagacaatagatagagcctctttgcaaagcccatgtgcatacttccgtgtttttagaactgttgtggtgtggatatctatgcatatgtatacacatgtaagtatggctgtgtacatatgcatgtgtatacatatgtgaaagagtagggagagagtaatgagttgctaaccctttttccatgatgttgggattcattaaccccaaggactttggttttgctcgtttttttctttaagttttagattttaatgttgtcctcatttaaaaaaaactttttatgagattatatatcatttctcccttcccactccttcctctctccaaagtatttttaaacttatgcgtatgtgtgtttatcctgaatatgtgtaccacatgcatgtctggtgcctgcagagtttagaaaaggatgtcagatctcttgtaactgaagttctggacaattctgagccactgcgtgggtgatgtgcacttttaaccacccattcagttcttcagtcccacatttttttttttcatttttaaaaatatttgtatgcaaatgtactgcagtcatttggtgcttttagagtggggggggggctgatctcacactggaggagcagacagcagtgaacttgtcatgcgagtcacggtgggagctgaggtcatcaggccgtgagtgccttctctagacccaacacttggagtccttactttgcattgacttttaaagatgggtgagtcagactctgttagtgtcactagatagctgctttttaccaagttagttttggcagacaggaagcaaatattggcaagaagacttagagaatttggtaagattcacactcaagcatttaaacatttgaagcagtgtgtaggtgtactgaaatcccaggctttaaaaaattcccaaggaacagctagggacatggaaagagggaaagttaccgagtgacagatggggttttactcaggtcagcagattggaagttgaacttcttttgtgagaagatcagtaatttcagaagtgacatattacaggactttctcattctgtcatgaactgtacacattttgctttgaatcagccagcattgtgttccataggcatttactgcatctcatttataatgctatatatttttaaaactttcccattcagatctcacctgtaactggaagtgacatttatttattgacagtgtagggaaaattacagcagtgggtaattgcaaacctctttaattttaaatgcatattgctgggcatatgttacttcttttatgaaattaactctactgttagtaagtccttaaaaatatctcttgtggaaccattcagttctttccacagtggttccataggaagaatgaactttgaatatcctttattccaaaatatcaggaaattggtttgccttgtgggtgtgatgatttgcttttgacttccttttgtgaagtagtgaaaacaattaaaataatcataaaatacgtattttatgtgtgaaagctttgtctgcatgtttgtatgttgtgcaccacatgcccttactgaattgcaggaaatgtaattcaggattggtttgttggtttttttctgtagtcctggctgttctggaactctatagaccaggctggcctcgaactcatattcgcctgcctctgcctcctgagtgctgagattaaaggtatgtgccacctctgcttggcttgtttggtttttaaagcaaacacttttatcatatcagtaagctatgcaaactgtctaaccaatagaggctctaacatgttggattaatagcttcacatgagtagtgcatgtcctgttttgcctttcaatggcttctttaggtaaatgatttatagtgtggtcacttctcatgtgttttattcttcactctttttcttttcttttctttttttaaatttatttattatatgtaagtccactgtagctgtcttcagactctccagaagacggtgtggtgtcagatcttgttacagatggttgtgagccaccatgtggttgctgggatttgaactccagaccttcggaagagcagtcgggtgctcttacccactgagccatctcaccagcccactctttttcttatttggcagttttgtttgctctgtatggtgatcacttttatttagttgacttggtggcacttttaattccaggcagaggccattggatctcggagttgtacatagtgagtaccagggcagtcagagatacattcccaattccttacttacctatctagacaaggctgtccattcattgtacagaatgaccagttttaaggtaaagataccagataagctatttaatacacacgcacctattattgtaccatatttagttcgtatagtaccaagaggatttcagttagtttgcagttatggcaggaatataggtaactagataaatttctggttcattatgacagactgtcacagcttgttcctttagtgtttcatctctgcttaccttatgcctacaaggcaggagtgtgctttaagccatacataacacctgctattttaatgtggcttgcgtgtatcacttggggatcttgtgcaattgctctttctggtttgatatttgatgtagggccccactggttgccttcttataaagcgagctcccaggtggcattgatgagccccatctgtgtggcaaggccatatgagtaaatgccgaggaagcagtggaaaagttctcaggactgggggcttatctcactcaaggctgttcaatacctgggacttggtacttttctcagtgcctgatgacccacagggcttgattctctagtgtgccagtactgttgcttttcctgtacaaatttagtaatattacatgtggtcacattcattatgtaatgagacctaagaagacttgcccctctgaatgtaaattaagggaaagtgagaaaactgtgggagggcctcagataatagtttctttcccccttttaatgttttattattgttactctttttgttttgtttttattttttcaagacagggtttctctgtgcagctctggctgtcctggaactccctctatagcagcctggcctcgaactcaaactcagagatctgcctgccactgcctcccaagtgctgagattaaatgtgtgtgcaaccactgcctggcttttacttgtctccccccccccccaaaaaaaaaaaaaaaagaaaaaaaaaaaagatttagttatggccgggcgtggtggcgtacgcctttagtcccaggatgcagaggcaggcagatttctgagttcgaggccagcctggtctacagagtgagttccaggacagccagggctacacagagaaaccctctctcgaaaaacaaaacaaaacaaaaaagatttatttattattatatgtaagtagctgacttcagacaccccagaagagggcatcagatctcattatgggtggttgtgagccaccatgtggttgctgggatttgaacttaggaccttcagaagagcactcttacccgcggagccatctcgccagcccccttgcttttactttttaatgttaggaatttaaagcttcagattgttgactgcaccagttaattccattcttcatcctttccgacagttacattctaataccgttggcttcctttctctgtttgccagctgcacagtcttcacgtgggtgagtttagaatgagcttctcatcaaaaagcaccatactttacaccacaggcagagaggaggtagcgagagttcagtgcttcttggattggacttatctggagcactctggtatcgataacatttggtgagagattcacttaagacgggctcattcttttgtgggtactcagttataatacatgtctgcattctgattttttttttttttttaaggaaaatattttctagtatttgtcattgtaggatcggttgcaactttttcttcgggagaacttgtgggacaagtctgtttctgaaacaccaggttttgagctattacagctattacagtagtatctcaggatttataattttttgacgtgttgttggcatgaagctccatttttagtttgtgataggagcaggcaggtgctttagctgtttatttgggtgacagccatgaggtatgttctgattatctgatttctacacgaacgcagggaacatgaaaggttctttttctagaattgtctttccagccaccagattggccttatcatcaaggtagcagctgttgggttgtatgtattttatgaagatgctctttattaaaattctgtgagagaattatggttttacgtttacttcaggtaataaaaactattgagttcttactaaaaaacacttaacaaacattttaaaaatttatttatttatgtatatgagtaccttgttgctatcttcagacacaccagaagagggtatcagatgccattacagatggctgtgagccaccagttggttgctgggaattgaattctggacctctggaagaacagtcagtcctcttaaccactgagccatctgtccaacccctttaacacactttttttttcttcgagagagggtttctctgtgtagccctggctgtcctggaactcaactctgtagaccaggctggcctcgaactcagaaatccgcctgcctctgcctcccaaatgctgggattaaggcatgcgccaccatgcctggctttaacacacccttttaaaagccagttcttgggttcaagaaaaggaatgagttccccttagtggctatcctaatttcacagataatattctaggcttattattatttttttaaagatgccaataactagcgtggtaacttgcttaccaagtcccaggtaatcatttcacttgatttactcattcagctcacagaatgcattacttcaaacattgtgagttgcacagtgtgtcagcagttctttgctactgaagatgcaggcactgataggacctgtcactaggctacatactttggactagtaattaggcaaggactgaagaaacttgggcttattactgggatcaaccaacactgctctgacaagtcgatttttcttcatggaaatttctccatctgagggccagagctgcctcacaccctttctttctgttgccctgttttcagtccaggcagagggaacttcttgagaaaataaatgtgtccattaggttagtctgtagtccagatggacaggcatttcttgattcattctgtgcagatggtctgagtgctctaagaaagcaggctgagcaagcatggagggcaagtgacccaataaataagccgtagttcttctccatagcttctgctttggctcctgccttcacatcctcctcatagtgagtgtttgcccttacttagttcccttcatcgtggagtgtagctagcatactgaaacaaacccttttctcctcaccagagcagatgtggaggagcaaggaggagcatggtgtgcgaggcatctaaagtgcaaaggagggagagggcaaatgggatttcaacaaggtcctggaattgtttggatagctgagtaggcttgggttccatggccttaatgtggaccaacattaatttatctcatctgtcaggaatgtggactggccaggattaagatttgaggtcttctaaagtgactggaagctctccttttgtcatgtactactatgaagaatgctttttagccaggtgtcgtcatacatgtctttaatctcagcacttgaggcagaggcaggtggatttctgtaagtttgaggccagcctgatctacagagttagttataggatacccaagactgcacagagaaaccttgtctggaaaaaaataaaacaagaatgtttttgcttatagggggattaaatgaaaatttggttttaagattgtttgattttgtttgtttgtttgtttgtttgtttgttgtttttgagacagggtttctctgtgtagtcctggctgtcctagaactctgtagaccaggctggcctcgaactcagaaatccacctgactctgcctcccaaatgctgggattaaaggtgcgtgccaccaccgcccggccattttttttttttaaatgtgtattcatttgtgtgaatatatgctacatggtattactaggtggccaaagtggatattttatctcctttcagatctaggaatacagattgttgtgagcagcctaacctgctagctagaaactgagccggggtcttatggaagagcagcaaagctcttaacttctgagccagtttttcaggtccagatttcagatattgtgttcagctaggttttgtttgattagcttaatttcagatacattactagaaggggatgtgaaatagtaccagatttgttagtgagggcatgcctggtttcacttagtttgcagagtttataatagtgctgaatttattcaagaacttcaaagtgttacatattttatttatagttgctgtcttaggtgctgtggtacaacatcagtaccaaggcagtttatactgggtggtagacacctataatcattgtagtctgggaagcagaggcagggagatttccaggacttccaaggctacatagagaaaaacaacaacagcaacaacaacaacaaaaggatttaattttataaaaggcttttattgggcctactattttggagcccatgatccaaggcatggtggcaggattaacggagacgccatattgtgatatgtaagtaggaagcagagaccatactgggaaacctcaaatcctgtcatcagtggcccacttcttctaaggccccacttccttatgctttccaaacttaaggtccactagttattcaaacagcccatggaaattattttgactaagacaaccaccacaatcagggtagtaactcaagttcttcctgcttgttccccagtacttgctcagtctgctcagggtcactgtagattaacaccccctccccaccttgggcctagtcaatagcgactaaaaccaacatggatagactatttgtccctacttgggttttcttcatgcatactggcatacttttggtttgttttgcacactcacactcagggttttattgcacagcccacgcaatcccagaactagctttcctcctcaccccctctcccccacttcagaatcaattctcgcctaccttatttgaaacagctattgaattcaaacctctgggcttcaatcctgtcctctgtgccagcctccctagtgctggaattaagactcagttttagttctgatacttgtctgtacagcaatggctgctgtctgcattttcaccagaagtttttctagtctttaggagggttgcaatatctgtattgttataagcctctagtaatctcccacaccttttaaaacaaaacaaacgggcaggtgtctggaggggctagaggtttcagatcagatcctctggacctatagttacaggcagttgtgagccactcgctgtgaatgcttgctagaaagtaaatccaatttttccgagagctcagtgtgtaccaagctatctttctaactcccagacttgatcccccctccaaacaaacaaatctattaaactatgtagccttacctgccagacattatcttccttaatattaaccctttattattattttttaaatcctcttggaggataaagagatagtttagtgtttaagaacacttctcctttcacagaaggaccacattcaggtccctacagccacctgtttcagggatttattcttactgttttctgacctgcaggcactaagcttgaatgtggtacacctacacacatacaaataaatacatacacataaaagcccttgctgctggcttgggattttaggtaattgctgaaatgtatctgtattatgagatttaataaaagaaactctcagggtatagtttctttgaagttcattctctttgcactttaaaacgagtcagccgggcgtggtggggcatgcctttaatcccagcactcgggaggcagaggcaggtggatttctgagttcgaggccagcctggtctacaaagtgagttccaggacagccagggctacacagagaaaccctgtctcgaactccacaccccccccccccccaaaaaaaaagaagctgttcagagcacacacaccgctccttatttctttgtgtatcctgagctgtcactatgaagaaaaggccagccttgaacttgagatctgcctgctcctgccagatttaagacctttaaaaacatctttaaaaatgcaaaggagttaggaaagctactttgaaaagctagatgtagtggttattagcaaagtttttgatagccaacagagctagattatctgtgatttggacctccctggcttgtattttctcttaacagtacagcactcacattcacgataaaaaggatgaaaacggttcctatgtgtaagctgtttgctgggaatgcttcataactgtagatgccgatcataacatcatcttatgcactacatgtgtaaaactagggataaaaggccttggcaaggaggaccttaagcaagaagggtcactgagccagacacagcggctcatggtttctttaatcctggcactcacaggcagaagcagctggatctctgtgagtttgagtccagcatggtctgcagagtgagttccaggacaaccagggcttgtgcagagaaaccctgtcttgaaaaggtaggtagatggggctgcaggcatgactcagaggcttctctttgagaggactcagatgtggttctagtgtctgcatggcaatccacaaccctctataactccaattcgtagggatccaacaaatgttgtgcacacaaatacattcaggtcaaacacatttttttttttaaatgacataccagtcttccagaggacctaagtttggtttctagcacccacatagaacacatgcccaaatagataaaaacatacatcattaggaataaatcataaccaaaagattgatagaaatccagaaaggaaattcttgttctcccttgagtaaaataatgactgttgatgtgatgaatcattttaaaaacagaagaccttaagtctaaggtaatgtttcattggcatcatttgtgcttagaggaattgattgtgtttttttaatgcagtgggaacatggagctagatgctttttattttgagaaaactggagctgtattcagaaaagcatgccacaaatgacaaaatcctgtgtttaattatcattttgccttttttttttggtttgttatcattttgtgaggaatgaatgtgctggatgcttggctatagtcagtgcttttctaaggtttaacttgaaggctgctgcatattgtggaattttccccagggttaaaatagtagtagttgaacacaagtaaactttatggttgactgacagcctgtgaatctgtcccagtttaattcatgtcaacattcttccctcctcaacatgaataatagttggagcagatctaaggtggatattgggtagttgttcaggaactaaactctgtttagttaaatttgactggaaggacatgcatcaagtgtatttcattgatatacagtgtaaacaatgtgggatgggttaaattaatggaacatattttccgtgtagtgatgtgctagtaggattattgaatctcataatgtagagagaaagcaatgtagaaaaaagtatgtatactctaatttttttgtggtcttctaatttgtagctcatgaaaggaccaaaataattttgggggctaaggttgtacaagtccttatagtatggcatttaagtagcacacacaaggctcctggcttcaattcctgacaatctccccattacatatatctctgtttagtaaatgtagtgtatctgagaaattttattgatttcctgtgccgtgggttgaacattggtagaaggtgggttacttcactctagactacatttataggaggggccctgaatttgttttttgtgttttgtgggtacagtttggaggaaaatgatattcatttgagccatacacataaacttgcctatggcacagttacttggaagcaggagatggataaagaaagacaagctatgtctttatattcaggagtgagaagaagcccagaagagattgggaggagggatggtgtggaagagataaggtgtatccatccatatttgtttctagcaaacttgtattactttgttatttagaaaatagtatttaacatcttctcaaagctggcagccagggagcagtgagtttgccttcttatctctgctccctagggactgtgggtttataatgagattaagtctagagagactttcccaggttgacttcctggctggcaactcagaagaactctagatagcttatttaatttctagcggtgctgctcatatgcctttgtcctgctatagattggagcagtggttctcaaccttccctgagttcaagttatggtgacttcccaaccacaaaatgattttgttgctgtttcataactaatttttgttactgttgttgtgagttataatgtaaatatctggtgtgcagttggtcttagggccacccctgtggaagggttgcttgaccaccaaaaggcctacaagttgagaactgatgttttggaacaacacgtgcatctgatcaatgtaaaaatacaagaatattagtctctcccccccaccccccaactcataaactggcataaaaatctgtaaaatcctccttgctgaagccaccgtgcagaagaaaattaagcaatggtgatatggtgttcttttacaaaggattagttatatgagaaataatatctgttgaacttagcattaactgattgccttcttccagtcaaaacagaaacaataatttaaagagcactaggtgagtcaagatgtggtcataagctggcatagttgctacagctgcttttgattcttgtctgtcctttctgcttcactctgcatgtcctgaactagtttggagagaaaggggtctttacccttgttacgtggtttttacaaagtgtagacatgggaagggtgaagcctatttagttcttacaggaaatggaattttcatcttaaatctcacccttgccttcagggtacttgtgccccagttctggaagatgagatgtagttcaaattattttcttaaaatgaatattagatgctaaagatttcaggatggttttaaaatagcttcagtataggaagggagctgatttttcccatatttgtatcactcttcaggattttctcacctgaagtgtgggttttggcactgactcgttcaatttggtatgatcagtttccagggaaatcagttcgctgaaatggttacaaatttcaattatctttgtatacacataattaaattacacttacttttacttggtgagcatgtgagaggtatggtaggggagagacgagtcagaacaactgtatgagttgtttttctctgtggatctcagaggactcaggcttggcacaggcactttacccactgagccatcttgccaattaatgtgctctctcttatttaaaaaaaagttgtaaatctgcttaggtttaaaaaatcatttactgaagtctttataaatgtatttcaagtgtagatgactgagtagacttgacacacctgagacagtaccctttctgctgtctctgggcagtgctgacctgatatttagagccatagatggttttgtttcctgtaagtcacagctttgctgtctctgaggttcatgttgtttgtgtcatagtttactttcatggcttagtacttctgctctgtgtcttcatgtatatgacctccagcatcttcgttattttgtatgtagatattaaggctacttttatgaaggagcaaaattaactaaagaaattaactcagtcaagtttaatctgttctagtagcctgcctccctcgcaataggggttggggaggaaggaaagaatgatgttctttagattggagcattggagttaggactcttgagttaaggggctttccatagcctagattgcaatgttcccttacaaagagctttctaccaagtctgtgggttcatcttggtttgagactgtagcatttataagcaacaaatctgttattaacttgcattcctaccctcctcctcctccttcttctcctcctcctcctcctcctccactcctcctcctcctcctcctcctcctcctcctcctcctcttcttcttcttcttcttcttcttcttcttcttcttcttcttcttcttcttcttcttcttcttcttcttcttctcttcttcttcttcttcttcttcttcttcttcttcttcttcttcttcttcttcttcctcttcctcttcctcttcttcctcttcttcttcctcttcttcctcttcttcctcttcttcctcttcttcctcttcttcctcctcctcctcctcctccccctcctatttttgtttgtttgtttgttttttgaaacagggtttctctgtacagccctggctgtcctgtaatgcaccttgtagatcaggccacctcgaactcagaaatccacctgcctctgcctcccaagtgctgggattaaaggcgtgccccaccacacccggctccttctccatttctaagcacttctaagatttatttctatgtatatgagtgcattgtagctgtacagatggttgtgagccttcatgtggttgttgggaattgtatttaggacctctgctcgctccggtcaggccccctcgttcagtccctgcttgctcctgcccaaagatttatttattattatacataagtacactgtagctgtcttcaggcacactagaagagcgcatcggatctcgttatgggttgttgtgaaccaccatgtggttgctgggatttgaactcgggaccttcgcaagagcagtcagtgctctgaaccatctctccagccccctacctctcttcttagaaatgttactggcagctatggaacttgaagttgctgcaccctcccttccccatattgtttgtgtgtttgtttttgtttgtttggtgttttgtttttgttttgttttgagacagggtttctctgtatatccctgactgtcctggaactaactctgtagaccaggctggccttgaactcagaaatctgcctgcctctgctgggatctgctgggatcaaaggtgtgtgccaccacgcccggcttgtttgtatatccttggctgtcttagaactacgaaggcggaagatgtcatttaaggaccccctccccacacacccacccccaagtgctgggagtacagatctgtgctgctttctttccccagctatcttctctacttactttacttccttcggatggatagacagatgtagactcagattgacaaggaaaatggagctttaaggaaccgggcaagtgtaatttcgccaattctgttttagctggtgtgtgcttggtctacacacatttaatttctcattttctcatgcagtgctctattgagaaccaatgtcttgtctgtcatgaggcatttttgggtgtttgtgtacctggggttttaatcatgaagtgccagttcccatgtagggcttaggacagttttgatagattgcattggtgacttgtgtagaagagatccaacttttctgggaaacttgaacttttgatctgcaccaaagctccatgagttgctgttcaagtcttactgagacatggatgccatggctgaaagaacactggacttgtcaaatgaagagtgtaatgtgcaaatacagcaatcggtgtttctctgtgctactgagtttttgacttgcaaatcttgagaactggaggtcttggtggaaatgctttcaggtctacagaaagaagcttgttaaattttaagaagtaattatctgagtactgtgactgctgtggggagggacccaatggaaatctcctatttgggggtctctctctgcccaatgtgtttgtgggcctgcatctgctccatcagctgctgctggggcccctgatgattgagctcagtaccaattttgactcctggcagctgggatggcttctggtagagcgagaattcatcacccttattctatttcttcctaaataatttttaaatgtaggccaaatttcgaataaacacaacaattgaaagcagttccatgtttcctgactgtagagaatgaagagctaacctcattctctgaggaatgtcagctatccacagaactggtgtgaattggttgggaaaaggtctggaaaagctcacactctgagggtgagtgaccttgggttagtcatttagccaggaaaggaagcatgcaaaagcctaataaagactcacaggttttttatcatatggtagccttggtctttcaatgactaatgtctggtgtggaatgcctttttttgttttttgtttgtttgttttgttgagtctcccaagtgctggcattaattaaggggtgagccaccactgcccggtgtggaatgacttcttgaagattcattcattctttctctctctctctctctctctctctctctctctctctctctctctctgggggggaacaatctttaatgaccatgtcggtgattcattatggaggtggggtggcaccagggtgtggcagacatgccagagttgtccctgtcttctccagcagcctctagctcctgaggtaatctgtatttgccagactttctttatcatgaagatgggggtattaatgtctgctggttgagggttcaagatgacacagttgtagctgatcctcggctaattcctccaatctggccagatgtcgtagcctggcttgatggcaactcgctacccatgtcctgctttcgtgttcagttggagttgggtccatagtgtgggctcattgatggcgtctgggttggtggactcaatctctcagcatgatggcacctctgtgggactccaggagcgagtccttgaagatgctcttaagtattggtttgggttcatacttatgggttccatcagttttaattctgtcatgtgctatcaactttgacctcttgatcgtctctgaagttacctgagaaagtagcaagatacaactctcaggccagtcaaaaaaaaccctgtactaacacactaggtgttactactcactcaaggtcgtcatttgactaaggcatgtttaaaggtgatgtgtgatttgcaggaagaccataggagtttttgtttgaaatcacaaacattcagcaataaacctgtattttttcctgttgaacataacttttatcttgtatatataattagtaatacttttcttcctccaatttacccaagttgcctctcacataactaaaaggccattatcccagtcagaagcaaattcttaatacgtgactgtatctgtattttttagttggttcgtttttcattgtggaaatttctactgtgagaagatacatggctccctggcatttgtttcgtcttcccaccccctgatgtcctgaatcagggcatcaattgcacactgctttagtgaagggttgtgtggatggtcagggaactgaggatagacaggagatttttctatgcttggtcctagcatagaaatgtttgcttatgttttctcattctgttatgtgtgttgtgtgttccttgcagatgaggtgagaaatttactagggaggtaggcaagtctgtttcttctagtgttggaatttactgatgtttctaggcttcgagcattgctaaaagaaagccaaaacaaaacaaacatgacagctgtgagagagtaggaatgattaaacaaacatcttgatctgcctttgtatttaaacttcaaatacaaagctgagattccggcccagctggaggacgagtggctgtagcagcatattagatttgaaaggtgagtgtaggggagctgtgtttgctgaacagagttctcaaaatgttcctgagatgtttacagaaaacagcaggattttagttttttggacattggaacaatttacagatccattaagaacaggctaggtcgctgggtgctggttttcttggtgattttgctgccacctgtcttacagcaggagaaacacgccttggagattttcagtccacattgaggctgcttagtggccagtctaggaaatggccactctcttgctctgccacacatctcctgtggctcccacagtgcatgtaccaccccagtgcctctcagaggagcgttttttgagcagggaaactgtacagcgattgtataggtctggcctgtccttttttttttttttttttaataaatcctggaatagtgacagtgaagggtgggaaaaggaatagaaatgtagaaatgccttgggatacctgccttgctcaggatgtaagtgctgtctttgatcttagagggtactttggggtaggcaagaaaggagtgtggtgtttgtggggattgagaagagagctggactttagatacccataatggcctggtcaaaggctcccgtgaatcccaaatgctctgcatttcctactaatttctgctttctttgttgtgcatgcctttaaagacgtattttcatatgcattgcctgcatgaatgtttgtgtgagtatgtcaaatcacttgaagctagctggaatacagacatttgtaatattgtgctttatgggtgctggcaattgaaactgggtcctctggaatagcagccagtgctcttaaccgtccctccagcacaggcctggagaagagtatgattctttatcctttagagaataggatagttcctaacagaagagaagagatagctaccgtattatacagtggcatagaattcagaatcgtctatatcgaggacattggtgtgcaagcacagatgtttctgtttctagacacaggaaggtttcatgttggtggcgctgtagttctcacatcttttatgtgtctgtgatggcactagatattcactatgtagcatgaaataacagtgctttccagactaaatttaagaagaatgatatttgatattcaataaatatcaagagaagagctagcccctacttagcttcatggggtaaaatcctccctagtcaacgttcagggtacttaaattctatgcagtcataaagttcttggcttagcttcattgcttaccttcttatttctgaaaagttcaggctactggctgtttattggaactgctgggagctaaaaaagaaatggttagaaaatgaattggggtaactgtggtttgattattttcaccagaggagacagctctcttagtataaaaaccagctagtatttattaggtcactagttcctctcattggcttagatttttttctcaaaatgtttcagattcaaagatgacacctttttaggtagaaactaccttcttctgggtgactacttatccagatgaaccttaatgggcaaaaaaataaataggctatggtcctagaaatacatgactgggactgggaaatggcactgttgtttaattttcttcacattccaggacatagtatttaagatgtaggtaatgttttggtgctgatccaagcctccaacaagtctgatttaaaacagagaagccttgcatttaattatgcagctcatgggacacaaggataggaataggaagaatccaagtgcagtgtattactaatttagggtggctttctggctgggggaagcaagggtttctatcgtgtaagtgggttgaagtaggtatagtctgactgttcactatccgatggcctccaaatctgatgatttggaggttttttggaaacctactgtgctttaagctcatctggtattcattatgtacaatgaagtccttaaacaagatgaaactgtatagctaatgacataaaatgcttcctccttatctaatcaggaaactatcttgagtttctagattagatgttattcagaaaggataatatagggaataattactctgtatttcattggaagaatttgccacatggtctgtaagtcacattgcatatgaaaataaaaatcaagagcagtctttagtagtttcgtaagaatatgatacttttgttttttttttttaagcttgcatataaaatatgatatgtagtgtgtagcaactttgtggtgttggttcatttgtcagttttgtttggccattacaaaattttagagtttaaatttagtaacaggaggcagtgtaactgattcatgcaggctgtatacgtgttgactgtacaaggtggtgttttgtagtagtgtattctaagtaaaatgaatgtgccagaaactcaaaaaaaaaaaaaaaaaagaaaataattagatctctgtaagattttatgttagatctcttaacattttcacttctaaacactaccagtcatagaaaacctggccctttaccaatcataacatcaacacagtcacctgtgtgtgtgcacatgaattcatgtgtgcatatgtgcatacgtgcataagcatgtgtccccacgtgtgtcgtcctccgtgtttttgcatatagtggtacattgctaaattttctcaccctgctggagatggattctctagggcattgcacatgttaattcgttcatctgtgagctatatttttagcctcagaaatgataagattccgttagtgacatacctgctaattttggcaacgagggtgcttggactcttgcagtgcattttccaaggctactaatacttaagatttgtgggctacagcaataaagtttgcttgaacaggaaatagtggtccccccctttcccaaatcatgaaacatacttcacctgtgctctgactcatttctttctcttgtttatttgtatttgtgtagtccaggctggcctggaactcagagatccatcagcctcttccttctaagtgtccaactcagctgtctgctcataggtcagggttagtgtatttcataaattgtctcatgtctctttcttgctgtgtttgctgtactattctgatttcaatggctgtattaataacagttaaagatggagaaagttagtaatagatgtgagctataagagcagtctacttagaaggggttcttgataaaacaatgtatactgcagtatattgcgcagtggatggacaaatcttcatagctcctgttgggtagtatagtaaatggattcctggtgcagtagtgcacctttcagtctgggatagcacagctgcccgggaccaggatttcaaggttggtctgggtaactcaacgaaaaaaccctcaaaacaacaaaaaattaaacataattttagaagaatcaaagatagtgtggaattatataatgatttggtattttgcgctcacggattaaagacttggacacaaatggacatttttttttcttctgcacacacacacctccgtggacctcttgcctttggaattgtagattttaggtaatggatgtactttgtgaacaattagcatgttcaatatattactgggtataagaggctatattgtagacagtgtttcactgtacagaactggctgtcttgggacctattattagcctaggaccaagctagctttgaatttagaaatgaacctgcttatttatgcctcccaagtgctgggattaaaggtgtgagttaccacacccagttcatttagtgttttttaataatagcatgagaaatgtttaatgttaagtgtttaatgactctttcaaggattagtttcttaccaaatcctgagcaatattttttggccaagtgtcaggaaacatctgcattaatcccgtgactgaagccaacttcaaacaagcagcaagttaagaatccctagctcactttggctgatctttttatgagcaatgtctaaaccctaacaggtggcacaagggaatttaaggatagagaagcctagctgacttctacctatttctgaatgtctctttcccagcctccaatatcatagccacgatctatacactgcagcatattagtgacccattaggagagggagcagaagctgttgtgattaattctgttcccttgctattggactgtatgggatttaacaataggcctgtgggttggtggacgttctgttctttgacttccgagcagcatcatggttgctgattttcttttctactcccgaactgtagtgagggtccatcctctatgtcggtagtgggctctttcttgcctgctagtctggcaggcacagccttattttcaaagtttgtttgtttgtttgttttcctgttttactcactataattatcatgccttcctttctcatagcctgggggttgggtgcagagccctagcctagtaaagttcagcaccaaggaactctgggaaccctctcctcctttattgcacacaaccccccaccatggtggtgtctcttcacaaactatctcatgctatggctctggcgggttagaatcgatcaaggctatacatttttaggaacaagacccaaccaagatttcttttttattccttttgtatctttattatctttatacagttccagattagaacaatcatctagagagatggcacagtgatgtacacaaaaataaatttttacaaataagatctcccctacttcctgtaggagctctttaatttactatcccctcccctcaaaataatttggctatgataactgatggtagtatttgctattcaaaattttctttgaggggacagggttattctgtgtagtgctgggtgttgtgaactcagtgatctgcctcctgaatgctggtgtgtaacaccactacccagcagtgttggaatattagaggacgggctattggtttttatttttttttaaaaattttttttttattaatggttttaaactctgaagtaattcttgttcacattaatggtggtagactctcacctgtctaaactttgctgacagaatgtttcaggttatttatatgtgagtgctactttagatgttattaaaatatgggccatgccacattttaaaatgtggttgaactaagggctttagacatatccctcaatccttagccttacacttagcataacttggtttctcatctaatcttgaagttgtgtttgtagacagtcatcattgctctactatgttggtgaagtgctgactatttttgaacttgggaattcatgttttggaagtttcaaggagatgcatttgactgtgatgcatccctcacattggtgtatgggtcagtttagtaatccaacttttgggactatgatggtttaaaagcaaatgagtacactattttgtttgtttgaattgctgaagattaaatccagacaagtttctgagccacaacccagccctctacattctttatttggtttataatcctgggtctcccagagtgggctagaagtcttagtcctgctcacgtgtctcaccgggggcacgcaggtatgggcgccccgtctggcactcaggcttagggctgtgtgctttgttaggagctctgcaaaaactgctttgcgctttggagaggctgttctttctacctaattttcccccgtgaatggttagatgtaacactcatacttgttagtatgatacttgtgcatacccacatgccagcactcctccacccatagaaaatatcaacttagcattaccattcagagcatactctgatctgtctagtttggggaatttaattgcagagtgcttatagctaggcatggggctatgaaaggaggagggctaggagtctgagctatctgcacgcctgagtcttgtctctggaatagaaggaaagaaatgaaaagatctaggctatgcattttaagtggtggaagtggggtcctagaaaggactacaacttgaataataacatgtgtgtaataaacatgtgtcttggctttagattggcaaatgttacagggcactttatgcctctgttacatagtctcttatgatggctgtgacaaacagaaaatggttttgagggatgacagcttttcctttgccaactgtgggtacttgagtcttgtcactcttttcattttagaagagatgactccttaattgccttggtgtcaacaaaattagataatttttttaaaagtttgaacaatttttttttctcactccacatctcttgctctcaaaagtgtcaccgagggatccatttcttggcagttttgcagcatagaaagaaatgctggcacaaaacaatattattttctttctgtcttgaaagtgcagtgaggactttctttcattgcataatgaaatcagaagagttggctaagatattaagacgtgcataaattagccagctgcagggcacagacctgtaatagcagctagtctggtggttgctttcaagtcttatgccagttttggcaatttatttacaaagacccagtcttaaaataagagccgagaatacagctttagttgtacagtcttgctctgagcataacccctcagtacttcctctacaaaaaggtgaaaacagtgccaatttgcaccttaaaaatatatttttttttcattttgagaaatggaattttcaaaacatttaaaaattggtagcactttgtttagtcattaccgatggtaggtaaatttgtgtgagttttactataatgaataccagcccatgttcctgtaaacagaagttctgttggtccttacagagaccagagaatttcatgctgtgtggttcttcttgtggaatgttttttgcagtttcccataagaaaaagttttgtgtaaccccattttcaattcagtttttcctatttagattagtgcctcaggtggaacctacagtcatggactcaaaacttttacttatattatgggtatgtgagcatatgtgttatgtgtgtgggtgtgtatatttctggaggtcagaggacaacttgggagtcagttctctgttatatattacaaaaccaaattcaggtctttaaacttggtagcaggcaccttttctagccaagccatctcacctacagctccctcttctatgttaaaaatcctgtgtgtgtgtgccccagaattatttgtgagagtaaattccatttcctaggggtcgtcaggattggttggggtcaagcagctttacctgctagattccccaccttgtccttgagagtctcactgtagctatccatgatcttgcctagaactcagtgatccatgtgcttctacccccatagtgcttaaagaccaactctgctgtgctgctaaagaggggcaggcaggcaggcaggcaagcaggcggctggcattgctttagcctctagagtgttggtattacaggcatgtgccatcatactaaacttcattggttattaatggacatacaaggtttctatctaaagagaacacaaatgatagtgataatataaattgtagtttgttgttgatccaagcaaagggtcaaatttcctaatagtttttgtgtaggttaagccacatgcattgtgagtgggtggtaacctgtcccctcagtaaactgttgtaatgaagtcacacttgctgagaggtacagtgcgatgtgtgtatctcttctgcaaaacagccttttggggttgattttgaaacattattgatggggctttgtttgaggggtgaatatatcaactgtcatttcaccttcaaccccttttttaaaattattctatacacacacacacacacacacacacacacacacacactgtagctgtcttgagacacaccagaagagggcgtcagatctcattacagatggttgtgagcctctatgtggttgctgagaattgaactcaggacctctggaagaacagtcggtactcttaactccagccccctcaccttcaactcttgacattttatttttctgggctctttacagactgtcccttttagtcaacttcgagtaatctccagttacttagtgtttatttccatatttagtcctttgttatccccctaagatgtaagtagtcacttaaaatccaggaatgtggagattcttaactgtttgtgagcacagctgctcaagtgagtgcactatgctgcgtcctttacacactgcagaccttgaggataattttcaggcttggtctagtcactgaatttgaatatcctcaccttaatgtgctttcaagttaaaatagcactctccttatactggcttgcagtagcaaagtgcagtagcatttgtgatctcctgttacatgcaagatatgccttccatgcatacctccataccatagaaactttgcttcctctttctcctttcctcccttctttctctgattgcagagagaaattagtaaaataattactaaaaaaagtggaagatagtgaaagttagtagtgggaatcctaatgtatgtactatttaagatgagttaaaattccattgaatacatacttttttcaatagaagttaataagtttgtatgaggcagaaacaaaagatactgttttactgtgtactggtgtacttgcatgcctgtgtcagtgtgtacattcatgtacatatgtacaccttccctaggcctacagttccttggggctagcctgggattctctggttgtaccattttatttcccttctgtcatctctgtggttgcaattgcttccagtatggacttgggaagactgggatattagctgctgtccctgggatttttgcagaacacgctcctggcatctacctaaaattgttgaaataagattcttacaatgttgcccctttatccagatcagattctgtgtaaggcttcagagtgtgtataggcagtatgcattagatttttttgtctcttttgccattgctgcacccatcagaggacacaaaccttatctgtctccattacatgtagaagctttcctctctgataagcggaggcatggagccttctatgtactctgaatgtacatacagcattttgggttttgtcttctcatatatacatgtcaagagtttgtgttcaaatttggaattttgctgtgcccattcctgcccctcctccccactttatttttgtggaatagaaactgtgtagcaagcactggctagttctgagactggctatttagatcaggctgtcatcacagagagccacctgtctctctctctatattattagcccacacatgaacagcttttcactgttacgagtatatgtatatttggtgacctttattttgtgggtgtttatatatagtggtacaatctgtatgatttacaaacaagcatctcctttatatgttggtctatattagaagcacggaaatggatggtcaggagaatcttgccttcagttttcactgtttctagcttttgctgtaattaaacttggcattcacgtaatgggtgagatgggatgctctctggtcatgacccagggagcaggacctgtgtggactctaggagcgctcaattcttgtgagaagctttttatttttctcgcctttgatttcgcaattcaggccttaactttaaaaagaaactctttttaaaaaggcgctgttccccaggttatgcacaaaatgagtctttgtctgccttttcattcaccatctgcttacaaagctaaattggaatcgtgcttgttttaattattttctacttgtgtggccaggaggttatttggtctggtgaggttacattataagctcttgtgctcagtgctcattaatgccactgcatccacatcctgcgccagcaccagaatggttaagtggatccacttgtgtggccagtgcttgatacaacacagtggtcacaactaaattaccagaggaagtgtgctccctctctccctctctccccctgtctctccctgtctctccctgtctccctccccttttttccccttcctctccttttttccttttgtttctgcaatgttgattgcctaagtgcattttttctcgtagaaatgtgagtataaagggcttaatcttaggtgaatcttagagggatgatgtatttcaaaagttgcttgtctttttatgttaaagtttaagtacatttatcatcttttaaccctctacacttcatgaataatggaaattgtgtaatgagagactacagcatacaaacattttgtgtgaaccagcttaaagatgcaagccttgcaaaaaagtattgtttaccaagagactgacatcaaagtcttcttaaaaagatacacggacaattcctcagttgcccattttccttcactggtaggaatacattcctatctttaggtttcttaaccagtattttcaaagggagacatttagagatctcttggtgaccaatttaaaaatgttttataaagttcagaaaaacattcattacgtagcggaaacttaatttacttgttactcagtcttaattctttttgtcctagaatgaacaagtagtagttttttctttcccctacctattctcccattcttcattccataaggaaaacctgtgtaggtcagagttggtggattcttggacttccttaaactcatatctggtttgtaatcccagagtttgggaggctcagtgattggatgctagaggcaggagggccatttgttggacccaggccagcctgggctgtggtgaaactctcccaaagcccaagccgcccttgggatgataccgagtgcttgcagtatcatctcagcagttaggcttttcttggcaggccttgctgttgacactggtgaatatgtttatggaaaagcccattataaattttaggtttaggcatagaatctgaactataggaaatacagttgtcaatagttgtagctagctggtggcctctttagtctatgtcagcataccccgtcagggtacatagtaccctgtgtctgctgtcattaagtgttgctggtcaaaagttttacagtgatgactgcattaataaactggcaggtaggtattttaccatcttaaaacatttattatttctgttccaaaatacatacagcatagctatctctccaccccaacttctctgaaaataacaaaagagttgtgagtttgggcaactgcttgctgtgcctgtgcacagaacatttggtcacttgtgacccgaagggtttacttgctgaaagaaaataatgtggatttttcctgagaaacaatctatattagttttttatgttattttgtccactgcccacgtcacaagctgcttttcatatgtggcaggacaggacgtctttgagatatagccacagactaaaaaaaaattaattcctttaaaagcatacataactatccttttgaaggcttttgtaccttagctgcagaattctttcccactgccccatcctgctattccgctcacattccttcttcaatatagtatacagtgagtttctcccccatggtatttatccagttaccagattattccatttagatgtgtagcttgattcagaaatgtatgagtaaaaagtgaattaatgacacataatggatattgattgcattaagcacatagtatattttgacatctaaagtttaggcaatgctagagactaggaaaggtgattaataattcaaataggtcttgtcccacatgtcttaccccaaccctgactatggatggagagtcacacaggagacattgaatagtcaaacctttaacataggagtgtggaatccataatcccagaggaaaactgattctcccagcacacaaacaggtgctctcagagctggtttgatttggcattggcatgcaaacaggaatttgttctgacagcatgaagataggaactcctttaaaattaaagcctcttgatgacattaagctgtattgtttaattatagtaaatcatattttaacagagcagcatttctctgaagggacagtacaagtgtgctgataatggaaaattgtctgaccttgtaatcataatgggtcctatggacatgatttatgtcaccatcgggagcctgagacctaattcatgtgtctgggaacactttctcacagtcttattctgatgtatatttaacatgggtggacaccatatcctttaaaaggaatgctcttttatttcattcagtctccatcatgaacttcacatttacagtaccagtgctggcagccagatggggcaaataggaatgactatgctgttattacatccttttatgctccctgtgcctttttcttgattgagtattggaatcttagagcacacatacaaggtagttttgagactgtaaaaagaaacaaaattgtagggcatggtggtgccgagacgatgattcttggtcagaatggatgggcaggatgtgacaccaggcttatggatggatgctactattattttgtttttattgcttgtccttttttttttttaaaaaagtaatatgtcagggcaagaagaaaatgaaatcccagtaaggatatagtgtactaatcatgaagcagaaatcagacaatgacaatgacaatgatcatttgtaagaaaagctgtttgggcaaactgggacacaccacagcttccacaccgatttgttgtttgttttaatttttggggacattgcaaaggcagagggcacatatggagaaatggggagatacacaggattggggtgtgctatgtgaaagttacaatgaatcagtaaaagtagtctggttgagccagtagggtgggtgtgtttaatttcttgttgatgaagattattaatatgtcatacagggcaattgccacctcactgcatgcagttcaaacactttctacttctcagtgctgtttaaatcttaatatctgacatgtttgttttagtagaaattgtttttctagtgtctgctgttgtttttttaaaaataaattaagccatatccacctgtttgctgtgtggtgggtgtagggaggaaggtgtgccttgatatagtgtttctctctatcatgaggatctgaggcatggaacttagggcagcaggctttggacagcaccttcatcctgtgacatcttgctcttcttctgtggctattttggtatagtttcctttctctggtttcctagtgttcactgccacaatgtaggtaggatgcttggctaccttttcttttttcctgtatgctgatagtgagtagtattcattaggatgggctctttgtgttgtcacatttatttgtttaaggtgacaattgtgggaaagaaggagtccttatataaagtcaaaatttgtgctaaagaacagctgtatttgaaagataagttgatatgttaaaaagtttatttttggagcccaggtagtggtagctggcatggaattggactgtgacttacaccaggatgcaccgaaactcagacttacccacttctggtccccgagggctgggtcattatgtaaagatttctttttatttttaactaagtgcacgtgcgtatgtcagagagaggtacgtgcaggatacagaagaggatttgtggattctcatggagctggagttacaggttttgaactgtttggcatggtgctagaaacagaactctgctcttgccagagctcttactcactgagtcggagcagtctttccatgagacaggaacttaccatttggcctaggctgtctttcaagtcacggagatctacatgcctcttcctgtccagtgatgggatttaaaggtgtgcaccatcactcctagcccctttttactaataagactattaaaaatactggcatagtgatattacagaagtctggcttgcctagctagcagtcttgagatgcccgagaaccgtattgggtcatacccaatgaggtagcaagtagtcagctctgaacttaggcagcgaccatgacgcacccactgatggtcgctttttttcccttttccttttaaagagtgaaataaaagagactgttctcaagaggaagtgtgttttctgcccacgctttccttcctgtccctgtgatgttagggaaaatgttaatttggtggttttgtataattttcttgtcagtggaaaagtgaaacattggtgcagagaagtagcagctcccccactccagcctctgtcttctcctttgctgggtggacctatttacacgaaggttcctttcccccatgcagtctttcctgctcctgcacatttggcctggaaaatttgcaagctgttctcacatatacttgaaattttactttgcagtagcatagtaaggtgagtgtagggagtctcagcatttgcataagggaatggtgtagtccagtgggtttcacctgtgccatgaccaacaaagacaacctttgtttctaaaaatacttatattatatatgtttcatagagtagcaaaatttcacttatgaaatagcaaggaagatgattttatggttggtcaccacaacctgagtagctgtatgaaagggtcacagcattaggaaggtggagaactgctgcagtagatagtaattagtttggtcttttgtttaaggacctgccacttgctacacttggttgaccaggtttccccagaaaaggtcttatgctgtacaatagaaattattgatatgcctgtcagtttttgttttgtttttttttttaaatttatgagtacactgttttcagatacaccagaagagggcatcttatcccattacagatggttgtgaaccaccatgtgattgctgggaattgaacccagggcctctggaatagcagtcagtgcttttaaccgccaagccgtctctccagtcccctttattcatttaaacttttttttccttcaaagattgatatatatatatatatatatatatatatatatatatatatatattaattatgtgaactgttttcagacacaccagaagccaattattttattactacttgcttagtcttttcgtttgtatgcaatgttttctcatcttaaacttctgacctcctaaacccctccactttcctatccccgacctccccttgctgcacccaccatttcactggcctttcactttggctactggaggtctaaactgaggtcttcattcttgctcagaaaagcactttttgctctgagccctctagcctcagtccccagactttagtaaatggaaaggaataaataatagaggaaagtggtaggattgtatgagcgggatctggtgatgcctacactgatcaataagcgttaacctgtagttgagtgtggttgattgtaggatctaccgagagagtaggagaatagcttgtcacatgttgagaccttattttgtgcttgaaatttagtttcatttcaaaattactaaaatgtggttgaaggccttgcaggtaaaagtgctgccaagcctgctgagccctggcatccacatggtaggtgagacctgaccccatagggatctctctgaactccacaccacaccggggggtgggggtggtggggtggtggtggtggtggtggacacagactgcctataatgcacgaggccctggactccaacatgaaaaaaccacgacacagatacagtcttaaaggtcacctccactacacagtgacttttaggccagcggggatttaaaacacagttgttaaagtccttgtatattttagttattatgtattttgtaatgcagctaaaacattcctcatggtgaacactttttagaatatctcttgtgtatgaggccaggatcctgtactctgggtctgtatatttagactacagaatttgcatcagattaggtgtcaacatggtaatgttggtgtcctagtttgtggtgtcttaaggtttgctctaagcatctgttgttacagatataccattcccattgtttagtttatcttttcttttgataagcctagtttgtggatatgtcaaagtttttagttgctaaaaattatgtctaggaggactggatagatggtacagtggttttaacagcttctgctactctggaagccctggcttagtttcaccagcagtgatgaggatgcacacagccttctacagcttgagaccaggggattcagtgcgccccccccccccctttttttttaaagtctgtctgcactgtacgtgcactgattaaaatctaaagatcagtagaatattaattttataatttcttgtgcatacttttacttaatcaacatgaacagagattgctccgtcatccactttctcactattttccttggtacttgctgtttagacgaggctgggcttgaactcgcagatctctgctctaattgctgggattaaaggcctgcaccatgatgccccgatgactaggtgctttgtttttgcatgaatagaggtttttttttttttttttttttaaagatttatttatttattatatgtaagtacactgtagttgtcttcagatacaccggaagagggcatcagatctcattatgggtggttgtgagccaccatgtggttgctgggatttgaacttcggaccttcggaagagcagtcgggtgctcttacccactgagccatctcaccagcccatgaatagagttttaataactcttttaaacgtgacttccaagtttggttctgtgttttctgggatttttttttttttctttttcccactaaacttttgaagaagggtatatttagttaggttctctttatgcaactaaatgagtcctacaattttggacattattatttctggttgagctcagtgatgatgaatgtcatggtataacctcccctaaactggatcacagcaaaaacataggacattgtacaccaaagaaccttgggctgcagaccgttcagtgtatgggaggaaggacagcctgctattgtgctcttcaatgcttagcagatgttctatgaattaatattgctcctcagttatctctgacagaagcaagatctggataaggtcaaaatgcacattgatcttggtatcacaaggctatttaagccagccagacaaggaaaaggctggcagtgaattgttagattaaaaaataaaggtagttaataatagaatagcctccatgcctcggttttgttttctgtatgctaattttaaattgcttttggggaggccctatgtaaaaaatagtttcagaacatgaagttctgtggtatatgaatattcacacaattcataaacaacacataattcataaacacacaattcataaacatgtggtgttcctgcccaagggtcagggttgatagcatgagctcttaaggcagctactgcagtttgctggagttttaaggatttgagtttgtagttttgtaaggcagtttttaaagaaagatgttgatttattcaatgattttgcttgagctttgcataattagaatcttgttattataaacaaaggcttttgtgtcgtggtgtggtgtattgtgagttacttagtcagattcaggctcagctgagaaagagaaattaccatggggaaagagaattaccacagatggacagacaagtgtcctaaaatttgattaatctctgtttaaaacaaatggtttatcaggttccggcaagactgctctgcaagtaagtacagtccttgctgtgcaagtctgctgactttcctgagaaatacagatgttgtttatgaattgtgtgaatataatctggtgatttgacaccatagcctttttttttttttttttttttaaagatttatttatttattatatgtaagtacactgtagctgtcttcagacgcaccagaagagggcatcagatctcattacgggtggttgtgagccaccatgtggttgctgggatttgaacttcggatctttggaagagcagtcgggtgctcttacccactgagccatctcaccagccccaccatagccttttatgctgcccatttactacatagattttctatggaaacttataatcctggattgacagcttttgtctgcaggttttttttgtttttgtttttaaatagcattatctctcaattcttattgttcatggatatcttttattaatagtatgctctgcagaaattataaagtacagcatatatatgaatcattgggtcaatacttgttgtttgggctgctggtcctccccccccccccccccccccatcttgaaaataaaatttattgagagagacaaagtcactgtaggtgtaaaaaagaaaaaaaaactcatctgattcacaggggctgtgagtgttctggtttgggggttgtggtgtgaactgtagctgtttacctggctcggtggcttttctattgctttcttgggggctactcatgaagtttctagttactgccttgtctaagtcttaaagccttatattccacttaattacctatacatgtatacaggtttatctccattccatttaaaaactacagggttataatttagtttaatatttatgcaaggaccatttacctgaatggcctgggaaattgccactctaagctctctcctcttaattcaactcattgtggtttaggatcattgtatacatgtattgcttgatttatttagcttttgttaatttgtctgggaacttacagcccccaaagtatgaaggtctggacaggtccttcctgcttgttgcctgtatgattgggaaagagttttccatctgaatgagtgtgtgggaaaattgttcaatgtcttaagaggaatttttctctttctccccctctccttccccttccatttgtttattttggtgttagtaagcacatatgacatgcatgcagtgcccatggaggccagaagagggcatagagctgcagtttcagattgttggaaactgccttggagcaagaagttttgttaacggtgtctagtttctcagtggatgggttgtatgtatggtatagtttcttggttgcttaatgcagagagattaagctggaggaaagctggactcttctttcttgctgtccagctttatggttgtctttaagatcatccccagccctcttgaaagaacatttatttcataggtgcctgcaatgcatcttgatcatatctaccctctacctggattttccacttaaattacagaaccctctcctaccttcgtgtctgttaatctttttctccatgggtaacccaccgagaatagttagttctgcctcctggaatatggactaaccttgacttgatcttgtccaggtaatcataattgtaccaaggaccatgacatgtcctgaaggcaccatttccccacactcctccccatagttatagatattccgtgtaggaaaacgtatacagcagtcacttcctctcaatacttgagcagtgatgaggctttccataaactgctgcctgctgctgaagctcctttgcttgtcaaggctgagagtagcacgcatctgtaggtatcagtatttagaaggcaacctgagagtgcatttactaatcactagtaggctccccttcaatgtctgtaacctctgaagctacgggcctctgactaagttttcacagtaccagacctaaattatatctgtggaacgtgtttccaattcattaaatggttacccctacaactttgcctgcagttattgaacagtggccattgcaaggcactggatcgtagtcttcaaagttcatcactgagtaatgctctcccagtggtgtggatagctttgctactatggaaggtagccttcagggaggaaggttatataggtcacttctgacttcatttttctgtcttgcctccaaattgtgttctgtgtctttaacagtaggtttttgggggagggggcacataaggaggtggcccacacttggcacttaatgctttcatggggtgcatgggtcctgtgttcaaatttttttatttttggttttgcaaaagacagggcgtttctgtgtagcacttgctgtcctggaagtttctctgtagaccagactggcctcaaacttagggccactaccacctgaatatgaagatatttgagttaacttaaagcaattaaaaaaaaaaaaaaggcacactagcctggaacttgtctctgcctctgcagggctgggtttaaaggaatgcaactccaaaccttgctgtagtgtgtagtgccttttattaagggtttctcttaataaaagatttctaggtctttatttagttctggatgctctctactgtgttaaattagttgacatttttactagtgttgcattgttaggaataaaatcaagagtattttatgtgaattttataacttttctaggtcttataagtttattctttcttaaaataccctgtgctggccgtgctctgaagaggaatgccctttccttctctttgtttatcgccgcaaggttgtgttaattgtagcctttggtttctaggatccacttagctttgtggagacaggttgggcttcagtctcagctctggttcttaagtatgcaagtttggtttctcatgggtgtgtcctgagagtttactagggctgtgatacaagaagaattttacaaagtaggcacccactttttatgctcttggtctaggcaatactgaagtgaatcatgtctggtgaaaatcttctgtatttttgtctgctgtatgtggaagctttgaagaggctctgacttctttaatcctggcaaatgcacactaaagtatctatttgctgaatgtaactggtccatgaagtaccttcaaatgccttttccaaagaatctggtttctattaatgaattcatatatatttatatactaggagaacaattcattttttattacacagtagctatggcaggtgtcagaaactcctgttgttaatactaatggcagtcagcatttaactttttttctttactgtctgctgtcttgtggtttttcaactagttattcttaattgtcatgtatagtagaaataattaaatccatgctgctcctcctcttatgaatgtttgcacctcttttaagttttcttggctttctcacattctggtttcaattatgctgatgtgtctctggtctgtagggcagattagtggctttggtgtggccttgctgcatttccctcagctctcctgcagttggttgatgacccacgtgtcatgtcctcactatcaccataaggcttgcttcacctgggccccgtgtataccataatagacacacacagctgagtgtcaagtgcagagggagtcagcttagcttaattagagcagtgaaaatggactgtttgcttaaagctgtattgtactctttgttatttattatacacctaaacttttagaaggtgaacatttaggaattaagcaataagtaataaaaaaatgaatgaaacgaccttttagaaagggtctcttcactgaacatggagacaccaatataagtagagttaggtgaacagcaagcctgagggatccccctgtttccaactccctaacattaagattgtaatgtggtgaccagctttttatgtgaggatttgtgtgtcctgactcagggtctcatgcttggttgacgaacaatttactgatcagagtatttcttcagcaacaagtaagtattcttaaatggatttttgtagtatacggaggcaaatcaattgaaaactggctaattaagaccacaaaacagcatttgtacagaagcagaattttaagttaatagtgtgtgctttagggatggaaatatttccagtgagacaacgaccacttcttgttcttttttcttcttcttctcctcttccttttttcttctcctccttcttcctcttcttttttcctcctatttccttccttccttccttccttcctccctcctcctcccccccccccccccgatacaggacttctctgtgtagccttggctgtcctggcactcactctgtagactaggctgctctgaaactcaaaaatccgcctgcctctgcctcccaagtgctgggattaaaggcgtgcactaccactgcccgggtccagtgagacttcttaacttacagcataactaatgttcatgacttttgaccttgaagtttatattgatttcttagctatgcaggatgtaattcctgttttaggtcttagtttctactcaaagatgggacttccttttggtgtggtggtagctgctaaagaaaaaatgttccatttgaaagtggaactctgtgggcaggtacatttttagtgtttccatttactatcatagtcacattctatgttccagtttatgcctgtgtgagagaagtgggcctaattgggttagtccgaaagagtggtttcactaaagagctatttccatgttggaaaattcccatttctatttaaagggttgttcattctggatgtagaggacaaattaaagagtactgttttagaagtgtggctggattttttggcattggcagcctgataattacagtttttgcccaagagctttgaattctgactgttttgcttggaagatcttctgaggaaaagctgaaggataagggacctgggtaccaggaaagggaggattaggctgtagtgttttggtagtgctttgttgaataaataggatagctctcctggggattcccatcaccaggcaagagaaatggcactgtcttattttgtctatttgttttcatggatacatcatcttttgtaagtaaaaatatgagtattgtctgttctcatcaataatgaagaaaatagagcatacctccagctagtaatggtaagcaataatgtctgaaaaccagacattattgtgaataaatcagtcatttgtccgttttactcacacacagctacttcttcacaccttccttctacaaggtggcaaaattctgttggatcaggttaatgaaacaggtggcctgggttatttttagccctatccttctcatgaactgttactctttctagatttctctttcatgtgaaatgaattgacatgttaaatttaggtttatagtgtgatgtagtgttctgttactagaagtacaaaccatttatgtcacaagcttagatgttcttggtcagggctggggagatggctctttgcttaagtgcacaatctgctcttccatagttcaattcccagcaactgcatggtggttttatctatactgggatctgatgccctcttctggcatgcaggtgtacatatacacacagggcactcatgcattaaataaagaaatcttttaaaaatgtctctgatttacagatttttttttttgtggccaagcaatattccatattaatttgtgtccatgccctcccatcccccatattgaataacttaggagttctgcctggaagtttctcaggcttctgcactcttgctgtgtggtcagctcatgtgtacatgtatactttcatgtagtgtatcatgtgtactcttttggcactggtggttgcttctgttggtaggtaagaaaagacacatccttatttctctgctctcatgcttcttcaaggctgcccaggctcatttttctgatcatcgatgattcttggctctctctttaaactctgttagctccatttcacacctctcattagcttctcattcctcagtccagagtagatgctcagaaccatatagcactgaattctgttcctcctcctgccatgcatacttattactacggattcttactatcaggaacgttgagattaataactaatcataataaaacagtagttatactttattagaattagtatgaactacttaggatgcctagagtgaaaatactgtataaaagtatgattaatttatatatcatgggcatacctgctcaatggtgtaagatttcatcatttttctaagaatgataataaggtatttagttacataatttgccatacgagaagtgtatttttgagctggcaaatgaaaatggttttgtcattcttgaagttgctgctttagttttctttcatgtgtacgtggtgttgttgttgtgccagaatgtatttctgtgcacccagtgcatgtatgtagtgcctgcaggagttgttaattttggcaacttttacaattagtatctatttttatttctaaagaaaaacactgtactgaactggaggattttaaatacttcaaatatatattgggtttctctaggctgtttttttctctctttttaaaaacagtcctaatcaactctgccatctttcacatgtacagagtaagtagtagctcagtaacttgtacaaggaagagcagttgcccatataaactgtagactttgcacacttaaatacatctttcccatttctttaagtcttgtttcttgaactcagataaatgtattaattaaatcatgccagcattttctgagatttctataggagactaggaactctaaatgtcacattattgtgacattgtccttcctgcttcctgacagtatgttttcatgtggagacacacattggattctgttgttggtaccaatgcagcagagaatgtatacatacattgggaggtcggagtgagattcacaaaagacatgtgcggtcatctcttggtgtaacctcctgtcttgaatttgttcatttgtttgtcccaatatatagggagcagaaaatctgtggtttcctattcaggcactgcttctgacagtgaagggaaaggaagctgtgaaaggtagcacaacagatattttagggtgtgaaaggcagttgtctttcaattagagattttatattgataaaaagcattcttggagtccaggaaatcattagtttggacatgtgtgtcttagtcattttgagtatgcagtctgaacatacgtttacaatgaagatgatttgtgtggacatgggtttgattctggcttgttgcttgtttggtatcttgactattgattgggagaataggcaagctgcttttcaaagcacagtttctcattctcaccacagtgtagtttcctgtttttcacatcttgactaaatgattatggttgttggagcatagcaacttgtgtggagtggcatttgtttgtgattttgctttgggtttgtttctacactaactaggcctactgagtaccttacttaattacaatagaaaccttgtacccatctgagaaagctctcatctctcgtcagggctcttatttggacttcaaaatgttaggtctgagggaagcactttagagacagaaatgtacagggtacattttattctaaaacagtatactgtccaatactaagtctgcgaacaatgttgcagagcttagttgtctgcctagatgcaggaagcatcacggttgaatgatttacccttccatcctcttcattgagaaatgagaacagccaggaaacccctgagccaattctccatatctacccacatctgttatgatttcagcgcaggggcttctttccagtgctctgtctgtagtgccccgtccgttacaagggagatatggcttgtatcacacagatccttatggaaggggtagggtgcaggcaggagaggaaaacgaactctggtactcatgcgtacttgcggggtgtgtgcgtgtgtgtctctgcaaagccgggtacgtaggcaaccactggaagctaaagagtgctagaagttaagttctttgaaagtagctgaaaacaaaaaagaccaaagtcagtcacccaggaaaagaggtgataacgcacacatgtaacaacactgttttgacttctaatattacactaactttttttgagtgtagagacactttgagaaaacctgtattcttgatcaacaggctattacagactatagatgggcatacaccgacacgggtcatagttaacaagtggccatttagatgccttcataatgtcaaaaaacagatttttatagagtgtgggtccaaatttgaaatgaacaaattactttacttgaattagctttgggggctcctttgaatttctttgagtctcctccaatacctctccccccctttttttttttttttttttttttttaagatttatttattgattatatgtaagtacactgtagctgtcttcagacactccagaagagggagtcagatctctttacggatggttgtgagccaccatgtggttgctgggatttgaactccggaccttcggaagagcagtcgggtgctcttaaccactgagccatctcaccagccccaacctctcccccttaaggaagagaaatgtattctctaaagaaagttaaaacagtttagacttggttgtagaatactttggaaaagtagcatttgaataagaaaagaagatctgctaaagtaaagtaggcaaagggaaagaggtgtaagagagaggagagagaggcagagtcagccctgctgaccgcagcggggagggatccataagaaccttgtatttaaccttgtgaacatgggctcctcctcccctttctgcatatttggtcagcaatctcacaaccccgtccttttgagttgtgagtctaaattacaggggcaactgtggacatacagctttaaacacatttcagacgaacttgtactttgtttacagtggctgcactaataattcctttgcattcactactttttgcagtcttgattgaaggaaagtaattagttttgttttgcatacaatcaaatgacagtacaattgatatgtttgttcaattaatggtacttctagaacttttaccaagttaattttactggggctaacattttcaaagtaatttgaattttttaagtcaaattaagtatcatgggtttatatcagtggaatcacttcatagctgcatggcaccttctataccagttactatgaaaagatacacagtgataaattgcccagatgcaagatttattaaaaattatttttttatgggtgaaagttttttgttttttgtttttttttttttttaattcacgtaccttattttggttgtcagttgataggcatttgggcagtgtattggtttgttaacttatttattacgctatgcaatccagtctggttttagatttactgttttcctgctgttgctaataattctgctgtgtcccctttttcttgcttatttttagggtgggcgtcatggtgtatgttttgtgtgggtatgtaagtcgaaataaggtgttggtttatggtatgatatttaaaattcttagttgtacctacatatgatggtgcaacacaacacacctttaaccacagtaggaggatctctgctctatttactgagttctacagttatacctgcctgaaagcactgcttgtaaaggacagggcaagaaagtgtgtgctggtttacatggaatactgcagcaagaaccagagctccaaactgcattagtcattttccgagttttattctggtatgctcaaaccttagtccctaggaagacagaccgcccagtggtcttcttaccttgtgactgctgtataattcctcatcaacgaatgtctgtcatggctgtgcagaacaaagttgaggaagttcaactacaggcatttatagcacaaggttttgcaggtagcagtgtagctgctgatagacagctaaggtaggttagtcatatgtctgtggccctaggccgtagtggaagccaaggattgtgaattgaaggctagcctggattatatagtgagaccttgtttaactccctcctccacctcaaaaagataaaaaagagaaaagaaaaagcaaataaaactagtgaggagggtccaagggggaagatgtgtagatttaaaaaaaaatacctttcaatcaatactagctttaaatcacatttattagtatggatattgttttttatatttttaagaaccatttcaatatagtcaatagaaaactgtcaatggatttaagctgtactttgtaataggtaactgtacaagggaactagcaactgatagcaacattatgaataggtccttttatacatgttttcttgaatagatggaggcttttaaaaaaatgctttagaagaataagttattttattctgatttttaaaccagagatttaaaaacattttaaagaggttttgtggacctttgagatggctcagtgggtcaaaatacttccagttaaccactccttctcccagcaactatttggataggttaaagggtccacagcaagtgtgcacatacaaataagttaataagaaataataataaaagacgctttaaaggaatgtatggaaaataacacctggagcagtaagaaattcgttttcagttaaattcaagtgtagattgctcagtgtgggttgcactctactctctgtaaggccaaaaatggtttgcattgggtttcggtgttctctccttaatacggccatgtaggggtgtgttgtgttgtgtagctcacaaccaccccctttcctgtcctcatctcacttgggtaattacactctcccctaccttgtccatataatttttttgtgatgttaatttcacaggtgttttgttttttttccccctcccccccttgctcttgtagtgtcactcagaaagttggctccctttcctgtttatggtaattaccagagaacattttctctaggggagtacccgctatgtttctttgtggggaattctgttaaattttgaaaatggcttctttgaggtcaggaatttgatctgactcttatcaggcatctaaaaattttctttattatgacagtttttttcaccagcagttaatgtaaatgtaaataaaaacatttcttctaaccaattaatttgtatttaattgctatttttgatgaaggagggctctgttgaatcattttaactgctggtgataaggtccagggataaatgcatctgtgaccagagtttgattcctgggacactaacagtgcagaaagccaatgcccataagatgtcctctgatctgtgtgaacacatattctcaaggagaggatacagaaataaaataattatcagtcctttcaaacttcttccctctgatagcttcagggaacagtcaatcctttgtagccatgctgctattctgtatcccttcatccctctgtaatgttgggagaacagaacctgcttgtctgtgactcggaaggatatttcctcattcagtcggagctgtggagcagtatagttcagttcctggaaggtggcaggtgctagttttatgtttcagtgaataaaatgttttgtgtcatctagagcccttgtgtgcattgctcccctcccccaccatttaggagaatattgatttctcattttcaggcaattactttcaaggaaataaaatgttctgataacctatgattttgttttagcagttgtctatttttttgcaagtatcattttccgaaagcttcatctcttcaacaaataccatctaattccaaatgcctgccaattagacttaatagagaacttccacaatacagagtttaatgcaatagtgatctcattaaaggtgtgagcacagacatgccagtactgtctttagaacgtcgattgtgagtttattttattcaaggcaaaggccacatcaaaatagagtgagggcctgagctgtcacagctgtgtgccagtgtccagtgtctgtagcctctgctagtggagtttcactggtgtttcctagccaactaaaagaagctcaaaatgtgagctccaggttgaaaggaaggaagagtagatgggaaacagacacatttgtagaatagtgaaataaactaaagcttatccttagattaggactaatgtaagaagattcttattgcagcagacctcttgtggtaagcatcttacggaattgtttgctttttgttataaaaccacaagccattgtcaggtaattgagatagacatggctggtaatgaaacctatttgtttccttcctgtttatgcgaggctatgaaaaaaaggtcggggtgttctgttgtatttatttcatgagaaagtccactgttgatttacagttgaatcacagggcaaattgtcactattcgtggaacatgaatattaattgcctggtatctatttgctttgattgagggtgacaaagatactgaaataatctctgcctgagatcttgacaccttctcaataagggaatcaagtaaataaagaagtgtttggtagataggatctgagaacttatccaggatttgcaggtgccttgagttaggcaaagtgaggtatagatatatttattcgttcactgtagggcagttgttttagagacagtctgaggagtgaagctatttgggacaggaattggttggtgtccttttgtagaggtggttgagagcctgattgatgttgaagtgtgtgtctcataaatttaatggcagagaataatttcctcgtcccagaataaatggaagctggatgtctatagtgtatactgactatcctgttagtgtcatttggttttcttgtttactcttcatagcaagttccaggtcagcctctcatttatatagtacaaataaaagtgaacatataaccagaacaaaaagctacaaatttacaatccataggtagccattgatagaatttactggtggtgaaatgagccaattaaaatcgaatatagtatgaaggcaggtttaatgggggcaggagttggtcagtgttgacagtgaggggaggggagaagaacggaaatgtttggattatattttgaaggacctcttgtggataggaagttgttttagagacagtctgaggagtgaagctatttgggacaggaattggttggtgtccttttgtagaggtggttgagagcctgattgattcctgggcctggaacgtttagggtagagggcaatgcatgtcagccatgcatataagcataccaacagagggatgctgagagagcctgtaggccaggagactaaatatgtgttataacgcatctcatgttttggtttgttgagtgttttgtttgggcttgtgtgtagttctgacggttctggaactggttctgtagaccaggctagccttgaactcaggagatggattaaaggggcttaccaccacacatggtggaaggaaaatgttaaagattcccagaggtcatgtgcattgagatgccgagggcatacttttaaagtgtgatgggcacatcaatgagattttagtgtggcaggtgaaaaagaggaggcttatgtatggtaaatgaatttattaaggatagcatgcctcctcctctttctcctcctcctcctcctcctcctgggcaattaggatagttttcattaaagttgatgagggttaaagttgcatacactatttcttctcatccttgaatagtagtatcagtaatgtgtcttaccaagccctatcctataggtattttgttcgccgtgtgtttcagcactttttacagatttcctttgacgctcctgtgttgctgttctggtgctccctataaccatcatgagattgaaggcaggatatgatccgcagtgttatataaataaagtgtggtgatgtttcataggcttattataaaaggtagaaggctggaaacatactatgtggtgcacagcgacattccagtgtgaaaggaagtagtagaatgggtggggcaggtatttaagggtgtgtctatagatgcaatctattccatgtaaggtagggtatttagtatgggatggacactaggcacaattagctgtttctataataattacactagtgtaatatttatggtcagacttgcagacgtgactatcagtaaaacctaatgattggtataatttgtctggatggacagtgtagaggtgtgtatgtgctgatgctaatttttgttggtttactgctgagccgataagccagctggatagtgattgagcttgtaaagaaactcagtaatgttccgtgggaaggagtgtatttcacaagccagggtttttgagtgaagtagaggcaagagagaatcacagtcaaatggctttgagtggcctcagtctccagtgtcttcgtttatagccttgatttctggaaagtaatttaaaagcatataaaatattatatatttttatattatacacaaatatactattgtgtgtgtgttggtatgtgcgtggtcatgcatacgcacatgggtgcatacatgcatgcatgcatacatacattgcactgtaaactgcattgtcttatacgcttggccctgacattgcactggtttccttcatggtatgtgaaagtagtatatattagtagaagccataatattgtgaaatatgtttttagatctcttcctcagaagtatgttctattattttctttttactccagttggaactgcacagtgtttgacaacataactgtatgtctcagtgtattttgtacttcactgtttttaaattactatgggtttaacagtggcataatcctgtggtgggtttaggagcatctgcacagaatgctatatatataccttctctgaatgatgggaaggccatgtgtagcaggcagggttggaatcacttgcaggatggttatgtgaatgggcaccgagtatgatgtaataaaatgcattatcaaatagctcatatggtcacttgaaatcttaaccagtgtcgtacacagtactgtctagaacaagttcctatgatggaactttatagctaagtcattatttaattttgtgtgagtgctttaattgttgcgttgtacattgtgtgagttcagataatcctgctgtagatctggcatctttaaatatggtaggataagagatgtaggagggattagttctgactactctgtcctgaatgtaccccgtcatggcaaaatgtgtagatatcttcctgccatgccactacctacttgacaacggatgtctgacatgttcagacgcaaaagagctgacttggcagctacccagcagttttttataaaagcacagctggtggcctgaggttcagtctgtcagagctgtgttatgaaataaatcgttttcagcagaagttcctaatccaatttcaactgtaactttaaaaaaagggcagtgatcaaagtaaagccacatttatttagggagtaaactccttgtattagtgttttcaggctcatttctttatcccaagaaagggttctgagaaaaccttttcatgtttttattttaaaatcaaattcagagggtacaccccctcttagaaagtttcctggatgcttttttggcttctggccatgaattattttaccaggttttttttttttttttttttttggggatgttttagaaaagagttttaaagcatggattagcattgaattgatctgagaggattctgcggaaggaaacttttcccagtgtcaaagtgacagaagtggccatgtcccaagttgaagttatgccctctctgcagcctttctctggcagtgcctttcatccctctgcctttcactgccagggaaatgcttagtctctatcaagaagcactggttagttccactttattttaagtggattattatgtaatattatttattattgtgtgagttatgtatatgggtgtttgattggtgcacgcaccacttgtgtgtatagtgccagcaaatccagaaggtccagtagagggtttcaaatctttggaactacagcgaaccaccatactgtttcttggaaacaaacctgggtcctctggaagtgcagcctgtactttgactcttttcagcccccatttttactgtttgatactttcttcattgttttgtttgtttgtttgttttgtttttgtttttttggtttttgtttttttcgagacagggtttctctatatagacctggctgtcctagaacttactttgtagaccaggctggccctgaattcagaaatccgcctgctcctgcctcctgagtgctgggattaaagtcgtgcgcaaccatgcccagcttcttcatgttttaaactgttgttggaacaggatatcattgtcttgtacaatgatttaactgctggtacctgaaatattaccctaggaggaggaaatggctggccatcctgctttttcagatttgtcacgccagcactgtcagctgagcaaagaagtcacaattagttcatgaagtacattgagggcgcctggctatcagtgagcacttaggagaccttggtatcaatgcagacagtagcattttcatagtctgagtctccatgaaggtcatctgtacatggtctgcaagatttggttctgtgtggatttggttctccctcccatctttgtaggttgtggcaaatgacatctaattgctgagctgtctccctagtccagtgtgtccaccaacttcctgagattcttgttttggaacttgaaccaagtgaggattttgcattgtaatttctgtcaaaagtattttgcctaaatatcaaatttgcttcctgaccaattgtctccccatccatttaaaaaaataatattttaggattgttccaaaggttgtcaaataagtagctaaagaaaagaaatcatagcgaacctgttgcttgggtatgaggaatttcttttcactattgaactaactttctatctgtggggagggagagctagatttacaaagggtttagggcatgagactcttggaagatagagaaaagcaggaacctatacacatatggttgtgcatgagcaacacatgtgtaatgtttttctatgactggcaaattatgtccatgcctacattcagataaagattttctctttctttcatttaggtggggtagagtgttagaggcagtatgtaaatgggttgctgagaaggagagatgtagtcaagccttttgtgtttagtgattgttggataatacaaagttagcagaggttaaatcatcaacatggctgtaatttcaggcacttcacagtagatgttgtctaaggttgaagagtaggaagttaagtatgggaaaaatggggtgggttgtgggaggagggagataaggatgaagccctctgctcagtgcttttccctcaggcttctatcctgatcctatcattctgtagactgttctatgtatggcacctcagaatgaggagatagccccagcagaatgtttgtgtggctcactaggacttttgctctgtgtaccatgcattgctagggagcagtggggaccctctagatagaactctgagtctgtaagtttattaagtcagtttactaaggtgataggttttgaccagccatgtagatgataaaagaatagttgtgcatatgtgtgatttttttttttttaatgtctagcacttgaaactacaatctctgccattcataccctgcttctcccaaatttaaagtatttataggtgtaataaaattgctggtgtcagtaactcaaccttgaatgtggctttctttgtaggcatttccaccttccatggtttagtctttaaatagacctcagttgtggggtggggtagttgattcttttatctagagccctagtcaaggtaaagactccagccttcacagaaaacagtaaatcttcattggagtttcataggcagagctgctttgggactttgtgatttataaactgttgatggaggaaatattagtttgtaatcttacatcattgttgtggagacacacggaaagaatgagactgggtacttctctagagaattacacctggcagctttaatgactaggccctggatgtatcaaaggcggcttttagcccgataagcccacctcccacctgtagttagcactattgtttggttgcagattatctacttggacagtcatatgaaaactcaagggaaagttaattcggtcacattttgttcttcatgtgttatatatctgcatcatctgcctcttgattaattatttgaattccacaaatggggtgttacttaaaaacctcatgttgctggttctaatgatttttgaaagtccctggtggcatgcctctcattacaggtttagcagttacttgtaatttttaggttaggttggcacagtttcttcctttttcttggtcctctaaaggtgctgccctgaaacagaatacaatcttggcaggcctatcaggtgaaggagttctagtcagggcaaggtggaagtggtatcttgtttcctttatctagaacagtagttctcagcctagagtgatggaactaccccttcttgtctcagggcttgtctcagaccataggaaaaacattatatttatactatgattcataatagtagcaaaatttcagttgtgaagtagtgaaaatattgttatggttgggaggggtcaccacaatatgagaaactggctctattaaaggggcacagcattaggaaggttgggaaccactaatctaggaaatccttgatggggatattgggggtacatgaggaaatcagggtatttgctgcattccttcattggaggatttccttgagttttacgcagaaggaatgtattaccatttcatactctggcactggatcatataatacttgttaggaatgtgacatgcaacaccccatcaccccactctgtccaggatttttacatcatagataagggtgtccttaaatttatctgtttttaatcaagtgttagatatatccactgcacccagtaggaattttacagtgaaatatgggtctgaatatttgtgtgcctgattttcagtaattctccttccacaggatgacagcgatgggatcccgtggtcagaagagagagttgtacgaaaagtcctgtatttgtccctaaaggaattcaagaatgcacagaaaaggcagcatggggaaggccttgccgggagcctgaaggcggtaaatggtgagttgaaagtggaactggatggagtctttctgtgccttgttctgacctgggcacaagcaagcttactaagctaagagttttggctgtatgaatatatatttcagacatcctattgtatttatagatatatttttatgtttctttacaaaataatatttgggaaggtgtgtcagtctgttagaggttataaactcaatgtgacatctatttacttatttatcattcatgtatgtatgtatgtatgtatgtatgtatgtatgtatgtatgtaatcaatctacccagtgagtgcataggaacctttaatgatcttgttggaatatggagacttgcaccctacatgaggaaatattctaaaaacctactgccctttgtgctatgtgctaccaacctgtgagcaccctgctggcttccttgttgaccagtagctacaaggcctgggtgcctaacagaatgctcagtctcttcctgtgattgtcaaacagatctggaaaagtggagggaactgaccctcacatttcttactttctctgcctctcattcagtagcattttaaaagatgaatgctaaagtaatcagaaaacatttggttgttatctggttctaggtgtgatatatttcatagtctattgtatgttcctttattgcgtatagattagtgaatgaaccgtgttcatgttccactttatacttggctaacaacaaacaagaaaaccacaggaagagaccttgttgttgttgttgttgtcctataggtttggctttggaaatagtggaatcagcacttagagtgtactaactagctgccatgttatagctcacatatgccttccaatatttcccctctgcctccctacaacctccagtttctcatgtgtgtatatgatgattatggaaatcagagaatcatttggattttggtttttaacctctctcttgtctgagatggctttgtttgctactgtgttacaccagttctcttttgtagttctcttttgtagttctcttttgtttgctttaattggaaactgaatactccatggtttctccttggaagtaatagttatagagtggatctgtttgttgactttttttctttttttcttttcttttttctaaagatttatttatttattttatgtaaatacactgtagctgtcttcagacactccagaagagggcatcagatcttgttacagatggttgtgagccaccatgtggttgctgggatttgaactccggaccttcagaagagcagtcgggtgctcttacacactgagccatctcaccagccccggcatggttttctgagaccacttctgtgaactctactatgtacccaacttgttttacacagtcgtcttttttttttaaagatttatttattcctgtgattgtcaaacagatctggaaaagtggaggaaactggctcaaatttcttactttctctgcctctcattcgagacagggtttctctgtatggccctggctgttctggaactcactctgtagaccaggctggccttgaactcagaaatcacctgcctctgcctcccaagtgccgggactaaaggcgtgcgccaccactgcctgtattttatgtatatgagtacactgtagctttactgatggttgtgaatcatcatgtggttgctgggaatttgaattcaggacctctgcttatctggttgagcctaaagatttacttattattattatatataagtacactgtagctgtcttcagacacaccagaaaagggcatcagatctcattacagatggttgtgagccaccatctggctgctgggatttgaactcacgaccttctgaagacccatcagtgctcttaaccgctgagccatctctccagcccctgttttacagtcttaagatggtgctctatcttcttactattttttgtatgggtgttttttctttatgtattatgtgtgtaccatgtgcaaacctagggtctgaggagtccagacagggcatcagtcctcaggcactggagccagagtgggttgccatgtggattctgggaatcggaccctggagctccggaagagcaataagcactcttaacctttgaccatcccttcaatttgacctactgagtatccttttaatttcagcagtgctcattttagccaacatgtattcgaaagggtcatttggagaattatgtaaattctagatggcatttttctatttcttggttgcaacagagtaaactctaagccctctgtagatagtatttcttggtttattatacagtattcttcctggtttaattcatgaatatttgagtgatgagaagtcattggattgaatcctagagcaagagtagagcaatagtaaccactgattgaggttgctgtatgtttgggaacaggcatgtcatgtaggagcagcagtcagtgccttaatagtattctctatctttttttttcccagcaattaaatataatttttcctaactggtgttatgagaagaagttagacggtcatccaggatttgtagtaatgctactatttagatttatgaacaaaagtaaagatcttgtattagcaccaagtggtgtgcaggtacacagaggtaatcctgtttcaccctttgccttgttaaatacggtttctcctgcttataatgccgctggtccacatactttaggctagatattctggtcaagtctctgattttttttttttctccctcttgcttataggactgttgggattgtatatgaccactacatcccgtgtgttctggggatcaaactctggttcaggcagctaggattcttatctgtagagccttctacacgactgacttgctcatttgtattgtttcaaagtcattttggctgtgaaattgctgtttatatgccaatttcttgttcttgttgatgttattcaggctgtttctaagatcacatttgtctctctgcagatcaggtttcttcagggcttgagttcctggtattactaagaatatttaaccaggcaatgtggtacctacatgagtagacagaggcacatgaggttttatacgttctgagaccacctgaatctacacaaagtgaagcccgtcttagcacagtcactcctacaccagaatcttgaaggtagctatgctgagcaaaatttggttgttttcttggcaagagccagaaagcacaattaccaaaatgggaataactccttttttctgggcatactttttccctcttaacccagaatgttgtgcaatagggtgcacacctcacctttcctggaccgccccccaagaccttggagctggagttgatgttgagaatagagtacacgtgcaagaaggaagggtttatttggctcacagttcagggaatgcagcccagtaagaagggaaggcatgatggaactagtgtcacattgattgcatccatagttaagaagcagagaatatacaggaattgtgattaggtcatgaaatctccagaaaagctccttctccccacacacacatctaaaccgcacctcccacatgagaaccaattgttcagaaagcctgtgggtggcttgcatatctgaaccagtacatttcttatggtaggatgtcccatcactatatgttctctaggtcatgtgtagccctggcatgggtgaatggggttgtggctgtgaaacaaggaatatattgacttaagtggcaaaggacagtgggggagctttctctgtcacagtactagagcttgggtcccacctcccgtgtttgtgtttctcagttgcctgtcattccagctcccaaggagccaataccctcttctggttttagtaggcacttgcccacctctgtgtttatacacagtttctaaagaaaacttggcttaacttggccatcagatgaaatggttctactatttcagtttttattattatggaatgtatatggtagcagtaaagaaggttaaccacacagcctttactaggaggggaggtgtctagtggtagggtggtgcttttttaaaaattgaaaataccattttttttctcctcccagatcattcccacttctctacccacccaaccttgctcttttaatctctctcactcctctcttttcaaacaacaatcccaccaaagcaaaacaaaaccaatattaagacacaaggcatatgacaaaagacatccaggctaaaatgtatggatggacacacacacactcttaaaataaggggcttataccaaacttttcccctcaaggctcaggtaggcatgggggaaaggtaggtggattgtttgtttgttttagttcataaaacagccgttgagatttttttgggttggccattacttgtgggtacactccattgatagacgagactccaggggagcaaactggttttattttctttgctaccctatctatcagttgctgttaccttcttggttagggggaagaccatgtccacttgctcctcccagttccaggacatcctctgatttgaaaacgtgtgcgtgtccttgtgtgttttagggtttctgttgctgtgaagagacaacccgactacagcaactcttataaaggaaacatttcattgaagttgactttttcagaggcccattatcatcatggcaggacccatcacactatgcaggcagataggctgcaggagaattatcttttttgaatgtacatttggtagaggttttgttgagtcacataggcatttattctataggcatttattttgcagtagcagaattgggattctgctcaaattatagagctgggatttcagatgagaatctgaattcagagcacatggtggaatactaaatcttcgaaattatgttgaacacagcatgctttatttccacttggccattttttttattattatttttaatgcttttgtcctctttaagtttttaaaaaaacttatgcgcattggtgttctatctgcatgtatgtgtgtgagagggtgtcagatcctgtagaactgaagtcacacatagtgatgactttctgtgtggatgctggaacttgaacctagatttttttggaagaatagtcagggctgataaccgcagcactattgctcctgccttttctcctgtcatttaaaaacaaagatgtttccagcctattgcttcttctataggactttcttagaaaaattaaaaaaccaaaaaatagtgttagtttcacattgaaagtggtatatggttgacttaattttctttaaagacttccactaaatactcgcatgattagtcctttgcccccagcatttgtgtgaaggagttgggtggatgtctgctgttaatacagagagctaacatgtgagcctgtgtttgagtggctgatctcagccttccacttctacagggcctataataatgcaaatgggcacaagatatcatagatctcctttttatgtcataaaattatgtgcaccttccatcttacttttgtgctccagaagtgacaaggcctgcaagcctttgccttgttaaggaagcccatgagctgtttcatcagtggtgtggattgactgtaggacttaacgtcattattgcagtttcttgctggagctgggtggatgggtgtggcagtgtagagatctgctggtggcaagccttctgcttccttgcttgtatattctaccccgttccctgtctgtaatgaaatgacgggttattgagaaagcttctggggatgcgaaccttggccaatctctcaaggcccttgggcctgccgggggctaaaattaggaacatttaaataataacatgctacacaaataacaagtacacataattacacagtaagagaggggagctattagctgcatttgaatttcatttgctccctataaatgtcatctcagatcagcaagcccttttggccagcaaaacaattttgagtagatttaatggaagctgtatttctttctttagatgtacagcaggcaggaatgtaatagttaagctgttcttcatatttcacagttagtgttggaagcctgtagctgtggtttgtgcactcaaaccatcagaataaatgagaataaaatggatgaggaaaactgtaccttaagaatggagtagcagtttgcttacccagctcaagcctggtacttccaggattcaagctcagcctttttggagtagactcctatttaattaatttaccactcagataaatagcaagtagttcctcttttttaataacaaaaaatatttagtacacaagttattaaatagtcagattgcattttgaaaacattacagtgattccttgtcccgcctgcctcttatctcctgtgttctcctagtctccctttcatatcccatgtgccattttgctcatcctgtgttgcctgtggttctctcccttggtgtcctttctaatttttttcgaccaggcttttaatgatgtagctggaattgttaattaggagaagtgcctcaggaatggagaggtaagtatttactaaagtgaccatggttctctaattcaatcatagaagccataaacctagtttttggttctttaccctcctctgctttggtcatagtcctttaaggtcatcagccaccgtgaggtgtgtagtttcaagtgcacgggcctttcccatcagtctggcgcacgctttattcagatggacaatcttctgccttactgtcttgagtgctggggtcacaggcatgtaccaccactcctgatgtcactacttttctgatgaaattgtgtgtctaaccatgatgcccaagttgaattgccttggaatgtctttcactctcatggaacattagctggtacaaaatgagtgaagcaaaaaaccaaaagagattcctatagaataattaggtcagaagtccacataggaacctggagtgaatatggctagcagggaggcagttgttgttgagggcccatttttcaacaaccatggaaaggctgcattgaagaccttgcagaggggggtccttgagatgagttaggccttctaatcaaagagtacaactgatgctgtcagtgacagaggctgggacttgaaattgagctctactggagagtagctgccaggacagatttccatgactggtatatgtgtttgggctgtgggtgagggagattaattggtagcagagatctttttagcggtatgtaggtctgtctcaatattttaaaacaggaatcttgagccttgatgaggagcttaatttgaaagaacggatcaaactgaagacatactagaacctagaaactgaagacatactagaacctagaaacccaatttaaatgacaacagtgccaagttgtccccattctggctgctcagaaggaggtatttcatggagcatttgcaggtggcactgcctatgtaggttaatgtgttatatcctgccttagacctagtgtccaacactctcagcccgccttgtgcttgacctttgtgaggggtgtccttgctgatgatgtcatcgttttcatggtctgtgcatgcacggccacctgggggatgaggggagtttttagatgccacacggtaagacccttgtctgctaatttgtttacataaagacctatgatctggatcctggccttgaagagttgatcctttagcagatggatacaaagcaggatgctggagctagaacactgactaactaatttggaggccttcttgttgattggcttctttatgttgggaagaagacagtttcctgcctcaccttagggctaacaataatcctgtaccacggacagtacagaatggtaacattagcggcagaaagagatgcaaactgccttccattacagtctggtaggacacaggggcagattacagcaggagttcattgtctaagttgtgttttcttctgtgcttatgtgacactttcctgatgataaggtagcaagatgtttatacttttcaaagttcttatttggatgaagtcattctatcttaagtggggaaaaaccgattcataggtaaagaaagctaatgtagaaggcaggatggttgagtacctctctgtgttgtacagtatgtgcagaaggattcatgtggtggccttgaaaggaaaaatctgtagtcttgaccatgagaatcctatgttgggcttttgggacgaggaagcacttctatatctatagtgatttcgtttagtagccattttagtagggcttaatggccattttctaagtttaaaccatgtgtaaagggcaaaagacccctaggatcactagaaagttcttgattcctacacaggagtaggaatttgagtaataggatctgcttattagtgttcattcttgtgaaatgataaggccacatgtgtttttaaatttaacacatttcatgttttaaactctaatatgtatattgatggtgctataaatattgtttagcacagtgaacttctgtagtgttgcagtctttgtggaaatgctctatctaccccgccaccagttgaaaatacgtttttatttctaagctacatgaatgttagaagtcctacatacggtgtatctttgaagctagcagagtgattaccgatattttaaagtatctagtaatactaggtatgtataaaccccttaatttacaattcatttcttaatctattttgctgccaaaatttcatctatcctcttggcatgccccccacccccatacccttcctcccaaagttcacaaaactttatagctgtctcatctgaggaagctgggaggatgataggaacatgagtagcttagtagtttaccacttctgcttaagagaagggtcatctgtgtccggccagccctgaggataaatctgcagagtgggccacttcctccacatgtcccccatttctatgagtgtatcatttcatgctttgtgtctcactactgattcggctcttgggagatctgaagctctctccttaaataaaacccattcatttattatttcttttgtttcttccatgacttgggagaattttcaaaggactcatacttagtaatgaatctagtgaaaagctattttattttgtcacagggacacatgcccatgctgcaatcctagatacttggcagactcaagcagtagatcttaagggtttgccaacctgggggtctcgaagggatgtggactgcttgtctaatagatacaagaagctgattcagtttttagtattgtgccaccactgttcccaaagaggtggtcccccccaccccccgtgggattgcatcttgccgccttctttaatactgcacaagtctttgggtctagctttgctagaagacagtctgatgcgccacactcgtgggcacgatctcatggtgttctaactatgagggaaatttacccattctgcacgggactttggcttgtacagagtgggttactatgtactctactttattagaagagttttatgcattttatttgtgtgggatgggacgttgtatgctgtggtgaacatgtgaaagtcagaagacagcttgttgagagttgggtccatggggttacagaggtcactgggcatggtggcaggcagccttagtcatagatagggctatcttcccagttcttacaaaacaagcacactagaaagaaagccttgtcccaaagtgctcataggatttgcttctttaaagtcttacggtaattttaaacttgcacctctaccttttgattcctggaagtgttctgatactagtggaagtgtgctgtcaattgattgttgcttgtcgctgtccctgtcgatccttaagttgttctgagaaatgtcatgtgaaagcactgtgatgccttaggtttctatttttttgaactgtttgagagacatgcatctcctaccagttcctgcagaggtagggttggactccagtgggaggctagcatctcctgtttgcctgcttcctcctctcattctcaccacgtgctgcacatctcgactatgtggagatagcctttctagccccttctacactatgcaccccacaaatgttctgctctgctagccttcccaggctctccttgcttgtgtagaagtcttccaagggaataggttaagattgccatcaagtggttggtcttggtagtggacaatagtgtgcacataagtccagtttcttagcctctctgtgcagaacagtgaagtttaggaatagtgtttgaggagtaatctgctcttacttatttgagctgatgtatgttaaggagccgtctttgtaatcccaaactgtgccttgtatcaaagacaggtacagctgaatctatttggctgggttcagtctggctactggatggagtacaggccatttagaaggagtgtacctcaagatctggcttaaaagtgcagtgcgtgtcaatcccgtcaagatcctgatcaaaagtgtgtcatcctacctcatgatctggattaaaaccctgtgtctattccagcctagagatctggaacacgagtgtgaccaccatttctgtctggttatagttcattccagataaagtcaaattgacaacctagaattgctatccaccccttgtcattcaccactcgacacacagttatatctccttatatcatagattattttcactaaattcaattcccaaacaataaccaggtcataataacgcctaacaacatttcttgtaaaaccacagatgcttattttaaatttacaataggttcttggggagcagcatccttttagtatctcaaacacaaatatgattttaattgatgttaaagaaattgaaagaaaatacaaatatgtaaaaatgtattcttaatggaatccagtggaagcaggagagtcagttaaaatgctcatttctgccgggcgtggtggggcatgcctttaatcccagcactcgagaggtagaggcagtcggatttctgagttcgaggccaacctggtctacaaagtgagttccaggacagccagggctatacagagaaaccctgtctcgaaaaaccaagaaaaaaaagagagctcatttctgcaactgctcacatggttcatagatggtatttataactacttcttctcttcattctgcattatctccatcctctgcaagcacctcagcccgtcctggttcttttcctggaaaagtgacccttaccttctttcctcatgggaatccttttgtccttctgcctggataggctgttgtagtttcccatggactttaaacagggcatggcaacactaagagaagccctacaggatctccttcactccagacataatctttctgcagcagaaagccctatatgtttggctcctgttgtttttctatttctaaaagtaaagtagtaatttttctctctctcaggagtgtcagtctcagaatcggtgaggattcctttgacgtcttagtagaaagcacaccctgcagaaggtgattagggttgaggcagctgcacgcaggagcagaccacttggaaagaattgaagaccaggtgtgcaccgttccaaggttctggatgtcagtaccttgaaatcaggatccattctaatactaagagctatggctttgacccggccacctttactttccccttgcaggctctcctccatggcgtgggtaaggaaggactgtcctacgagcatagaaggtggtccgaattagcaggtgctcctaccgctgtatgcagttgcttgcccttgagatctgtgagctgcctgcggtggtagtggtttaactgcctttgagctgcatgagaaaggtttctgcttgctcatttggaaggagaaaccttatttggagggaaaaaacaaagaatggaaaaatatccaaatggtgtaaatatgaaacagtggaagaaaaaaacctttggacctattttgaacagttatttcaaactgaacgagggtatactttatagtcatccacattacaatctgtcaagtcatattaagccagaattcctggattctagccatctcaagcaatattgaacacatcaaaaattttgaatgtgttggaatgaacattgacattggatcttaattttcattctcttagtagcagaaataatcagattaccagaaataatccgtagcagtaagtttacagattttgcagtatatttggagactttgatggctaaacataattaggaaatctgagatccaaagcacctctaaagcagagttttttgagcatcataagggctttgggttttgtgggtcttgagacattgctctatggtttagaacacttgtggtttttcttgggtgggcttggctgtcctgagtccagcactgaagagcagactggccttgtacttatcctctgcccccagagaggaacacttttttcttgtagataaaaggacgctggtttggttcccaacaaccactcacatggtagctctagttgcacttacatgggtactgacgatttgtttctgatttccaagtaagtgcactgagtacaaatggcacacatatatacatgcagacctgggcctgatccccaggacccagatggtaaactaacaatctctctctctctctctctctctctctctctctctctctctctctctcacactctctctctctctctctctctctctctctcactcacacacacacacacacacacacacacacacacacaggtgttagctttgtcccattcattgggtatggcagagaatgactttctggtatttatatggcatattgtctacattgtatttttggaccaggagttgtcttttttttttttcccctttggatgaatgcatggaaggtccttgtgaagtctctgtcaaagaaccaaggctgtatggtgtgttcatctccctaatcccgtgcaatgcagaaaaccgagtgtgagtgctgcactacctcttggtccaggtgttaccaagttaataacctaaaaagtgattttcattatgaatgggtttagaagccatcttgatgtggcctgggagtaaaggaaggtctcaaagtttacaatggggacccaaagagagataataggcagtgtgcactaaataccagcaatagttacaaactgtgttgaagctcttgtaaatatattgttgctttctgacatataaacttctaaatataacattactgaagtctctcacttgttggcatccatttttactctagaagcccatttttacattattaagtatacactcttgatttgaatatgtgcaagtatgcagtcagatatacagatcagagatcagctttctctgtctattccctttccactatggggtcaggctgttagtcttccattgcaagtactttcatcccctgagccattgtgctagctggtttactagtttagaacgatactagctgtgtatgagcgaatcaagttaaaagaaccagatgacgctccttcttaaacaatatttcactgtaagtttcatatgttcgttgttccttaagttcaaagttcctgcatttctctttctgccagcagccctccaaatgtgtttctcagtgttgtataagtacatactttcaaaagattgaccactcccatctttaactttatgggtttttttttttttttttttttttttttttgtttacctcttaaaatcagttgagtgcttttcagatattttaaaatcgatctcaccgggcgtggtggcgcacgcctttaatcccagcactggggaggcagaggcagggggatttctgagttcgaggccaacctggtctacaaagtgagttccaggactgccagggctataaagagaaaccctgtcttgaaaaaccaaaaaaaaaaaaaaaaaaaatcaatctcccagccatacccttcttcaatcaaaatgtatttattgggatgcttctctgttgaatcttgatcaggatgccgtcagtggtgctgtttcttgaaggaacagccttctctcattcgtgcttttctgcctatgagctgacagtggagcagccaacataaagactgctgtttgtgcatggctttggtgattttatagtgtccttgcatttcatacccaccctaagtgggcttctataccatatacgtgatctagtatttcctctcctatgtatcctggagaaggagagaatcatcccttgggaggtcatgttctctacagggaggccatcaccacagcggaagccattcctctaatgtttgcctggcggccctcccactcatggctgtatggctttagctttcctggaaactcagctctgtaggcttttgtaggctttgctttaacccctaacacgtgtttacctgcctcttcctcccgaatgctgggaccaacgctgtgtcaccattacctacctgttttgttctttcaattacagttttggtctcttggtcttttcgatgttgttcagagcaggcaatgtttaaaaagctttgggacacttgatttttggaagctaattaataatacaacataagattatagaccctttctatcttgttctgcttagtaggccgtgttcctgtgacttgctctaagcctactcagccagtaaggacactgggactggaacatgcagtcttgttctgcttgtactatccttagagaaatacctcaccagactagattctctctctaatactctacaactgcatagaggcatctttaattttcaaattatcccattttgcaaagagccctggcattttttaatctggccttctgttctgtactctagactacattgttgtgatgcccacttaagggtactacctcattaatgaccaccatttgatccaatgggaaagggaaacagagggttatagttaaggttagacattgagtattatctcttctgactcatttccccactatgaatgctttttagtttagttgattctagtggtattttattagcacgaacaaacaagttagctgtatgaaatttgtcactcaatgtggatcactcttttgagttactacaattattggtattattatgttattgtatgggatggccccgatgccacattggttatcagcacaactgcatgtattacccagtatgtgcaggcctccctcccctctttggcattttaagaattatcaaggccatttggtaggcttgtgtatacataatcctgcttggtagagagccagtgcactaaagcttagtaaaataaaaatctaaacaaataattacatgcaattgtccgtgtacctgattttaataataacaatggttttagtatatttggttattatatattaatatcttatattatatattaataaaagtcaaatattagcccagtgtatccttttttccacctttttggatcttgttttaataaatcacacctaggtgacaggatcattacaagaaattggtcaaaaggatcattagggtgtaggcatcctttgacactgttgggagattccttacagataccaaagctcatggaagactcatatttgtaaaactttatagccaggaatgttcttgtatctagtcttccactactcaggatgtgtgacaggagaattgtcagttcagttccagtttggacaagatggtgagctaaggccatcttagatcttggggagtattaagggaaactagattctgaaacttcatttctctccaactgtatgtgtgataggtttcctctattgcactttccccagaactggtcatcaccaaagtatcttgcccatcttctttccagttttctgcagtgggtgctttcagtattgaagagcctagaggagccctgcaaagagggaaacaggggtggggagattcttgaatggcccccctgtctaaagagacatggtaacttggagtgtggttggaaaccagactattctaagccacagctttatcatttatacaatagattcgcaccattccatatgtgggtattacaggcttcagaggagattgtcacttccctcttcaggaagtgctgaaatgcaggaaatttcttaggtgatctaagaaatgaccatggtaactgtcaggcatcataccccagggaaagctagtatctgcctttaccatttgcaattaaattatgactatattttaagagcccagaaaggtaagaaaaacagagtcaacttcttaggctggggtgttccagtccttgagtgtgaacttcaattcagtgctccgctcctgcttttagacaccatctttacctttcttggaaggacataaagagaagcatgtgggtagtgtaaagcgtgtattctgcacatcagcattgtcagatgaagctcaaaagcttcaaaggaaataaatgacgttgaaaataaaaaaagacagacagacagacagacagacagacagacacacacacacacacacacacacactccctccctccagctactggaggccagttggatgcctgcctttttcacccctctcagcagctgccaggctacagagcctgttttgtgaaagatcaagaaacaatgagggaaaacagcttcagcttgattagattagatcaatttatgtgcctggggaggggcctaggcagggctgggggaggggtgtcctgtgctggcagtggcccatgcctgcccattcggtcacttcataagtaatgaagctcccgtggtggctggaattgcaggaagggggagggaggaggtggaggaggagcatgtgaagagagatttctgcagtctgtctggagagctgcccagggttcccagccaaaaaaacaaacaaaaataaataaaagccaagtgctgaatgacacagattatgatattaaaaagggatactattgaaacattgccctgtttcctactgttgttggaaatgggtgtgtgcagaagcgaggggcggttagtgcactgtacaacaggccattccttggacacaaaagtccgtacaattaaattgtgaatgcccctcgccaacgtcccctcccccacctcatgccagaaattctgtaattttgatttgtctgcattgcaggtcatggaaatagcaggatggaaagctagtttcttttgccttttctcattttaattcatcaaaatggtaaaaagcggggagggggaaagtcagccagatgccccctccttttcagtgttcaattctcttccaggcacataaataatcttctctcccgactgtctcccctcccccttggcccccgctggtgttcggctgtcctattgccgcgcggaatctgcactgccgcttgcttattacgtacaggggaggattgttgacaagtgctccggagcctgcctcactgcgctctcccttcctccctcccttcctctgtccttcttcctctgtctctgcaatgatccggctctgaggatggctgctccacgggtctgtcaggtgcagtttttggtggcttatcttgaggaacctgggatagaaggtctgttcctataaataaaagaaaaaacaaatagcttgtgattcatttcagtctgatttggcttttgttggagaaataggcctttgtgggttttcctgctaggggtcccgattatatatccattatggatggcaagggacacacacacacacacacacacacagtatttaaagtgttttgatttaacattattttagatttttatatcttccctaagggtaatggtggctcctaagataccatggaaatttacaagagagaattaatgtcgttcttagcacattaagctctgttgaccattttgaccaaatctgcagtttaaatcttgtatgaatttagacatttctctggggattgaccaggcattcagcaatagcagatttctgtgttaatgttaatatgccagtgtatttgtttatttgccatcgtttagaaatagatgcttcatgaaagttaagtcacttcattcttaccctacatctagttgcttttataaatagaatgtttggtttcatttccctcatttcattcttttcatgttattcttcccttaaaagatggaggaaactgaggcatgtgagtagaagccccatccctatgtgattctggctataccagaatgctttatactcggtgttgctttgtttttaatttttgtacatcatttcatattttcattagtgtgcataaagtcaggtgtaccactggtccggttgtggggcacattatagccacattcctatagtcttgtatagcttttcattttatttcaatattcgaaagactgttcatctgggtagcagtaggccttggtaacttatttgctattcgtgtttggactctcaatattgtcatttgaaaagtgggtgggcagttgatttgtttgtatgcaattgagataattaggtgcttggaagaaattcaccccgccaacaaaacaaaagaaaacataacttggaccctaatgtgtttagtgtatccatgagctgttgttaaagatatggctgataaacacatccataaattggtgtgggtcatatgtggctttggtaattataagcaaagattagttcacaaactgtttaaggttatggagttcaatgaaggcctgcaagccagatatttgagaactggtttcattttggtacgtacaagctttaaagttctaaaccgttgcacacatttcaatttcttgtagaaatctttatctgtatggagcaccaaaataagtcttgtaaacattagtctcactgatttttttttttttaaagctcttgtgcctgtcctcatagctctcagttccattgttctgcagctcattttccacagtagcccaataatcccagtagtgcctgtcatgtgctctttccttaatatagcttttgacctgagatggtcagtactgggccttaaatgctgggaaaccatttttgtaggtggggatccaagctgttggttgtttgttaagtaggttgcatggtaggcatgtgcttaacctgtgtgtcagtgtgaaatggagacagatattgggatagtaggtatatctagaagttagagcctgagatagtggagtggataccgtctggaggtagagcctgccattgtagagctctgaaggtgcttgagggcagtcttgaaccctacttattctaattgctgggaaagtcatgattagcatgagtgagtgaaagggagaattaattactatagtgtcaggttaattaatataacctgtggttgatctttgacccaaagaaatgatgctgtatgctaaaataagtgcactgatagtccctgggctgtttaagtttgttgttgttgttttagagatccgagatttaaaagaaaatgtgcatataaagttcatttacgagatgtgctttgtttgatgtttgttattagagccctctttctccttgggagcattggttaagatgtgtgaagaaggggtatcttttgtctttgggtgatgtggttctctttcatccagagctctagtcatacagactgggacccattttgtaaagctgctacactatattgagatggccacagggctttttggtgaggaatatggttcaaggtgaggaaatgttttgttggctctggggcacgtgataccttgcttgcatagaaataaatagcttttccagtagcccagatttttcctgtcaccatgttgggctattgcttcttttatcaaaatgttgcccttgaaaaagagaatttaaatttctgaataataatgtctgtgggagctgagattgatggtgggtgaagaaaggtctcatgtagacttttggtatattaatcagtatttatatctatgtgtttgagatgtgacagaaatgatgaacaaaactcaatcttacctttccatagtttgatctattttgaggttccacagaggctggtattttgattacattttcttgactaaaatgggaaatctcttatgctgatttgagaggagacaaaggggagtctcagttggctgaggggttgctctcatgagagagaaggataattattttctgtaatccagggtaggaagccattttcatttgcgcctcgttgaccacaagtgtcacttacatcctgccttatgactatcatttgttctcagccacatcagagtggatctgttatgggcttcccaggctctgtcctgctcacccctgcccttccggttgtgttggatgttcaatgctgacctgcatatgtatagttgagggttaatatctgtccacattcatgtgtgaagctggttcggcatcagaatgcctgctctgtttgtaaagcagacaacccagtgtttctttctaagtctgagagaaccaagactgtgttttttactagtaatggcggcaaaccaagcattctgattacctaagagaggttcttgcgttaaccaagaaggatgctattaaaattttcctcccaactaaaagtgaacacatatgtgcgggcacatacagaatgataaattgccattaaaagcgaaagctctttgggtgcttgactgtttaatatgtaatgtgataccttgtgtcacggtggcagacggcattggctctataacagagaatcaccttttgtgcatacttcgtacagcaaagctaaaaacattgactctccctaatatgctaataagttttgtgtgctccagatgtttgagaaacattggaacagcttcaaagccctccttgttttcatttctttttaacccttctcttgacactgtctttatagaatagagttttcctctagttttgtattctgccatgtcttctttgtgtctaaaacataataagtgctctgtactattttttagatgttggaaaacaattattttgtgtttatacatttgtgttgtataatctagatttaccacttattgcttaaagattctttagttgaagaaggcattcattttcatgtaagggaaacagagatcatgtacacagaatttccaacatgcatttaatcgtctgctactgttctagactgtggtgctggaaggtttttcaattgttgctaatttaggagatgagctgaaaagccactgaacttgcagaggccctggtagcagcatgctgctgtgtttaatttcttggagggggtttctgggtaatatggtggtggactagtagtatccaggctatatccagttggtggtggtggcaggcccaatttctgagctgtctctatgccagtgattctgactttttgattcagctcatatttattgcttttgtgaaagacaatagactggtttaatttaagtttaacctactgaatattaatggaggagaacaaatgtagagaggctggatctttgggccattcagtttcctctctgttagcctccagtctccagcaaacatttgtgttagcatttgcagaggtggggaatgagggtaggggtcgtgaggggtccagaaaatgtaaaatgtggggtctgtgtatgggaagggaatgctgttacattatttctactctactaaaaataataataatttacatcattggtggctgtgctgttaaacaggagaaagaaaaggcacagaatatacatatcttgtgttgtcatgatagctattctgccctgtggcatcatactccattctgcagatgcaggtctcctagtccaggcaggctttatttaatctaaagtattagaaaatgtgatagttggagatgtaaaagaaagtaaggaggagatggggaaaaaagaataaggaaataaattgggaatgaatgctctatttaagcatattgatgaggaaacttaaaaatgagtataattttctgaatgatttttatacggaatggaagtattgaaattgaaaatattgaacatgcacagaatacaatcagctctgctccctctttaaggttctttttcaaacactacctctatgttgctctctctagttcaggttcctctcattgtatgacttggaaggtgaaaagctgggagtgccctgaaggtacgagtttgatgaggccagtggatagtggagcccccatttctattgcattaatgattcagacttcccttaggatcagaatagctttattcctccttacttcccactgagtgcttaatttctgctaaaattctaagagagatcgcataccatttccctatgcattctcctaatagtttgcttttgggtagaggccattttaaggcattttgtactttagatgtgtactttcttccctaagttctttcctactgtgcttgttggcttgggttttttgttttgttcggtttatatttatccttttatctgattcttggaagcctctcgacagaactattgagaaaagttatctaaaattcgctggttatgaagaccactctgaattgttacctataattatagtcagttgcctgggttcttcttttcttgttcaagtttactccagcttagtagtagctcaggaacaataggtcttccattaactgacattagtcatggattccaactagcattacctcacctgggaacagtagtgcagaattgagcacatgtgcatctgggacatgttcaaattggacaagttctttctgtgtggagttcctggtaaagcaggaataaagcttccaatgtgttctaaaggaccttcctcagtgtcagtagcctgtcttctgatcacttcttacccatccccacctagtttgtatcccatggttccttagtttctttccattatccaattagagttgcatcgtagtttcctattagatttttatttatgtgttggtgatttgcactgatttccattcactagctttttcctatcacttgttccttacttgatgtgtaaagtctttatgaccatatatgtgttgtgttctttgcttgtatatcctaaagtcaatatagtagacattttgaaaacttttcaccctttttttctgatgaattttcctgtgtgtgtgtgtgtgtgtgtgtgtgtgtgtgtacactatttaatcataataaaaaataggtatactacaattggaggtgggatatcaaaattttatttccgagtctttcccttttcttgctaagatattgaaccagacttcactgctgaactatattctggccccagtcacatttctttttttttttttccttttttttttttttttatgattgcttttctttttttccattttttattaggtatttagctcatttacatttccaatgctataccaaaagtcccccatagccacccacccccacccccactcccctacccacccactccccctttttggccctggcgttcccctgtactggggcatataaagtttgcatgtccaatgggactctctttccagtgatggccgactaggccatcttttgatacatatgcagctagagtcaagagctccagggtactggttagttcatattgattcttacgtttgcctttcgccatctggtaatctctgaagctagctgttatagttgtctctgttaagagcttgttcttcaggtgaccctgttagcctctataagcagacctgggagggtagctctctccttagtttgagtgggcagagtattctctgcaggcaagctctcttcttgcagggagggtacccagatatctggtgttcgaaccggactcctggcaggagttgtgttccactcactagaggtcttaggatcccgtggggaatcctgtgtgggcccttgcgggtgtcgggctcatccgctggcaaggtacctcggggcgcgagtggagcggaaggggcttgtgccccaggtcaggcccgggtagtccacttccctatttaccgcagtctcaggttccgcgcgattggattggggcaggggctgtgttccactcacccgaggtcttaggatcccatggggaatcctgtgtgggcccttgcgtgggcgcctccgctggcaaggtacctcggggcgcgagtggagcggaagggccccagtcacatttctaatggtgttggaaatcatatttgtataattccagtattggtgtgccaatgtactgctaatagaaatgatattttggataaatatacaattttttttttttagatttgcaaagaacattgaaacaagtaggcaaaattaggaaccattaacatcatttaatcctttctgctgttatatttggtgattgctgcttctgggatcctgtggtggacctttccatgtttgtgtccacaggagtgcatccatggtagtgtgtatatacgcatcaggacttcagatctagagagcaattgttctttgactaggtctgagacaagactgggtacaagctacgttgttaagggctctatttgggtttccagtttgcctctaagatgtgtttatgatgtttctgtgggtagctggtattggtcaatttttgttataaagtaaatatttaccagttggtagctatttagaaatgactcattgggtttttatgataattgtcacatcttttctagccttgaggcacaagagatgttcaaaataaaacgtactttagtcaggtctctatctaataggtagcatcttagatgctgaaacaataggatcactcactcaggtcagactgcattgagatcctttctctgtatcaaaacccgatccagctcccccccccccccctctctctctctctctcacacacacacaccccagcactcacgcgtgcgcctgcctgtctgtcttgaatttccttgttaattgtttccttcttaagcttttgattctcttatggagtgaggctaatttttcttaccccctttaaaggattgtatgtgtatgtaagttttctgtccttgtcagcttgggcacagggtagaaggaaaagtgctgctctgatgtaatgtgtttaagtgtttgtcccttttctcacctgtagggcttcttggtaatgcccaggctaaggcactaggaccagcctcagagcagtcagagaacgagaaggatgatgcctcccaagtgtcctctactagcaacgatgttagttcttcagattttgaagaagggccgtcgaggaaaaggttagtacccaagcattagtgaataaatacatcatggggcagggactgtcaattcagttgctaatgcttgccacatgggagcaagtgtgaatctaccacaggagtcagaactaaagctttcccagtaacaatcctcaaaaacaaagatggataaaagtcattaatggcccgggtgaaatttgttcctgcctgtgacaccatgctggccagaagagggaatccgatattattacagatggttgtgagccactatgtggtactgagaattgaactcaaggacccctggaatagcagccaatccccccttccctctttttttgtttattttgttttttggtttttgttttttttcgagacagggtttctctgtatagccctggctgtcctggaactcactctgtagaccaggctggtctcaatctcagaaatctgtctgcctctgcctcccaggtgctgggattaaaggcgtgcgtcaccattgccctgctgcagccaatcctcttaacagctgaattatttcatgagcccatcaaatttattcttaatcagcagctgttttgaaatctgtattaaatgcgtttttgtcatttctgaagagatttctttcccaaaatgatagagacttcctgtggtattattagcaaataattgttcttgtcatgaaaatattaatttactgtctacaaccttaatatgtctgattttaaccaaactgtttttatatgatttttctacataatttaagatagttcagtaaggtggtaggtaggctaatgctattttaagatttgtggcagtgaaattacataacggttccaactgggtctttaaagatctctttgctagcaaccaccctattttatgtcttattgtccaccccctttaaaatttacttttaaatttgcatttgatctttatgactataattttgcaatgcaggtggtcagaattgaactcaggacctttggaagaacaatcagttctcttaactgctgaggcatctctttagcccctatgactatattttaaaaggaaaaagttcccttggtttgaacttcttttcttggttgattcatcttgactataatgaccctttggaaacaatttagatgtctatctttaatgaagtacagagaaaaattaggtgaaggaaattagccatgatttgtgcttgcaagttgagatgcatagctcaaattctggttttgccttcctttccttggtgtctaatagcatatggtctatgttgggtctgtataataacttctcctagtcattgtctttaacctctcaatagtgtctcacattgctgttttgtatgttagcagatttaaacacacaccagaggcgtcgtgtcattatactaggcctgtacttttctatgacgaaccttttactgtataccataaggagcctctttccccatttgtaaagggaaccatcactagaactgaaggctggaaaaactagtcgcttcagtagatacattggaatgtgtgatagtatctgtgctttttagcatgggtggtattcatgtccctgacatcagctttcacctgcatttggagagtgcattttttgagtcaatggttatataatggttaaataatggttatataatggttatatattcactattgtgtgactgaccatccacccctcccagtgtctcattctcttggatgacagtgatggtggccttttctttttgttggtgcactcgagtgctaagtagttatttaatctgaatttataggacagtagaaataggaaataactttgtagagttaagatttaattagtgcaaatctttttctattgcattaaatagtgctccactgttgcagggtgctagagctggtttagcagaacagagctcttgttctcttgtagaggacccaggcctgattctcagcacccatatggaatggctcagaaccacctgtcactccaggttcagggatctggcttatgcccgtggtagcttactcacacgcagggaaagcattcatacacataaaagtaaactttttaaaaaatcaaagcaaaagatttcattgtcgcaaatgaaaaaggaaggcgggagagtagaattaattacagtatcagttcgagctaacagtcaaactcttttagtaaaacttattaggtatgtgtggcttatggttagataggtaatactggctttttatcacttttgcaaaaagtgattttatttttaaattacatgtatgggtgtgtctttgtgggttgtgtacatgagttgtagaagctgattgttggatctctctgtaatggaggccatctgatttggtgctgtgaatcgaatttgagtcttccgaaagagcagtacatgcttttaattgttcagccatttacttagcccctaattatgctagtgtgagacacactcaaagttggattatagacttgaatctgttagttttacagtgtgaagaaatactttgttttggttttgttctgtatttagtgggttgtctttggcttttttttttttttttttttttaattagaatagatgaattggaattcctgcagattgtcatcgtatttgatatttagaatttctgggacaaaaattctcaaccctaaaagtccagggtcatgatatatatatatatatatatatatatatatatatatatatatatatatatatgcatgctttgtagttaactttttttttttctgatctgaattgtggtgattgatagcttatccttttaccatttagttactgctactgtgtgaatggtcttagttaacctgttttcacttatgttagggaaagaaaacagtaagtagaggagagtgaggtcgtgctgttgactcattctagagtctatatgcatttgaatgcattttacccatgaagaacaatatttgtaatgataattcttacatactacaaaaattgtctgttgtttaagatgaccttgtgctctgtaacattctctttgagaaatcaggttaagctgtatatactcagtatacttgtgccatagttggtccctgatatagttagaaggtagaaggtagaaaatagtagaccgtgtggttctttctgagtctgtatcattcctatttcaaaagcccgatatgttccttttatcctgtccattcaagatatcattgaagccagtcttcatggaagacaaagctgccctggagttttctgctcctttgggcagtgggcagtgttttcaaatgaaggctggacacttgcaatacaactgagtgctcctgtggggtttttgtttatatgttaattaattgaaagaggttgttcaggctgtctttgaccctgccctcagccttcccagcagtgtaattagttatgtgtccttattcttgaccttccacccccttcctttttttaatgggtgatatttataatatacatcagagttttctgttcgtgtatttgtttacgttcaaaaaaattgatgatgaccctgcttagacctttcccttaagctgtctgtctcattccttcaggcagtcttgtggaggaaacattttcaagtgtttcagtgcgtgtagaaacaaagatgaagagattcaggtcaataccgtgcagagtagtggagaggacaacattttagaggaggagttgtgaggataaactgataaccacagttgtcaaatgagccagctgagttggaagagaataaaggtgtgtggtatatatagtctgtgtgtctgataatcactgtcagccaccagtaatggttgtgatagggttactgcaggattaccagagagttttggtttgcgtgctgtgttatgtctcttcaccatttcctggcacagcgatctgtaggcagaggaaatacaagaacccttttccccgttttgaagtgaactaatgtcatgaaaaggatctttatggtgaatggtagtgattttcctgtactgagctaatgcatgccttcagatatcaggagtggtgcaaattatagtttataaaaacaggtgttgaacagattccatggagactattcataccttagtcatctttttagctttggtagaggccctttttcataatgccaacatctctgacaggaaggtagtcttccaacataaatcatgcctttggtataacatgcttttcaaaaggaaatgttatctgcgaaactagataaaatgctaccagcgtagggcatagaagaaatgaaatctggttttagattattatatttaaagtggcttttcatgtaaaaattcctgggtttgtgtgatgtcacgactgaatccagttaacttctggatatgaatacctgtgagcgttctctagtagattgggtcttaaagcatctttttgtcaaaactcattgctggtggtattgttcagggttaaatgcactaacttattggaacctctaaagtaaatagacaaacaaaagatcactgtggaagtaaatatgaagtaaatagtgatgtatttaaactcttcttcttcttctacacacacacacacacacacacacacacacacacacacacacaccccgtctcttatgtatctcctggaacttgctctgtactgatttggaatccacctgcctgtgtttctccagtgctgagattaaagggttcaccctgccctgtgtatttagcactggttactttctttgctttagatctaatgccctggcatttaaaaaaaaacaaaaaactggaaagagtttaatatttataatttgctgccagtggcaggttctgttctttgttttagcctcatgtattttattctgtgaagggttgtacatatgtggtaaaatagaatcatcttctcacttcacagtattttttgcctgatatagaattccatgttaaaattgcttctccagcagcatgacagtggcgtcacttttttgtttgtttggttttggtttttcgagacagggtttctctgcagccctggttgtcctggaactcactttgtagtctaggctggcctcgaagtcagaaatccccctgcctctgcctcccaggtgctgggattaaaggcgtgcgccaccatgcccggcctggcgacttctgtctgctggtttgcgtagttcttagttttttgagagaagttacctgtatatatttcattctccagactagaatcccactgttcatacaactactgattcttacttagcaggtagacggttcaaattttgagatttcatatgcattatgtttcttgcccttgttgtttgctgattgtattgttatattgttactggttagtcttaagattttactgcttctagaacaatttatgtaattgattgattgagtggggaagagtctgtatttctggctcacatggaccttaaattcattctcaacttgaagatttttctaggacctgagttttaactctcatgttgaatcctgaataagcttacactggatagatagctcagtagataaaccacccgaggacctgagttcaaatcctcaggatacatataaaaccttagtgtgctcacaagcatccgattgctggtatggaggcggagacatttagaaccatctgaagcgtggatacaagttagcttggcatgttctgaccaccacacatctgcatgcacataccatcaccgccaccaagctggatgaattgtctcctgtgggcagaaggtaaatcctgtctctgtactctcatagctaaaaacatgcattccttctctgtgtgagaagagaaccatccaacagtgggataaaagttcaagtagcattatcttcagccaccagcttttcatccactttagtgaaaaataatatttcaacatttttgtgtttgagttgtacatattgaatctcagcccacagtaaagcgaatgagtattagaaatgcttatatatttgaagttctaaaacctgtctctgaatgaggctttacattgatagatgacatggtgctaattactagagccaccttaattctcttaattcagaagaatctctaagatttttattactcactctttacagcttcattaacaagatgtgaacagaagagtcaaactgtatcgtgtcaccttccaaatcatgtgtttaaatatatataggctttattcttgaagattcttcctctgcccaaaacacggtaacaggaactcctttggggtagccattgttttatgaactcagccatgggcacatccatgctcactgaccgacttggttattctgcctttccatggtccccacaagtcatgtgcaccagtgtataacttcttctctgccaattgtattccttctttcatgcaatgaatgatatatttatccctcataaactaacaatacagagaaagtgaaaactttcagcttgcttcatgcagcacacacacttctgaatgcctattgggaccctctgctgttatttgcatgtgctctgcctgaggctggagaaccaagagagagaagggttcttcccactgttcttggttggtcttgaggtaggtctgtgacaattttgtgactttaacaggttttgcctccctgtgggatagtaattgtcctcattttcatcagtggtatgaaaatgtttgtgacctgaaggcatgggtaaaggtgcctcaatcctgctttggaagatgagtatgtattgttgcagtgtgtgttccttaaccttgggcttctgtcctttcccagggaacatgctcacaaggtgaatgcaaggcccccaagtgggtctcaggtgcataaacacagagggggtgagctctccagtggagtttggtctcccccatgtttacttagattctgtaggtaggctctccctggggatctttgttcaaacctatgttctgtgttgtctgattccccatctttcagtagaacctagcatagcagtctatctgtgtaacttgaaactagtcaaacaaaaggccttatgggtgaaatgaatctgtttttctccctttctgtcttacatgtttaactgcctgctggttgatttcttatagttttgttgtggtgattgattgttttgggtgtatggggttgggttgtggatatctttatcattgctcctacccattgaagcagatgttgagtttagtttatgtgtgtctttctcacacatcaggactactttgttctgtataggcagatttcttcaagtccttaggtgcagtgcagcttagccttccgtgaaggaagtatatgtgataaaaatggtttctgtggtgatcatggtggtgcaggatggtggtggtgtttgttgggaactaagttcacagccctagaaggcagagtttggaattgtagtgtgacctctgcataggatcatatagttgaatgcctagtcaccaaggagtgaaactctttaataggattagaaggattaggaggtgtggccatattggagctatgtgactttggggtttaaaagtgtatgtccagcttgaactctctcatgctctcatgctctctccctccctccctccctgcctctgggcctctcccctccccagattcaactctcaagggcttctacagtattctgtttgctatgctccctatcatgataatggactgagaggttgaaactgtacttttataagaattgccctggtcatagagtctcttgacagtaagtagtgtggtgtatgtgtggtgaccgcagtctttcggtgaagtactatgggatcagttatacatgagtgactaaccaaaggcagccagggatttggagttcagtttataaagatacatactgtatggcatttggaatgtacctcttcctctataccctatccttccagccaaagtaaactgttattacccagataaagatgataatagtgggagctgcctctatgatgctttggctgaatgcctgcattttttccaggatggggaatctgaaatgtgggacttgtgggccttaatcatttatgtccttactctcctttcttttcttggagtcatggttgggagctgatggatggtatgggtgctgtcccattgcaggttccctggtcttggatgagttttagttgtcctacaatggttctctgtatttggaggatttcttttactccactataggtatagtttccccatagttggcttatgtgtgtaattgaaaatagtatacagaactccatgattgttatgtatgttcacggccccaagtaattctcaccacaatcccttggatctttattatttaaagaacccattttatatgcaaaaaatcagaggtataaaccaaagtgcctgtcttcttctgtacccctctatctagtatgtagggaaaacccaccttttggcttcttaccttgaatgctcaataaagagacctatttaaggcactgtgaaggaatatagaagagttgtgttttgtagttttagtagtctgatgactcttgagtgtgactttcaaggcggtgaggctgctgtcacatggagaagtagcttcatgcactgtgatagaaaggccatggtggatccatggctatcttgactcgacactcttgttgacaccagtgaagccaagaaattctggtttatgcgtggtgtgtcctaaagtctctagtgtggatgcttcccgagtggagttttcagagcagggatatatggtactttgagcacacatgtaggtcaagagggctcaccccccttggagtattacattaatctccttcattgttgtggtagtggttcttttgttttctatttgaagcatctagtgtgtgctcctgccttactatgattagtcaagagtgtcctcacctcatgaggtttgactattaactacacttgggatgatttaatggtattaggtattattagtaggaagtctatcctgtgaagaataattagatagctatctagaaatttagagcccttctcttcctttagggagggcttgtaagagtgggggcagggggagagcctgtttcatgcttgccaggctctccttggctagtcttcctggtgtttcaatgtgttttgtttttgtttttgacgactccccccccccccccccccggcataagtaccaataagacccagaagccacctctaaagatcagaatcgaagtagtgttagtactaggaggagcttctgtgtgttgggattttgcttgtaaggctggatgcttggagtagagttatagagacccttgtttgtaattcttggctgggtttagtctgatcgccacagtgtgtttctttgtgcttctctgatagcctggtttgcaggcatccttttattaccagatgtggggtcacaacctgtgcctcaagcaggtcttgctatcctgaataagaactaaattaatactgggaagtagagaaagattcattcattgtgatagcactgtgaagaaggacaaagcgatcctggtcccccatcccccaatttttaacacagataaaaattattccagttcctccagtaaaattattttgttgctactcaatactaattttgtgggtgttctgaattataatgcagatatctgatacacaacccctaaacaacctgggaagttctgatctgaggggatcagttaaacagtcagtgtatgaccctgcttaccattaacccatcattgactgggcctcaggctcatcattttaagaaggtttgagagttaaaattctgtgactgactgccctccacaagggattggaaaggctgaaggctgctgtgctaacttcagccaccctcaagcttttgaggcagagctgtttgtgggagatgaaacaaagtggtagtacagtattcatctcttttggaagcctcagtttacacaatacactgatttagaacattatcaagatgctcttcatattcctggtatcctttctaggaaacatggaatgacaagttagggggctgctacaggctgggcaggatagtcttaaacctcagaagcctagctagctttttgtaatacagtaactaggttccatatcacacaagggagtacttggaatactgttatcaatctctgtttctacccaggccaaggtgttcttaaaggcagtacagtagtatttcaatgaatttagaatatagctttcttcatctgtaagaaggatcaggaagagttcttttctatatcttaaaaattatttatttattcagttaaatttttgagattcacatagtacagggtgactatgaaggatattggatgactgtaattttagttctttgactttttcttggggtccagggaaccaacctgttaggctgtggagcaagtgcttttactcctgatacttctttccagctctacattatttgtgtatgtgtgttcatgtgtgagtaagcagcagagtgtgtgggtcatggatcagaggacagtttcttcttcaccagggattgcactctgggcgttgagctttctgggtaagtgtggtcttgtttgtttgtttgttttgtttttttgtttattttggtatttatttatttgtttgttttactctgtgtcatgttgtaggcccagagatttaattttgaagcagaatttctcctaccaaattagctggcgtaagagatgtgtaccatcatggcccagctttaattttccatttgtaagcatgtatatgtgtggtcacatgatggtacaaccctgtatttccagagatcccattgcatatcaattctggatatgacatgctttgtgatttccttggagactgctaggtactggtttcttcctgtcctagtgttatggttttataatataaagtgatgtcacatgctttcgctctcctttacatacctccagcagacaaatctaaacatcacttcaacatttcagaatagattggccatcctgcaacatcttattagttctatgttgaattttagtttggacagattcacattctgatgaaagacactagatctagatatttaagggtttgagttactaggattgtgaaggaggtgatagcagtaagtgtcacttgtgagtcatgggtttgctcaggtagggagttcttagacttggtgagtgttctttgacactctcttctttcccctcctccaacacggggaggcagcaaccagtatgacttgtttccaataaatagcgttggctcattcctgttatttaaaattcaaagaggggatagaagtaatagattgtgtatggtgtggattccccagccctaacatttatgataactaccagacaagacagtttgtttctttgctttagtcttgtccgctttgatttatagagtagaatttttcagattcccttaatacatttgtctcccaatagtttcaagcttggggttgtttcaaattgatatcaccagtgtttggttttatgtttatgtttgtgataggagaggtatggcaaggcttctcttgatggctcagtctttagagagttgctcttaactcctgtacagatgcaaaagtctttgtttatctttgtatctccattgcatggtaaagagtatgtggtgtttgatgaatatttgtttttgagaatataaacatttctagaagtagctaaataaaatactagaaacgaaaaagtttataaaggaatcatgatatttcagtacacaatcctgtgtacaatagttcacatctttctcagtctatcatattagagaactgtttgtgtatgtgtgtgtgtttccacctgttcttttgtgtgtggcaaggtgtcttttctgtgcatccccacatctcactttctgttgttgttttctcccagtttataactttatagctctatatggacaccaagatgtactttttcaatttaatcttaattttagagtacatctaactggccatggtatatcctcctcagagtaaaggccagagacttgccatggccgtctttacttagtgatactgagagaacttgcctcctgtttgcttggtcactctggttcttcctgtcacaccaacttcagttttcttgtttctttattcttttacttatctttttttcccttaaattctgaatttcaggaattttaatatttggtctttgcctagccaataagcctcctctcctgcccctcccctttcttcctgagccctgcagtgttttcggctgcctttgcctctgcagggctggaatttaaggagtgtgccatcatgcccagctgcctacttgtattttgactttgctttcaagacagtttctctgtgctgtcctgactgtcttgagacttcagttatgtagatctggctggagattgccattcctctgttggggagaaaggtctgcaccacctcttcctgaccccagtttatgttttgatgaagtttttataaaaacagtacctgtgtcctcatattgagctaatctgtgtcaattcctgccgatatatgcaatgtttaaaagaaaaacaaaagttcgtgtgtgtgtgtttgtgcgcgcgcgcgtatgtgtgtatacacgtacatatatgcactgtaggaagggccatttctgctgggatactaaggtcagcacaggcactaagggcctggtctttggaatgcctttgaacatcctcatactaagactattccagtttccctagagattatagaacattgtgcctttcctgtacttttggtgtgtagttgtttattttcatggattccatttttactggcaagtgtgcagtatacatcagatttattcctttccaagaatttctttgcatagccttgagtttcccatagtttcaatcattgtgtgtgtggtgatgatagaatggattgagaatattttgtatcagggcacttagtctttaaaagccttggttacatgttgctttaatttaaatcccttgaagaattctagccataaaacacattcctccatacaacggtctcttctttttcttgtattcatagtagtttctgtttttaaaaaaaaaaagtgttgttttgttgtagatgtcaggagggatgacactagataacactataactgtatctcaatgcacacaatttatgcttctagtcctgtgtgctctgataggtatatgcgcatcaatgttttcatcgtgacctgtgaattgtctttagtttgtggtgctgtaatgggtgggttatctttacattgaaggagcacctccctagaggacctgatgggaagaagtattttcacattttctgcaagattaggtaaggtcaacattctatgtctttaattctgacaaggaagctgtttcaccattgacaaggccacagaggcttctcccttacctaggcacaactgtgagtgagcccagttcatctgtaagggttttagagttcaatcatatgattcctttaattttgatagaaagtttttgtgtgtgtgtgtgtcttttccaatagtattctgttgcagcttagtgctggtctaagtaagtcaataggaatatttttctggcctctatttcttttcttttctctttttaaaaaagatttatttattatatgtaagtacactgtagctgtcttcagacaccccagaagagggcatcagatctcattacgggtggttgtgagccaccatgtagttgctgggatttgaactcaggaccttcagaagagcagtgttcttaactgttgagccgtctcactagctcctggcccctctatttcttgatctctaaggaagctgtaggacaactaatatataagagctgaattgagagccagtgaacttgctcttgatataacatgcctgcctctctctgcgccccccctcatctctctctctctctctctctctctctctctctctctctctgcccccccccccccccgtagttacccctgtctttgcccccaccttcccattactggttatcattgtaggtagtttttaaatctatctaaccagtatgtttgtttgagaagaggtctttgctaggttaccagtgctctcttgtatctacgagttcttgttcataaaaggttaatgtacagataaaacttgtttcattgtgctttgcaatgctcactgttttaagacttttctggggctggagagatggctcagactgactgcttttctgaagcccagttcaaatcccatcaaccacatggtggctcacaaccatgtggctcactgccctgttttgtgcatttatgtgtgtagattggagatagaacttgattgatccttgccttactgtctaagacatgggctcttgttgctctatttgccccagggctacagctgtgtattattgtgtcatagctgtttatatggcttctaggagtctgaacctaggtcctcagaactctacatagtgcttattccacggatgtggtgtttgtctattgaaacagtcctgactacctgaaaccccccccttggcttttgcttggtcttgctcacctagcttcatttcattattagttgtttggtagatgtttgtaggtttgtgtgtgagagactatgctttaagaaagtattaatctgaatccaagttattttcagatattaatctacagttcaaggttttattttacattatttgggttattcttagaaaccatttccattctttaagaatgttagatcagcacagtaagcagggtttccatttttgggtttgggcagtggttgagggcccttgcatgtttaaatatatctcctctccctgtatgtctacgtgctcatagataactgaggataattaatggggatccattctcttcattatgtggctgccagaaatccaagtcaggcaggaaacacttttgtttgttgagctatctaggtcactagcatcccgtgtacaattctatgggaatcatgatcaggttcttcggaaggcttggtttctctctacagctctagattgtagctttcttttaggcttctcagcaatgattctcccttttatttattcctttgcattttatgttaatctgcatgtgttattctgttgcctttctggatgttcaatgtttagattcatattgttgctttctatacccaccgcctcactataatagctaatttgagaagtgtagttttggtagaatccttcattgcaaacatcttaaggttccagtgttaaaatggaatggatggggctttgtctttggaagcttctgtatgagtgttgctatatgataatactgtctttgagctaatgggatctcattgtctctccctcttggatgccatgatttttaagtatgtaggttttccttttgtttctgggtttagatagttattttccccattgttgtgacaagattccagcaggaaacatgtaagaagggtttgttttggctgatggttgaagtccatcatagtgggaagtttagtgtccagagttcacagcatggaaatatatggctggaagttgggctgggcagtaactacagaggtctcctggtagcttagatcaggcaaatagcatagaggggtgttgtagacttttcactaggcttacttacaaatggctgaagatagtaccaccacaacacttcccaggactgatcatgactaggagtatgtaatttgagtctgttgacacactaaagatggatgcctcctggatcaaagagattaagacatgtttaggctggtggaattgaggagagtcattataagtgtgcagtaggttccctccaaaacccatccccctctatctctgtaagcaagatcctaccttggcccattttgctggcagaacaattttgttgaggccaggagtaaggagaatacacatactctcaatcagggactttacagagtagagactcacgccatcattccacagttaattgctcagcattcctgcctattttggttttctctccacctgttccatctttgttagtacttccaggtttctctccctcaactttctgggagataatttcccttctcaaacacaccttgctttgcacattatggtttgaagtgagctgcaaaacagggttctcccatcctatgcttttcatcttcattgtagtagtttattccactttgggttggttggtggattagggaagacaagagctaaggagcagttgattatgtgcttcgaggaatcttcgcagtttcccttcctagttttgaaggacttgctaacgctgcttaagatgagagatgccttccttttctatttgagagtaaataaaccaatctgaatgactgggcctggagtatagagattgaatattgtgatcagtgtgcctgtcccatgcactaaagcccctcagttttgtttttttaataatttcatttgatttttgctgtctgaccttaaaggatgggcatatatacaaatcttaaaccttagcaagcattgaaggttaaattttggccatcctcagaagggaaggtgaattttacaccttcactatatgttgcctctatttccaaatattgccatttctttgggtttttatttaaattcttatgccactgatttcttccagaactgctgtgccagctgcaagtggcagtggctccttaatggagattctgagcccgctgtatgtgggggcgctcctttttcaggggagcatgttccatttttagtggatgaatgtttggtgctctggcgtgttgaggaggatggatcacttgcgtgtgtgagctgtggcagatttaattgcagtcacagttttcctcttgacaatcatagtatgtgaatggtaagtaatctttttagatatggaagctgcagaatagaaaacagacagcatttagttggtgactgtttggtacttcgtacctagatgttttagtgtttggaacttggtccttaggaaattacaaggctattaaataatttctgtcaaagcccccaaataaattctttgggttattcatgaaagaaatatttattggtactaagcagcatagtgtgcccccccccccctccttttttttttctggtggtatagtcactcatctttatgagtatcaaagaacagtcccattcattttagctgtaggctatatttttgatatccaaaaatgcctgtagagatggatcagcagttaagagcactaaatgtttttccagtgtacccagctcccacagggcagctgacaactgtaacttcagttctaggggatctaataagatttttttttggcctttgtgggcactgtatccatgtggacacaggtacacatgcttgcaaattaaaaaaagtattatgagattctctgtattttcaatattagttgattccttgagttgtaatggaattggtgggattggaaggtatttctacgttcactttgtcctgctttctgcagtttttaggctattttttcctacccaatgttaatgaacattctgaaaattggccagtggcaggccatgttataattcaaaatttctttttagagaagtcgattgccatctgttggtggtttgtggccaccacacttcattttcagtaggtaatgaaaatgtttggcatgtgttttctgtatatatcagatttgtttctttctttcttatcaattttatgtatgtgagtacactgtaactgtcttcagacacaccagaagagggcatcagatcccattagaaatgattgtgagccaccatgtggttgctgggaattgaacccaggacctctggaagagcagccagtgctcttaaccactgagccatctctccagcccagcagatttttttaacgtaaaatgagaggaagatgatgaagtgttggcctgctctgcttactgtgggcatgtattgtgaatagcatctctttctttttctttggaggcattaagtgaaactctgctaggatgctgttgggtgacacagttgcctgcacctttatttatttttaaactattgatccatcccagtcctgtaccagactttagaatcgcacccattaaaccactgcatcttgagtatttgtgagggacatttcagtatgattgacttttatattcaggcttttatatgtctattgacaaagacgagcgaatgaattgaatcatgtggtaggttatagactcttcatatgcgggcccccccccccccaacattttcgattcacaaggtcattcaatccttctccttcccagcgcctctctttgccaggagatggctgccaggggatttttggcaccttgcagttgggttttgagtaacctaaaattgaaaatcttgctagtccccccacccccattcccccaatgatatttttaagactacattggcaatctcacctccaagtgtgaacattataactggcacagctaagggttttaaaacagtgtgcttcagattatttgctaacaaccttgtaccataccatagtatgataagagtttctttagccagctcctgttcagaatggactcttccctttgttggtatttttgaatcttaatccttatttactcccttctctcttgtgtcaattttgtgtcaatccctgatgaagaggttccaggcattgatttatggtaggacatgcagagctttgcctaggtggtgcacagaaactgacacccaggacatagagcattgtgaatgacaaaagggctttgttggccacttcaactgttgacttataataattctttccccttgggacctgattgcttccttttttttgaacaccaaaaaataatgtcaaaaacattttcctgattgtgatttgtaatggcttgtttgtttttgtttttgtggtttgttgttctttttttaaatttcctgatttgatacaagattattactgttctcgttccttcatcacctagcttgagagtttgtatgccagcaaatgttcattgtgaagctgtcctggcttttatatatttagttctaactttaggctttctcttaatttttttctaaggacagttaaaggttcttctttcctgtcttgtgtatttataaaaagtggttatgttcttgaggaggctgggtgtttatatatagaattactaatttcttatgtgaaggattcagtattaaccagagttgatattatcaccattgtttaaaaagtctaaggatttcgatttccttcttaaaaatcggattgttttctgacttctcagtttcctggattggtttgctatctgtatttttacactaaatgtctccctattttttttttttttttccgcctgttccctggcacagttagaaaacatacctttatcttgagccaataatttcctactgggcactggtaaaagatcagtcttctcagctagcacttgttagttgaggagtcaccataggaactgcctggattgcctgcccatcatgcttagagagagaatctaatctttaccatttttttttttttttttttaattaatgtgttttgaggcagggtctgacatacagtagtagcacaggctactgtgaagctgataatcctgcttcagctcccgactttgagaaaatcaaggcccacactggtaaaaatgaacttagttgagacacagcccaagctgtggctgttcctggtgcctgctgatccaagctaaaccttttgggaggtgattttcccaggcaaatctggctataagaaacttaaaactctaaatagctcttatgttatttaattaagttaaggggtacacatatttaatattctgtgttttttttttcataaaccatgtaatctgttgataagtaaagcctacccaccccctgaaaggaaaaagtctatcaatcagtatagctggacagcaaaagacttttgtgtagcaaaaccttctcaagtgaccattgtctgtcgttgtggtggagtctcgtgcagtggaagcagaagatgggttatgcttacaggaggatcttctgtgactagtgctcttgttacacagtgtgggtgagctggtatttgcaggcttctgagtttactacggatgtatttatattctctccaccatgcagggcatttatagctatcctgtgtgttttgcctgccactgcacttgcatttgaatttgatgggcagcttgccctggtagatggtatctcctgcccccaaacctagtgcccacacatgagcacactctgtttctttgagcagctgccaggtttcttgtgtgtgtgtgtgtgtgtgtgtgtgtgtgtgtgtgtgtgtgtgtgtgtgtgctaggggtagaatagagtgggtaattattttggggatggaaacacagattttttttttctgtttgaataggcctttcagcaagttggcaaagtgtcagggccagctcccacactgccacaaagcgtggaggcccactggtcattctgtatctgccagaagcagtttcttatttttgaacaaacagaccatctcctcctatttcttaacctttgattagaattgggatatcatctaaataaatggattttatagcttacaagtttaatgttgggggattgaattaataaaacgttttggtatgtatatctaacaaggtactggctatgcatggtgtccctctccttgttatgagtacatactatttttgatttggagactattagaaatttttgtcagcagtgaaattcagtcaacctaggagttgctattgtgctattgccctagaaatagacatgtacacacaggagtaaggtggttataatgcattatagatggctgaggaaagctagaaatgggactctgattctttatgtcaggcttcttaatgaaaaactgacctggaaactttcatatccatctttgagaaaggggaaaggacggggaggaggtaaggaatgtgtatggaccgtttgggttcacccaagaactttatgcatgagatgtttgtttttgtaaaagtgttaattgtgtttttatacactcagtgatttttaaaaagaatttgtagtatgtattgggtgtatgtgctcatgggggtatgtaaatgtatttatatatgtatgtgaatgtatgtgtgtgtgtgtgtgtgtgtgtgtgtgtgtgtgtgtgtgtgtgtgtatacactttttgcagatgatatgatagtatatataagtgaccctaaaaattctaccagagaactcctaaacctgataaacagcttcggtgaagtagctggatataaactcaaacaagtcaatggcctttctctttacaaagaataaacaggctgagaaagaaattagggaaacaacacccttctcaatagtcacaaatagtataaaatatcttggcgtgactctaactaaggaggtgaaagatcagtatgataaaaacttcaaatctatatcaaccaacaccttttctggggtctgatgagcgtcgacatcgggcgccttaacccggcgttcggttcatcccgcagcgccagttctgcttaccaaaagtggcccactggcactcgcattccacgcccggctccacgccagcgagccaggcttcttacccatttaaagtttgagaacaggttgagatcgtttcggccccaagacctctaatcattcgctttaccggataaaactgcgtacgtcgggaaagagcgagagcgccagctatcctgagggaaacttcggagggaaccagctactagatggttcgattagtcttttgcccctatacccaggtcggacgaccgatttgcacgtcaggaccgctacggacctccaccagagtttcctctggcttcgccctgcccaggcatagttcaccatctttcgggtcctaacgcgtacgctccacctccccggcgcggcggcggctttcggacgagcccctgactcgcgcatgcgttagactcccaaaggtccatttaggtgccagtctttgctttatgttttgagacagtatctacacacacacacacacacacacacacacacacacacacacacacacacacacatctcccaaaggtccatttaggtgccagtctttgctttatgttttgagacagtatcttatagaacttggatcttattgattgagttaggctggctgactgtcagcccctaggattcttatgtctctgccttctggagtgctgggattccaggttggagtcctggttctcagtccaactatttacatggatttgttggctcagcctcagggaagacctcatcatgcttgtgcagcaaactctgactgagcatctccctagcctccttacattgtttttattggtcttgcccaccctgggtcttctttctgctagggcttggattgctattcttgcaactgtctgccttctaaataaatgaataagtgttgtggacccatggcagcagtgtggtattctcctgattcttgaagatattttggaagacttttatgctgatttgtctttaagtaagccataaagatgaatctgcaataaagtcctaagtagttgacagtagaaggggttgaggggttgaccatggtggtgaactgctgcttttcagggtgcgtgaatatctgaggtgacttgagatacaaaccaggcaatttatttctattaaaagttaacatgcttctcacttctctgttaaaaaacaaacaaacaaacaaacaaacaaacagctttggaatgttatctgcacttagctcacctggcttcactcatttgtcttctctatttttctataccacctaggggattgtatacacaagttgctaactttgagcatttgttccaaataacagattgaaatactagcttggatctctacttttgggagctgttcactgtattttattcataaatatagacagtcatgcacctttctacacaagtaacaaggatgttacttgtttatgatgaaatatggtcttgaagatattttaaacaacctctcttcctcctagtttttttaattaacatgttgttctcttttatatttctaaatcatagataagttacgttcataaatttctcctactggcttatattcatgaaattttgtcactttatattggcttatgagatctagaatgagggcatcttactgaaaaattagccttactatttctgttgttggttttaggactttcctggcctgtgccctgttctcagttttttcctttaatcctatatcatactggggagtggtcctttggccttacccttgctaggcaagcattctaccactgagctatatcttctgcccactgtttctgtgggctcttcctgtggcttctcctaagtttcagaaccaccactgcagtatgactgtgaagcacgcttaggccaaaagcattttgttgtaaagcatttttgcactgatggtgaagtaagaggtgatgcttcttttctttaggaaaatgctaggcagttgttggaggggtcgactgcagtggagtcccaccacccatacgtgcattctgggtaacatcctctgcaagggtacaccggccttctgtcccaccagccctgggttctcagagtttcccggaatgttataggacaacattctgcagctcctcacctgcctttgagtcatccactcacttgtgactatgcttacttcaaggctttggctccatatgtccctctttagacaaggccactgtgctcctggtaagtgttgcaccaccgggcgctctcagttcctgctctcagcagtgctctcagagtcttcacagatggccccagagctcgtcttctcttccacgggccttattattccttggtggctgatttcatttagataataccttggttttcataggcttatgaaagtgtcctgaggaacagtttatttagtcttttcttcgaatagttgtggaggttgagattgtgacttggtttttggtgaccattgctgccatctgcttttgtgtttacttggttttcattatgactgatagtttcttgttgttgtggactattttttaaagcaggaagcacttgatagtttattcacacgctgtcagcatttctgtatactctccataggattctctgggactcagatctctttaatatgtagtaagaatcaaatcaccagcaaaaagctggcaccatctctttcagaacttgactccaaatttcttagaaaggtgaaacgttagttggaaaggcagggcagctccatatggtcgtgctacttctaaggacacaacaatgtgcttttaaataagatggtttcttgaatttagtggtccctagtatgtggcttctgctaggtgttatgttatgaagaacataaagcactttggccacgtcttttgaagtttgtacttaaaaaataatgttaaaaagtgtaaatacccatttgaagaggacagaaatattgaaattaaaatgtaaaaattgaacacaaactccccgaaattagtttaagcagcatatgtctgtgttaccatacttaagtgtcacttatgatgacttctttctccccttcttccccccagttacaagacaattagttggttgcaaagaagcactttgtttctttgacagatactggtattgtcgaatttccccgtttctggaacatttaagggttagatttgtagtaatgctgtgtcattgtcaaacttgcacattttcggagatcctttccaagctttaatttagttaattaatttagtgttgacgggcgtacatttgggtgccaatgacattgggtctgttttggaggccagaggagggaggatccaggaatcctgctctgcccctctctggctttctcattctttcgaggtaggtctttaactatccagcttgcaccagtgatttctggtttctacttgtaacaaagtagggctatgggcacacttgactctacacctgagctagacccttccttgtgagccccacttcagtgtcatttgtccagttagctcttaggcagcttgtttttaaggatttttttttttaaacaaataaggcaggaagctcaagcatactgttggaacttggaagatttaagaagttaagatgtaatttattttacagatgtaaaatagactaatgtgtgtgctagattgtcactgctttgagcatactatttgcataacattgattcccagcactcttgcaaaggaaacttgtgctttactggggcacagttggtacagttaccagtgcctcacagtgtctgatcacagtgtgtgatgctgacaggtgactctctagacttagtgctctgtataatgaaatgcttgctggagatttgctcctgctctaagatgtatttctttagcgtgcatctagcagatgtagactgctaatttaaagaaagaagaacataagctaagattgttctcattctgatggtttacatatatctgctttttggtggtttgttttgttttgttttgtttttgtttttaaatttcaggatttcattttttttttttttttaagaatttatttagtgtgtataatagaacagaggacagttttctgagttctggggattagacttggcgataagcatgttttcccattgtgtcatctctcctgtccctactgctctttcgcggtaactctgaaactgaactacattccccagcctatgactgaattcaggatgtttgaagtgggtcattagttccactttggaggtagaagacagataaaggtgcagtaggtatcagcaaacaataagggaaggaacttgtgaaacaggatgctgtttagtatgagagccactgatccctgtgggttcatacatttttcttgttgctttttgagccacagtctgtggagtccaagagcattgaactgatcttcccacttccccactgatttttttcatttgctacacacattcatactaaacacatactttatatctacatagaaaacaatagtcccttaggtggatttattgctctatgtaatgcaggctgtggtttatgagagagacatagagctttaattggtaagagtttgtttgaaagattgtcagtttgttcttcctgtatcatggttttactgctgcatgaggtcctgtattctccagtctctgcttaatttagttttacatttcttttgttgttgcaggcccaggctgcaagcacaaaggaagtttgctcaatctcagccgaatagtcccagcacaactccagtgaagatagtggagcctttgctacccccgccagctactcaaatttctgacctctctaaaaggaagcctaagacagaagactttcttacctttctctgccttcgaggtaagcttggaggacacatggcaccactgtgttctcacatcttgttgtttgatttgtgggcagggttttctcggctttttttaaaagaaagtgccccactatatagggcatactagactctgtgtatatgaagatggattcaaaatagagatttgccttattccaccttctgagtgttttatgaaaataatgcagcaccactgctgctgtttctgcacatttttttttaaagatttatttatttattatatgtaagtacactgtagctgtcttcagacgcaccagaagagggcatcagatctcgttacgggtggttgtgagccaccatgtggttgctgggatttgaactccggaccttcagaagagcagtcgggtgctcttacccactgagccatctcaccagcgcctgcaaattttttacttactgaaaataatcattgttcatgtgtctaccacatagacttcactttactttggtgttgtctgtacagtcagaagaaggcattgtatccccagagactagagttacagatggttgtaaggcattgtgttgggtgctaggacttgaacccaggtcaagggtcatctgcaagagtagctagggttcctaaatttggagacatttcttgttttgttggtttttcaaaacagattttctccatgtggcttggctatcctcaatctcaggtctgcctctgtctctagagtgctgcgagtacaggcctccaccaacaccacctggccaccttctgtaattttgaaaaagagtcttattacgttccaggatgacctggaacacatgatggtatccagacctccctcaaagcctcagaagtctccttcccagctactctgaattctggtattatacgtatgggatgccagagccacctaggaagttactttgacatcatgggattcagttatgtgaatcttaagaatttttttaaggactgtctcagtgacaataagcatcacagaacctgtgtatatgtaccatgtgtttttatacttagtttaaaaaatcctctttcctctattctcggtggttggtcagggttacacaataaagttaagctggataaaattaccaaccacacatttgagacaaaagagacccatctcttttataggcagtcacctttgctggaaagctttaggtgagatttggtccagtgaatgtatttctccactcaaagagccagacaacaaaagcagctctgctttgtcttagctggcatacacaccctctgggttctcactagactcctttcctacttctttctcttacaggttagatctgagctattaaaactgggagtcatcttagttttcaaaatcttagtttagagcctgtataggtctaaagagtgcagctaaaggatgcatgctgttccttgactcggtggagggaagcatcattagaacaagaagtggaaactgaattctgacaggtgtatgggttgtgtggatggattctataatgtgatcctttaatgcaccattaaagtattattcttatttcttactctcgttgactgcaaagtacttctttacatttctcactgaatttttcactaagcaaaactgtgcccatagacttaaaattttttaaaacagtaatgtgtttaattttgtagtagttatggaatttgtctaattgagttttgctgttataaacagcggtgagatctgtaacatttttaggcagtcttaacatttttagtttggaaaccttttattgtttttagtccttctttcttgcctgcctgcctgcctgccttccaccctgcatgtctgtctgtacgtcttattaaatatgcgtgttcatgcgcagctacttagagaatagaaagagagattattgggttctctgaaaatggagatatacaggtagtgtgagctgagggtgctggaaagcagactgcctgggagagcaggaagtccagggctcccaacatggtgagctcagttttaaaataggaaagactgcaataaataaaagacatggaaggcatatttttggccaaagtcttgagttgtttatgtaggcttcaggtatttcccttaatatttggaatattgaagagacttaattgattgtgccatgggaaaggcaacgattagagtttgtcaaaccttgtttattacctatcagtgatgacatgagagccaaagacgataagctctcttgagaagccccttaggggtttctcaacccctaagttttctcaccaagtccttgtttctggagatcctatcaattagggattctgtagttaatgtaaataccatacagtcatttctcttggaaagctttagatatttaaaatggtccagtctcaagacactgactgtcagccaaactaacaagactgtccctctcctatacttaatgccatatcctagaacttacctcttaaggaagtggagtggaatgaacaattggagcaggacctgaaatgttcgcctgctgtgcatttatctttaaatagctgctgtgaagggcgcacatggtttttgccagaggcataattagtatcttccaaggttgcacatggggaagagagcttgtatgtgtactgtgaggagcaactcagtatcattgctgcctttcctgtcaccaatctcattattcttaatgagttctgtcttcctctctttgttctgactataattattaagagatttaaaagagcttaatgcagtggagcaattgtgggttaaatgattctcttatttacattttctgtttatggggcactgcaaaccatgagggattcccgaaggagactcaggaaccatacatagcacacagttcattcttaggaccatggctgtcatagtgcagcctcctagctctctccagtgaagaatgtctttgggagggggagttcccagtacatattctgatacagccatcgtgaaggcaagttgtcttttttggggatgactgccttatttcccctgtcttctgtcactccattgctggctaactttgccaacatttattgaactttctacattagacagtagagaacagattaacatgggaaaactgctgggcaaaagaggatatggtaaaagatgtgcagtcatgtcagggtagggttatatgggataactacagaaagggaaggaaggcatatctaagctggctcttgccaggtatcagaaacctttgctggcaggttggttctgggactggggaggaattgtgcagatatctgtcaaggtacaggctgtgggggatcagggctggttatttggaaggccaggcgctaaggtgaataagttaggcttcgaacaggtctctctaggttgtgggtgattaggaagatggtcctgccagtgagtgcttcagaaacatgattgaagccttagggcactatgtttaggcctctggaataaagccgtccctggattgttgttgacttatgcccctttcagcttgtttgttcatgtgtaaagtggatgttctggtttctgtagtcacagctggtggggttaaattagagataatgggtgtaaaatgtatcacagtgacagcctgagaggtagccatctaagcatagatatatttgctggttttaccttgattttacagaagtggcagaaaggacaggattagattggtgatgagtcagagaagtctgaaaagcattctcagatacactatctaggtaatgggaggaagccaaccagtagcatcggcagacaatacctgtccctgcctgaaaggattacattctttgttgtaccactggccttgaatattgagaaggaaagttggaagcgggcagtctggcatgatttagcagtcaccataatgagagggaattatctgcaggaaagtaattaatctccagttgcaaggaacattgaggttgctactagtgaagcatcttgagcaaaatgggcggaagacaagctgtcttagagggagggagggagggcttcatgagtttgcagtcacttttatgacttctgccttagtttctgagcatagagactatcaaagtcggttttaacctttgctggcttctttggccatcctgcctgcctactgctttccgcaagtcactcaggtctgatgttctgtgttcacttagcatcttagttctgctgatgcagtaatttgtttgcgagcatagtttctttgctggtaatgaaggaatcagaaccattggaattcttgatcttggaagaatgactccttttataattgccttgtgaccttggagcttgatgtttggtccagcttagggccagcttgcctcagaccttgtctgctttgcaggaagttcaagtcattctccctgccagggggctggcctggcttcattggtacatctcagaatacttttctatacctcagtgactagagaagcttgtagtgtttcttgggccttctggaactcattcaggtacatgggggcagggaatgggatggtggaaatttctcagtgctagcattgctgttgtgttggtcaggagctttattggtgcatatatagattttatcttatgtgtttttctgaagcctcttgtgcctgtgccttgtaggcaactaactgttcaatgtctgtgggagtctgaaaaggctttgcataaatcataaattcatgttcagacttgatggtaattggaagttggaaaatctaacttattttcacttcttagcttgtgctaatcatcttgtggctaggaactactcaggctgaacactgttatagctattgtgtggtgttggttgtctattcagttagcattaaaagaccacagacttgtgggatttgactgtgtgtgtgtgtgtgtgtgtgtgtgtgtctgtctgtctgtctgtctgtctgtctgtgtgcatacatgcctgcatacatgctctcacacacttggtggttgaactttttgttgttgtatgtaccagatgggaatcgtttttggagatgagacaaggcttttaaggttcctgttgtgaggcatgttctattgtaatctttgtgtctctgtaaatctacctgtacagaggctattggtaaaagggctagtattcagtctgtgtgttgtgaggggaattgtgctgaatcccttatctttccagacatggaaatagaaccgaggcctcacgaggaatttacatattacaattagatagacagcgcctgatgaaaatgcatttagggtagtgtccaagaggtaactttcgaccaaaagtcgtctcacatgccattttcctcaaaagtataaacacagggttataagttctgtagctgtcttttctaatcacagatttcttattttcaaactcacctagaacatggcccatctaccatttattctttgggaagaagttttgtttttgtttttccttcttaaaaagttacatccatttaattgggggtaactgttgctcccaaggcaaggtcagaaaacagcttgtgtgatttgagccttgctttctatcattgtgggtccttactgtcaaattcaagcagtaagtatgttttttcactgagccatctcactagcctgaattgacaaattttataacttaggagttgttttgaagactcattattaacaccatacaagcagtagcctaatgtaattctttttttttttaagatttatttatttattatgtgtaagtacactgtagctgtcttcagacactccagaagaggacatcagatctttttacggatggttgtgagccaccatgtggttgctgggatttgaactcaggacgtttggaatttggaagagcagtcggtgctcttaaccactgagccatctctccagccccctaatgtaattctgttgtgagttgtttagagtgccattacctacattgccatacactgtttgctcataagagcagttttggctaaatataatactcacaccctgtaaccagcttccagaactagggctccttccttaagctctggatgccatggaggccatcttcacggctggcatgcccatgattgacaggcttctcattaagggtggggtttcttttggataaaggcctccccgaatatacctggctatgtctcatttccatctgaacatcttttaaatttaaattacagttttgttttttaagtcgttgctgcaaaatggagaggaatcatctagatagaagcatgaatgatggcacttggaagctctgcatgggcgtctgcagatgggtgactgtggagaaagaaagaccagggatggaacagtgctatttgccatatcttcttttcaaggaccttcagcattgtgggtttcaatgtagaagtaaaaatagaagtgtgtggatcagagtggcatgcacatcattggattagattcatggaggcatttctgtagttattgttgcttatttttatagcttctggttttatggagacaacccaactcattgggcactgcctcttaattgggtcacctaaacgactgtactgagagaaagcctttttctaaaacaaaggctcttctaagagcagagcgctcggtctgtttgctagtgttaagaattgagttccaggacagcccgggctatacagagaaaccctgtctcaaaatacaaaaagcaaaacaaaaaaaaagaattgaatgatgagggagggtagagaaaaagccataaaaaaatccagcccaaattagaaaatgcaagcttttggattaaaataatttttgttgtggttctaacatgccacattttgatttttgtccagatgaaaacatttggtttgtatttcagtaaatactgtggagacgttgccagcgaattgtaaaaagtaatgaaatacaactttggcaaagcacagatgcatcctgtagtccctgtttctcctatctgatccaaagctttaaaacaaacaaacagggctggtgagatggctcagtgggtaagagcacccgactgctcttctgaaggtccagagttcaaatcccagcaaccaaatggtggctcacaaccatccgtaacaagatctgactccctcttctggtgtgtctgaagacagctacagtgtacttacatataataataaataaatctttaaaacaaacaaacaaacaaaccaagtttgataatgcaagtgaataatcaggagagaaatacgtgactgatgtaattttaatagattactatttatagtcattgaatatgaatcacttccttgatccacaaaaaaagtaactactctcctccctatacacctagtcctccaagatattctccttcattgattatttcaaatacacggttgtgaaggagagcacagataataattatgagtggtaaattagcacctctcactagctaatgcactaagaagggcattgtttgtatcataacaagaaggtgccactttgagaatggcttgtcttatgcctgtcttgttcccagtgtcatggctggagctctgcaatggggcttgagtcctgccttggaggaataataacaacaacaacaatgaccatgataatgatgatgatgataacaaccaccatcaccaccaccaccagaactgtgtttttcttggttgggaattgcctttcttccagatttgcctattattagcgtgtctgtctgtctttttttttttttttttttaaagtgcctggatacttttacaaaatgtttaaaatgatacctcttttgtacttgaagaatgagaaatgatttccctcagtagcagtggtacagattcatgcctgcattgaacatttgaaattccttttcctcaattcctcctctaaattgcttccctgtaagtcagagcagcaggcttgtaggaaaggagtatttttctgaaccacatgtcttttagctctttttggatattttaggttattcacaattttctggatcatagagtggagttttggcagcatattgatttctctatttttttgtctggtgcaaggttgttaacttgtaaatgaacagggcagcaagattcatggatagatttttcatagttacataggtggaatatgcatcacagtttttcttatacctatgtcagtctgacagggaagttagtgacgcatacaaatttaaggccagcccataatgaagaggtctctgtgtgctttctgtatgctatgctagttgttcctgaatgtcccttctcctaaacaagtgataggttcgcttggagttttagtactatcctgaaaggcagactattatatccaacgtaaggggaccattgtggtaattgaaagggtctttggcagagggggagtgggttctagactaatgcttggactgagggtgtcttctccctgctagtgctgatgaattgaaatccacagctggaagccaagttaatgagcctcaaatattgccaaaagacatgactcacaccagtgaaaatgtgctctcttctctctcctctcctctcctctcctctcctctcctctcctctcctctcctctcctctcctctcctctcctctcccctcccctcccctcccctcccctcccctcccctcccctcccctcccctcccctcccctcccctcccctcccctcccctctcctctcctctcctctcccctcccctccccttgtcttctcctttctttttggtttttcaagacagggtttctctgtgtagccctggctgtcctggaactcattctgtagaccaggctggcctggaactcagaaatccttctgcttctgcctcccaagtgctgggattaaaggtgtgtgccaccactgcctctattatgtttttagtctcactttcttgacaaatgattcttcaaaaccaatatctaatttcagaattttcctccagtcaagaacctgattctaaatggtattaatcaaaggtgaaaaataaaccagaaatagttttgtgagaccatgtgcaactcttccctggggtctttgtagcctgtaatacctctggtattaggttgaaaaaattaaatcattttatacttgttattccagtgttgattcaggtaacttaattggactgctgttgtcctctctcccacccctcccctcccttctccaggggaagtggggggacaagtttcatgtagcctatgcttgccttgagccagcccatgatgcttctcctgcctccagctcttgggaatttgacaattgattttactgggactgatttcaaagaaaagagaaaagtgatgtatccagttattctttctgtttttcaagctagaaaaggaagttttgttatttaagagcagattatgtctgggcaccatgtgagtacctggtgcccctggagtgcataagaggcaaatacatccattagagctggagttgggatgcatagtgtatttactggaaaagagcagctgatgctcttagctgttgagctgtctctccagacctggcaggatgtttaagatttccttttgtgatattcctccaaaagttatctgtgctggtacttggtggtgtataatggggaaagaatccaaggttgttatctctgcacttttttttaatagcttctggttctagaatatataccaatttgttgattgcacctccctcaggattggctatgtttcataagggaaaaatattggaagtgaccttcctttattttcagtatgaagaaggcaacatttgagaagagaggctagagtgtaaaagtgtgggttgttcttgcatagattgcttaactgtctctctagcctaaggaatttattttaataatatatcatctataacttcagagtggtttgtaaatacttgaggtgttgggggggaattctatacttggcttttataataagataatagagtggcctttaaaaaaacaattcagtttcttcttcctcatcagtaatttttttctctcttatttccaaagctttaagttaaatgcagagtaaacctccaacactatggttggatgttttcattttactcacattgagttatccattccttgctgttgtttatggtccgtttctccacagaaatattacagataagattctcaaatatttatctcctcctgggcgagttttgcttgaaattactcatggatacaaatggggtcatatttcgtggggggaatatttgaaaataaattagaagtggtatcatctagtagtggtaattagctttgttttatgcgattggcatgcagttagggtcctacctttataagcctctcctttgcattactactcctggaaggggtgaatgtcaagattggttttgatgaactacatatgttaaacccatcaggttctcctgcgctgcccaacagtatggtatattttggaagctctcaggatgaggaggatgtcgaagaggaagatgatgagacggaagatgtcaaagcaaccaccaacaatgcttcatcttcgtgccagtcaacccccaggaaaggaaaaacccataagcatgtacacaacgggcacggtaggttcaccgtggaggctgtgtgaggggcagtggaagccaggcttgggtgagagctgagaaaacatttgaagcgtttcagccagatttcttcagagtaattcaagttccagactcttaatgtacaaagaacttagtagttcagcccaaaagtattctagatgaaaatgaagatgttctatgtggaaatgattataaatgttgtaggaactacagatgacaaaagaggaaacttgaataatgacgattaagatcacttttgtgatcaggtttctctatgtggcccagtcagtcccaaaactcactctgtagaccagattggccttgaacaccaagatttccctgcctctgcctagtactaacttggtaaattttatatatatgtgtgtgtgtgtgtgtgtgtgtgtgtgtgtgtatcatacattatgtgtatgtatgtaattcagagaaatacgtatacataaatatacagcagtttagttagggatatgcgtcaaacacaaaggggcaccaaaatttaaaggttgatgggataaaagtgcgttaacctgtagctatagtcttcaggaagtctttaaaatttttattattatatcacacatgaatgtaggaaaactatggaatcagaactccctacttttgtgtgtgttctgttgagtatcaggcttgtatcatgagataccatgtgtttttatccactgtccattgtttatgtctcatcatggaaacttaggattgagagagctgccttttagttgccattcaagttcaagtgcatagatgacttgtgaggggtagagtttgtgcgatagagttttatgtatttcatgggctaggagtctgctgttctactgtcttagagaatatacttacagggaaagtataataatgactgaggctgtatttgggaacctgaaaagaagactttggaggaaatttaatttccagaatagggagcttgatgattttaagtgcgaagctaagatgaaatcagtaaaattagagcagtctgtctgtcacagagtaataggaaaatcaattgcagttgggggtttctacccaggaaagcactgataagaacctggattacaaacgtgcaatggtgtggctcatcagatgaggcctcagacttgttgactcttgtaagagacaaattgtgggcaagcacactgctttcacacctttccattgcttttcttgtcagatctctctttgtatgctatagtcaggaaacccagagacatctgtgaactctgtggattgagaatctggctaggatgcagagataaatacacagaaaacagtttagtaaagaaaagttttatttttactacattattcaaaaaatctggagcctgaacagatagtcccttttttctgatgtactttgtttctgttgaagtggagtaggagagtgttgtggaaaatagcctctgcacctggtgacctcactcagtcttttggcccgccaacttgccaacccatatggctcctacctgaccatctcttggacatgcactactccccagttcctctcactttcacacagcgcccccacacacccctggttagccatttcaacacctgataacccagtagaatcaagactcttaatgataattagccaatcagatttatgtatcaataataacacaatttacaagatgccagtacaataatttcagagccaaatgataatgataaatgtttaacacaattattctaaccttttcataacatcatgtcagcctccattctggttctccctctccttagacctctctctctgtctcaactccttgttctgcctcccttctcctgtccaatcacaaacctctcactgccctaatgtgattggacagggaaaatcctgcactaggagagtaatgccaggatagcgggtctcttgtgaattggctggagagaacaacctcttggtgacaagtgtcttgtacatcatcttaggcctgaggatgtcagcaattttagattaagaatctgggccctaacgttacgcaagagccaattgccctgatggagactttgttatgaaaacatcacacaagtacacagcacacaagtactttacaaacaatagcatatcctaattgaaagggatgtattggttaaaacatacagtttggaatgacgtgtacagtatcacctgatttttgggttgcagctcaagggttataataacaaatagtaactccagggattttcatttccatagctcatatgtttctaaaataatatctcacatatagagcctccaatgatgccaacagtggaaatataacaacacaataaagttgctcagtatatttgtcatataagttaatattctgaatgttttagagcttggaaattattcctagttattttactgttttctttgttttatcattaatgagtttgtgatgaatttgggttttcctcagtattgttggcttggcacgctctttgtgaccttctacagaataacttggtggcagttcattagttattttagtcaaatgtctttttttttccttcccttcatggaactgggaaggaataggagaaattattgttccattttgtgtacatctttttgaagatgggtatttctcagccctttgtcctaactggaatgtaattgcttttggattcataccaggggcaagtatgatggccaaaggcaatcatttggaccagtttcctgaattcatgtgttgtctgtcattctccctccggaatggtggagtggtggaggagaagcttggccagggtcttgcctgacagaatgctgctctagttgcaggtggctgtgagacctgcatccctgtctagcatgtggcagtcactccttccttgttgagacaatggattataggtggggctgttaagtctggagcttatgttgaagtagtagtagttgtttcctaaaaccccaacatatttgtggtactgttaagagaccacttgtcatagtaattaaagtatacatgagaagccaagacacttcttaaattgtagcctttgatggctttttggtgaagatttactttcaaagatgccacctatcctgtttttggatttttgtttgtttggatgtaccacttttgccactgtcatataattgggggcaaaaatctggactcctagattggctaagagaattctaaaaagtttatgtgtctcagatgccttggtgtgtactgagaattatctgactcagctggctttgctggagttgctgccagcctaaccctctgataccaggtttttcctcattgttgtaaagtatgtgttctacattcagcatcttgaagaagcacacacacttgttgctttgacagcacaggtctacagggaaagcagagcctcttgctctggtactttcttgtagcctcatgacattgccaggtattgtctgctgaagccacaatttttctgttccgaaacatcttagcaccttattcaaagaagaggtccagctgtacaaagaagggtcaggttatgaggtttctcctggggtagagtgaagattctgaacatgctctgtgaatgagttacatgcaaacttggtgcttcaacaaatagagctctctgagacttgatatgttttaatcaagtggaaggtggctcttactctgttctgtgctttcgtcttaagttcctcctaagactctatgaacaaagttctccagaagaactgcattgctttactgcatacctgctttcactatgctttatacacttgatggttactaagctgcacagaactgcataatttcagctgttttttctgtcttaaggagactcttcagttatccaatcaagcctttctgatcccaaaggcatacagagtttttgaaagtcacttgtcaacttggataaaaactgtgtggtggattcaaggtgtttatttgaacagccttgaagtcagttcattaaagccagtttttcctgtctttgttacacttctgttattgcatatgcctttaacggcagaattgtaaggctgcatcacatgccatttaacactcatcagactcagtaactgttggtcttgcatttaccaggtaatggctgctatgttgttcttagcagggtccaccgtgaagacaaactacctggcccatggtctgtctgccttctgtttctctaccagcttctctagttcatccaggcaagtttctgggtgagaccaaagtactttagtgtgtacactgggtctagaaattggccttgagtcatggatgagattggtggtccaggaggctgatagtgcccttgtccagatacacctggaacagggaatttgtttgccattgttgctgctgctgaaattcttccttggccttgactatactggtctaactaactcagcccacacaagtgggattgagaggtgcatggcgtgtctgtgcatgcaccccagggcattgaggggaccttacttgtagcctgctctgaacttctgattctcctgcctttacctgctaatagcttggggtcatagacaggtgctacatctcctgcctaagaagaattgcttaggtttctgcttgttttgttttatttagccagactctggattgaactcagggccttgttctagtcaagtgttctaccactgaactctcaatgtgtgtatatttattgagtcctctgcattttaaagccactttttctaggctgttttcatttttctaaaatgttaactttcccttgtcttacattataacacacttcagtgtgttgtgattatttattcagtttcaaaggtgagccagaattcttatcattacctcggtcatgttttctttccctttcagaacacattatcttttgaatgaagagttttataaaatctcaaactgcagaatcactatttgtctactccttgcaagttaatgctccacccctttcgtgaataaagcatgagtcttgccctgctttcttgagggaagtgcaagaatctttttgcacaggtgttcctatgcatggtccctttggtattttgatgaaggcagatacttaaaaatagcaatagttgagccggctctggtggcgaatgcctttaatcccagcacttgggaggcagaggcaggcagatttctgagttagaggccagcctggtctacaaagtgagttccagagaaaccctgtctcaaaaaaccaaaaaaaaaaaaaaaaagaaaaaaaaaaagcaatagctgtccaggctagggctcctcatgttatcaagaggaccaggaaactatttctcaaagacaaaccagtcagtttgatttatggtgttctgtttttctgactattattacaaagttattaagaaccattaaaacttaatatcatgagttacttgtaacattgttagcaaatatatttaaatagctaatatatatatctacatatagctctatagttattttataccattgcccataatatattccagtggaaactagatggtgatgttagagaatttaagctttttcatagaggatggaaattcagttgacttaaaaatttccacacattaatccgtgtatgtaggcacctgagaagataaggcagtaagttccaggccagttagagctgtataacatgacctcgtatgttgtgggaagaagcctaatacaaaccaaaccacacacatttctctccttttagtaactgtctttcaagtgaggtggcatcccagtctggttttgcagcattataacctgatcaaggtgcttcggtttggcttgttgatggctctaatgtgagcaaaggaactttctgactgctttttaggctggatgctcaattgagtaactgttgtttctggccaaggcaaaccaagttagtgtacccacatactgcagtaaaatcctcctgaagttttggcactggttgacagacatcccattgttttctgataatagaagctcaaagttgaattggctcccgggaagtgcagcattagtaaagtaacaagccagccaattgctggagccagtgccttgctcaagtcaggtcaccttgcaataacatgaagcttacctttaagtgcctggctttgtattagaaactttgtggatctcttttacttcctatagtacacctgttattttccccctacagtgactcctcttcttcactcctccccgtagaggaatggtatttgtcagggatgatgttcctgttaattagactgttttatctgttcagtctgaaagatcattgtgtatattctttcccgcttaccttctgtttttcttcaagcaggcccagttttcaggagtagcccagaagggtttcttcatcagcttgcacatgagacacggagtagtttccaaataggaagcaacaaatatcagagactgcttttttactacatacctaataactacttgcctctgtcatttgtcctgtgtattaggagtaattgctgagataggatgagagtccagattgttggctttgtcagcatctttccagggtaaaacattcaaaaaagatcatccttgttatatttgtatcgcttctttctctgaagaacataagacactctatatacttgatgcaaaacacttgagcatgctttagaaagcagatgatgggggcagctggtttgtccttgagggaatccagcataggcgtgttggtgtgtctgagactttgtatgtgagggttttagatacaccttcgataggttgccttaccctgctgagagctcagtgtttgaacagagctcatggacagcgccattcgtgtcggacccctgggaactgtaaacgtgaatttcccatggaaatacagttttcctcttcaaacatccttgcaggagaggacgtagctaacaaaacttcttttgcctgtgtctttcactcctcactcatttgatggaaatctttccctttcaagaatgaagtgaccttcaatgagaatatcagccttaagatttaaagactttgtttgttgtggtatgaaaccacttgtctatagagcatttaactttcagagtaagtgtatacaaatcaatatatcagtctctgttcattaatgtaaagctatttgtattccaggacaatacagtttcctaatatggcttgctatgctggatgcttaaagaaactagtccaattatttcttttaattggggacactgtgtagagaccttctatacattgatgcctttctgtctcatgctcacagaaagtgaagttttctttttttaccctctctttcccttctgtccctttcttgaaaatcttacaaattaagacaaaagataattacttggagggataaaactggcaggttcccacgacacttaaaattaatgagctgtcgagtacaaaatataccttgtccttggctttgtcgtcttttcccaatcactctttttttcccatttaacacatggcatgactttttggttatgtttggtgttgggtgtattgctgctataaaatagcaggagggttacagcaagattcatttgaaaagcctcttttgtttgcaaatcaaagtttcattcctccttcctaggacatcttattaaaatacttgttagcaggcataactgtgttaatggcactgacctgcccctaaccccaccctctgcacggcttcagctctggttccagggatttgctttccagcaggtttctgggattagtaagtctatttatattagtaagtccaagtctattccactgaaatgacaggactgtgccgctccctttcaggcttaggcagtggaggaccttccttttctaggtcaggaggacactgctgcctgtccacatcttagaactgggttttgaccatgattcatttacaaagtagtagtgtgatacttgttgtataggctttaggcctcagacaacaaaaccagttccctaactctccttacattgtcacatcagtaagagataagcatatctctcctcctccccaacacacagacacacagacacacagacacaggcttgggcaggtgacaagctagccagaagctgcggtagtggcaaatcaggtagaatctgggacaaattgtgactgtgttgaggtttattcacaccccatggaaggcgggggtcgggtggggtggggaggggagggagcatgaggcatgcaaatggtaaatgtgacaggtttaatgaactcaaattgtcatactctgtgtgacagatcttgctcaggccaattgctgtttgagcatggtgatgaagattcctgaggactcgtctgcaggatcatgttatcctcagtctacaaatgagaaatccaagaaccaaatcacatgcccagtaataaatatcagcgccaggacttagactactactatgaaaaggataaaccaggtagtggcggcacacgcctttaatctcagcgcttgggaggcagagtcaggaggatttctgaattcgagaccagcttgggttaaagagtgagttctccaggatagccagggatacacagagaacccctgtctcgaaaaaccaaaataaaagaaccaggagtattcaccgtgaatagtctatcttagtggaagtaaataagatagcaaagttgagggtgttaggagtcatgttctttgctttaggaaataagtgaacagtcgaatgtgccatcttgaccattggtccccttgaagtgtgactcctcctcacagatgatattttcatttgtctcaggatcacacaagtggcagatgtggggttgtgattgatggcctctgacagtggctccttcattacacctagagtaaactcggcattattactgctccatttcccctgcatcttgtagcatcttgtctaacagaggaacaataagacacctttgtttccatatctaaatctgttttgaatatataattgctggtcctggaaagacctttggtgttgctgctcacagttaatccagatgtgagagatgtgaatctctgtcttatgctgtgcaaaagtattaaattatgagaaaaggcttagaagcaaaattagattacttcaattttgaaaacatcacgtgccatggaatgtcagaacacgacttagtccacagaaagcagatccaaaatgaattgacaatcagtaaaaatgttggatactgagcacaaatctgtggatcataatgcatcaactggtaattgatttctctgccagtgaaataagccaattcatgccagattagattatattaaatacaggtaatctcaggcaggcaagttaagttcacttgccccaaagaaggaggccagggaagccagtctccatggcaagggagaggagcgggtgtggggggagacctaaatgagcagcccagcattgcagaatgtgctagccagggactcagggatgctaggagaacctgggggccaggtctgctttgatgtgcaaaataggcaccccagtcttctccaggggcctgaagccaaataggaactataaacataatttttattaaccctttttatagtgtgtgatgagggaaaaagaaaattggacgttgcaatctccagcatttgggggtgggagcgcttcttgaacatgaaggcagagagacttgacatttcaaaagaaaagttagcatcagaaaaatacagccttagtgtgatgctgtacatggtgacttgcttttaagcctgtatctgagtttgaggggaacctctagtctatatatcccgttccagggacaaatggcagaaatgtttgcaacttagaaggtgtaagtcagctcaagggctccttcctgtcagggtgagagcaagcttgataaggcttggtgagctagctacctgtgtgaagaaaggagctctgggctgtggagagaggttttagctgtgtgaagggttcgaaaaggaaaaaagtttgacttctgttcaatcttcttgctgtgtgtgaccttctgctcgcaattggtttacaatgacctctatagttatagcacaaaaggcagctctacttgagggcttgtaccttttgatctcacccagcattctggaggcagaggcaggcatgcctttgtgaattaaaggccagcctggtctgcacggtgagacccaggccatcctgatctatacggtgagaccctggtgagaccctgccataaaacaattaaaaaaaaagacctaccagtgtattggtggggacaaagcaagacaccctcaaggttccaggggctagctgatgtcacttagctgatgtcacttagcttttggattgcaggaagcagattgatgattctgaagatgtcaccggatggttcagttgaaaggatattaggttacgtagttatgagtaaataatgactagaaacttaatcaggaaattttaagcaggatgaccaatcttacgaatctttaaaatcagtgtagtttattcagggagatggttgctggttctgaatttagtaatggatggataggcatggcttgcagctccacctcctgcatgccttaactggccagttgcaaagcagctctgtagtctccaagtgtgtgccttcacatttctctaaggtcttcttgtgatattcaggtggttttggtcttagaatgtgactacattcagatagtccaggacattaacctttattgatactataaagcaaactgtattcaatagcaaatgcactttcagtattgaatttgcgtctttttctgggctagtggctctctatcctgtcttgtctggtgatgctaggagtgagtgtgagcccagcaacccaccagcctcctggcactgagagataactgatgccaaccaagctctgcagtattagatgctgcagcagttcagtttcttcctgacagtacttactctgattacatgggtttttccatgacacagtccccttgtaagctgaggaaacacagtgttactttttctggttcagtttttgtcttttagtatactgttgataatcttggaaggaaattatcttttaaattttttttttttttttttttttttgagacatctcattctaggtcaggatggcctagaactgtctgcttagcccaaagtggtcttcactttcgggttagggttgtcttgcttcctgagtgttagttttaggcttgagccacgatgatccgttgcctacagtaggtagtttttgaatggattttaaaaaaccaagatataggaaatacatagttcctaggatatatttgaagtgttttcaatcgggttcatcatcacatttcatgtccttgtgcatcttggtgctggccatttatttccctggagaatggttgagttacatggtaacttacacagtattcacatcccaagttacatggtatggttcctctgttcaaggtagtgacttccttcttcccttctcttccttttctagttttcaatggctccagtaggtcagcacgggagaaagagcctgctcacaaacacagaagcaaagaggccactccggggaaggagaagcacagcgagcccagggcagacagccggagagaacaggcttcaggggctcagcccacggccgcctcggctgcggcttcctctgccaagggacttgctgccaaccaccaacctcccccttcgcatcggtctgctcaggacttacggaaacaggtaaccctcagtgagggcctttctagtgtcccacagaaggcccagtttattaatcaaggtgaattcaggctgaccgagctggaaaagtagagcatgattggacagagatcacatgaggtgtctctcttaccctgggaggatccagatctggcctccctttctttcctggatagcttgagcttacacagtattcacataccaagtgctgctccccctccaatcattgctcctcttctcttctgagagggcacctcccatccccttcctagctcatcaagtctgtgctggattaggcacatatttcccactgagggcatccaaggcagccaaggatactgagctgaatactacacagcttagttttgtgcatgagataaaatggatggagactaaagatagactagtttctagtgaagcaggcatataaaatattatttccttgtctttgtgtaaaattatacactaatgcacaacacaggtcatcctttcataattttatttttattttatgtgaatttgtgttttgcctgcatgtatacatgttagggtctcaaataccctggaagtagatcctgggaattgaacctgggtcctcttgaagaatgtcagtgctcttaaccactgagccatctcttctgctcctaacacaggccaccttaagactagaaattagatttgtgtttcaaattagttgtgtatccagattatttacttcttgttccagtgattcatgaagtgtctcataatcaaggatacatggtttattttacatttacctaggaacattgctgctcctctccattaatcgtgtctcttcttcggcactccatatctcagcagtaatgagtgtcattatggaagtagcttgggggtgtagagcaagtaccatttggcctggggtgtctttgcccactgttccatggtggttacatactagctgatctatatcagagtctagggtattggagggaggcaagtcgtctattgctgttacaagagattccatgaccaaagcaactcttaaaataaaagcttctaatttgggtgcttctagctatagaggattaatccctcttcatcattacagggatcatggttgcagacagccacaaggcactgacgaagcacagcctgtttctcaggcagtaggcagagagaatggcactgggactggcattggcttttgatattcaaagtctttccccattcacacacctagtccaacagagctacctcttaaaccttcccaacagtctaccaactctggatcaaatattcaaatagatgagcctatagggccattttcaccacagaagccacaatggagtgaactcctagcacctgtgtgctgccaggtttgaatcctgcagatactgaaagaatctttcttacaagtcagtcagagctgataactttgaccttcacatttgaattttactatgaccctgatctccctgagtcttagagacttcaccttcttagctctgttgtcgaatatgaggttatgccacagggacattgagaaatgaaagaataaatgggtgaccatcagatagtgctctggaaataagattactacagcaaactatagcttctgatatacacgatggtattcaagtgtctgaaggatactctgacctttactgtcagacttgattgtaggaaatgtttgggtgtaggctatgatttgaaagggtgctgctgagcagtacaaaactccgtcctgcttgttctcctgctctggggtagacacctttcccacaggaaaagaactctccttgtactaatggtaatggtaatggtagacagtggtagttagtgctcttcaaggccctgggtcctgaggctgagaatacatgaatgcacacttgtgtgtttctctttgtatgccagcactccatctaatctcatctccagcctctggaagtggaagagtatctgttggtattctgtaatgaggctttcatttaaacaccgaaatagatgtcagtggaatcatgcaaatgattggggttatcagaagagagggatcattttcttttgttttgagatatggtcttactgtatagctaaagctaacctgggacatgggacaatcttcctgtcttagcctcctgagtgctagcattgcctgactcctcagaaagcattgtgaaatcctagtttgccaggagagtaaatgcacttcatagttgtatgtggtcggtagtcaggggtatgagttattgggtcacacctaatatgtcttattcttgatggtgaggcatcaagaacactgagaaggaagttggtatgtcttcatgaccagcctccagatgctcttggaaagatagctgacatgcagggtcacaagagtcttcctgtggaagtgtatagaagtgaaatgaccaggtcttctgacaggccaaaggattcagaatgtaaattctggaaaatgaaattgggaagaaagacgctttaccaaatgaaatccaagtgtcttaggtagggcttctattgctggtactagataccatgaccactgccactcttataaggaaaggcatttcattagggctgcttatagtttagaggtttagtcttcatggtggcaagcatgctgtcatgctgtcaggtagatatggtgctgctggataggcagctgagagttctacatagagataggcaggctgagtgagccagcctctgggcgagcttgagcgtctgaaacctccagcataacccgcttcctccagcaaagccacacctgcagtaatgctgctccctgtgagcctgcgaggctcattccagtcagccaccaaactctttgtgcagagtggtggtgtaaagaggtgttgcctacttctccagaggctttatacaccattatacgccatgttgcctgtgttgtaagaacccaggctctccttccctttgacctgcctcctgtctgaagtcattgcagaacatccttcttcaatcgccctggcacatctatctatatgtactctttgtcaagctcccaagtcctttctgttcaccagaatttaataaagcactaaaaattgggatttctgtcattaaaaactagttagtcaaggaagaatccttggagtccttgggtttcatttccttccctttttctttcttttttaaagaatttttctgtgttcctagaatccctaccagagcatagacttagaaagctatctgctgaagattttgttttcaatgttgtgcacccgaggaaggtccctctacaacatgcctgtgtgcttctctagtaaattaaggctcattcttttgcatgtgcagcttaggttgtacagctatggctcaaggtctccttgccatgtgctatttagatgactgaggtagtctgttctcagtcagagtcaagtgccatagtgctctgaggccaatagaacatcattagtgctagtgctatagtcttcattcccatgagctttgttggtactggttaaatgttggctgccaagaaatgagtatatgctggaaaggcagtgtcattatgtgcagttggttggttccacattttaggggactatttcaaattgtcatattttatgtaaaatctttagcaagcttgtggaatggcctggttgctgatttagcttgctgctgtattgaactgagtgcctcatatctacattagaaagcacttaccaacgaaaccatcttctagccttgtgtatttacatctaattcattggtgttacgttgcctccccctcttctaaacttaaagtcattttcccactttattgcagatcccctctgtcatatcaggcatacctatctagtgggctgctgtgtgcaatgtgctggcactgcggcacatagcatttgtctcagcagtcatgaagcagatgcaggtggatctcaaaacttgagactagcctgatctactgagtgatttctaggcaagccatggctcttcagtgaggcccaagtcctacaatttagttctggtgcctccctagaggtaggtactgtctccaaaagttggagaagctccaagaccaagtaaggctgtggactcttaatctatgtcacaccaagcatttatgttttttactggaccatagtagatagtttattggcatttatagaaaacatctaactggcttctgtacggttctcccatgtgttggtgtggagtgggctgtgaaacttcatgttgactttgtacagcagtttttcaaagtgtggtccatagacagcaacaaagcatctcaaaagacctgactggaattccaaaatctccagcctcgttacatctggagggggctttgtagacttgaggtgttgggaggtggcctatttggacagccatgaacttttaatttccagtgttggtttggatgtcagccaatttgaactatttcgttcattctactggaagttcccaatcagcctgggcttaccacccaggactctttgtttgtttgttgatcggttttttttgtttgtttgtttgttttggtttgtttttttttgatttttcgagacagggtttctctgtatagccctggctgtcctggaactcactttgtagaccaggctggcctcgaactcagaaatccacctgcctctgctgggattaaaggcgtgcaccaccacgcctggcaccacccaggactcttgtggcaagggcaggcggatcgtgattcagcctcaagatggcaccttgtagctaccattagtagcctcagcaagactgtttcccatccacaagccaggcccctgactcagcactcttttgcaaagaggtctctggtttctgtaattgtgtatgttttatgggctcttttggcaccattaaaagcctgtttcttcttgatttttaaattcatggtatagatgacacccatgagactaaatgtaacaccaaactcacagctatggtgattggtgtaaaatcacctacccttaactgatgagtctaacacctcattgttcttgtatttggaaatcagtgggcctctgggggttcggtggtaccagaaccacactgttccattctttgtgaatgaggcaactgtttcacagaatttttcctttggttttccatctgtcagatggatggccagtacaggacagctgcctctatttacccagtttaactgaaacccaaatgagggcttgcaaggggcaagaaaataggaaccatttgtgcaaaagggggttaggcgttttgtagcatcacaaaagaagttagtgtgctgggttcttgctttttgtttttgtttttgctgttttagtagcattattgggtttcatgttctgtgggtcggccaggctgttaacatggaacacacaaaggatagcaaacagctgcttttggaataagaaaaaaatatatttcaaaaacttattgcacacctttcttaaatgaacagcatcttgctgttgcaggttcctgggtaactgatgggtcaatagagagggtctttattctggaccctaagcttcctgaaagagccatctagagagatgttaggatgcagactcatcggggccgagcgctaggcaggactacacagtgggctgcacaatgctgtgtgtggtatgaaactcgtcattcagctagcacagattaattcttagtgggctttctgctgcttatcggatgtcctcatgtctcttctgagccagcaactgtagaagtcctttctcactggatttgcctgggtactaattctttctctttcccctgcttctgctgcctccataggtgtctaaggtaaatggagtcactcgaatgtcatctctgggtgcaggtacaaacagtgccaaaaagatccgagaagtcagaccttcaccatccaaaactgtgaagtacactgccacagtgaccaaggggactgtcacatacaccaaagccaagagagaactggtcaaggaaaccaaacccaaccaccacaaacccagttcagctgtcaaccacacaatctcagggaaaactgaaagtagcaatgcaaaaacccgcaaacaggtgctatcccttgggggggcgtccaagtccaccgggcctgctgccagtggcctcaaggccagcagcaggttgaacccaaagtcatgcactaaggaggtgggggggcggcagctgagggaggggctgcggaattccaaaaggagactggaagaggcacagcaagtggacaagccgcagtcaccccccaagaagatgaagggggtggcaggcaatgctgaagcccctggcaaaaaggcctcagcggcttcaggagaaaagtctctgctgaatggacacgtgaagaaggaagtgcccgagcgaagtttggaaaggaatcggccaaagcgggccgcggctggcaagaatatgctgggcaaacaagcacatggcaagacagagggcaccccctgtgaaaatcgttctacctcgcaacccgagtcctcgcacaagccgcatgacccacagggcaagccagagaaggggagcggcaagtctgggtgggcagcgatggacgagatccctgtcctcaggccctccgccaaggagttccacgacccgctcatctacatcgagtcagtacgtgctcaggtggagaagtacgggatgtgtcgcgtgattccccctccagactggcggccagagtgcaagctcaacgatgagatgcgctttgtcacgcagatccagcacatccataagctgggccggcgctggggccccaacgtgcagcggctagcctgcataaagaagcacctcagatctcagggcatcaccatggatgagctccccctcataggtgagttaattcggggattgccgggtgggttcagctgggccgtcatctctaactcgacaatagttgcacttctcaactcatttccctgctcttgtagaacctctctctctttcgtaataagtttggggcttgctcttggtgctagagcccctgagctgctgctgctgctgctgctgctgctgctgctgctgctgctgctgctgctgctgctgctgctgctgctgctgctgctgctgctgctgctgctgctgcatggctttttattgctctagagttgctgtggttgggcagtgtccagggaagggctgaggtcaggctgctacaatgtgccatggcttcaaaaccacaaattaggggtttctaattctgcatgctggcaggagtggtttttgctaaattgtctctgccttgtagtaggccacctgcactttggtcctcatagagtctttcctctgtatgtctgtctggatatctccttataaggacatcagtcaggctgtagtaaggcctacttgggtgaccttattttaacttagtggctactttatagactcttcctcacaataccattccatcctggggttttagggttttgtacttgttaatatcagcttgggtggtcttatatttcaccttacatggattattcctttttttcttttcttttttcttttttttttaaagtttctctctcttaagatttatttattattatatccaaagtacactgtagctgtattcagacacactaggagagggcgtcagatctcattacggatggttgtgagccatcatgtggttgctgggatttgaactcaggaccctcagaagagcagttagtgctctaaactactaagccatctctccagccccttattcctttttcttttttagtttgtcctagcattccagtacagacatttctagtgaaggccaactagcttttacattgaggccagtccttcaaggtggccagcagctcccctccctgtgggtttcaacccttatgaatcagtacaatgtctgtggttgggatgtatggagtagctcagtagtcaacccagggacacagtgacattaacaggtggagagtttataactcctctcccaggaggctgccattaaccatgcctgatgggtctgttgaaacttgttggtttgtcatctcttgccagtgtcagtatgggaggagcaggctttggatataggcccatggacgtgatcaggaagccacacccatttagccccactgctagccctctggtaacccagaggcaagtgagtaagtcctgccttagagagctctgtggtgccactcttctctcccttccagtgcatagtgcttttgtgttggggaacaggtgagatggcaggtacagttgccatagtaacccagagacttgtcccatagtttgttgttttcccctgtaagtcacgagtcagttcatcattactcatctgtatgtgctttgccattacccataggataaaagctacccagggccactgatttggccatgcaggcttcagacctagcgcttccactgggtaggactctgactcctggggagcctctctcccagaaggcacttagtaagtgaagccttgatgggtggtacagccatggaatgagggttgacgtgtgtgtttttagagttctaaggaactttgcaagcactgcatgtcacttaggactgcatacatagttaatactttgattttggaagcactgaaaaagatacactgtagcgggtgtgttctgggccgtgttggctcgcaaggagcgtctcattcatggaggaagactttgaagattcatgacagaaatctacctttatttgccaatgtgattgtaggaccacaaagctgctgctgcctgcccgtgctgggtctgaggtccgtttcctccctccctccctatgctcccagccaagtcagttctggtatttggtagagcaataaatgggatctatgctgctgtctccatcttactgacaggatagtctagggacttaatctgtagacagctggacagaataggtggtataggtcatgcagcgcccagcctggtcctgtactgtgtcaactagtggcatatccctttattaatttaattaataattaactaattttattttattgtcaatttagccctacttttgaagattgaagaaatccttgttttgttgtttgtattgcttggtttttggtttcactgtgttgttggtagctattgctcttttcagtgatgtggcttctccattttccatccaggtggatagagagatatagtctgtatttaaacacatctgagatggatttgtttctttgttggttgtattttggtttgtttgtctggcacaggttaggcaagtattgtaccactgacccactcagcccagctccactgacccacacagcccagctcatatttgagtgttgataaacatttagactcatctttttggagataagtaccctcttgtctttttttcttggatgagacaaaaaagcctttctgagtgaaagctaggctatttggaagagacttggctttgatcacatgtgtctgacctttcacaatattgatgatgcagtaagctatgggggagccctggccatgctctgctgtagtcacctgtacccctctgtgtagtagtgccctggtctatgctgagcacagctttggtaccatttcagtggtcctctccttctgtgcatggctacctctttccttctgatcaattcctcagatactatttctggtcaccttcctaagatgatcataccttagtttgcttgtctcctggtacttagccacgactctaagcagtgctcaaaactgtttgtacatacaagctggctgctggctgctttagagcagcagttttgtagtaaggctttcaggactaatagggcataggaaaacaacttgtgatatccttgttaaccatttcaccccattgctgcccaggaggctgtgagctcgacctggcctgctttttccggctgattaatgagatgggcggcatgcagcaagtgactgacctcaaaaaatggaacaaactagcagacatgctgcgcattcccaaaactgcccaggaccggctggccaagctgcaggaggcctactgccagtacctgctttcctatgactccctgtcccccgaggagcaccgacggctggagaaggaggtgctgatggagaaggagatcctggaaaagcgcaaagggccattagaggggcacacggagagcgaccaccacaagttccactccctgccccgctttgagcccaagaatgggctcgtccacggtgtcacacctaggaatggattccgtagcaagctcaaggaggtgggccgggccccactgaagacgggccggcggcggctgttcgctcaggaaaaagaagtggtcaaagaggaggaagaagacaaaggtgtcctcaatgacttccacaagtgcatctataaggtgagtgggctgtgcggtagggtgtgccctgccctgctggagccggaggaagctgacttgttctgtgggatgagcgctaggacgctgtcttaggactgttctgagctgctgtgaccaaatatcacagaggagactttctgtgttgcttctagaggttgggctctttctcatttacagcattaggtgagtctttggcaacacagaactgtcatgaaatggcgtgctctccatgcctgttggtagttatttaaagccgatactatgatagtatattaaaccccaggaaatatttcttgttgtttttataaacctgatatgttaaataaagatttagttggaaaaagctgacatggttggcccaggtgcccacaacttgtctgtggcactgcgggtggctgcaggggcatgcccatcacccctgtctgttgcatctgtggtagtgtttacattagatccttcttgtacttagggagcttagaaaggtttcaagttgcaggaaagtaaccttgtcaacctcatgccgagccttgccttgctggagagcaaacccacccctgtcttcatgctcacctcttggtgttgctttcccgagcacagtgtactgggataacaaacttaggtgggtgttgtcacctattgagcacacagtgtgtctttgtcactatggggaagccactggacagagacctatgacagaaatttatgtcttaacataacatgtcttaagccaaactcttcttctgttttctttgtttcagggaagatctgtttctctaacaactttttatcgaacagcaagaaacatcatgaacatgtgtttcagcaaggagcccgcaccagcagagattgaggtaagtaagttagccatctccatacaacgtcctgtgacactaggaagggtcttggtgcagtatgatgggacacaaaggcagaggttgttccgtgtgtctgtgcttgggcagccaagcattttactctgggaattccctagtctgctggaagggcctggggggcgtgcctgggctccatcgctggtccagctggcagttttcacgctcagggaactgcctccttcccatcctctctgtgtgttctggaggagaatgtctggaatcccctcaagtcgtggtgtgcttttctcctttcctgttcttcatgtaatgggattggcaggtggccatgtttgtgcttctgccagctctcttcttggagttagtgcagtgttggaagacagtgtgctcttgtgtgcccgggccaattagcagctggtccgtgtgaggtgctgcagaatagagctggtcctgtttgtgtatattccctggccagtgcccagcagagtccttcagaccctacagctgctgacataggaatctagcagtggctggtttgtgaagggagagaagccagttctgattcctggctcagcacagagctaggaagagcagtgttggggaggtgtagcttctccttctgggtgacaggttcccagccagctttttagttgactctgatttagaacttggataactctcttgctgctcatgctctacctagctctgtagcccggagcctgacatccactgccaaccccggggtcagctctgtccaggactggtctgacacccatgtggccgttttggctgcttcttcttcttctttttttttttccgagacagggtttctttgcagccctggttgtcctggaactcactctgtagaccaggctggcctcgaactcagaaatccgcctgcctctgcctcccaagtgctgggattaaaggcgtgcgccaccacgcccagcctatggttgcttcttgacacctcattgacactatggcagacaggccagattgagagggttcagcctgtgtcgcccctcctgtgttgagctcatggttactgctggccacagctcactttaaaggcctctacaagcttctatttaggatttttttttttttccttagaaagactagattttgctgtaaactgtaatctgaataaaggaaattgcaggtttgctgaaattcgtattttagtttgtgccggctgctgtggactcagtccttgtgcctcctctggacattagtgcctgcaggtttcagctctgatccatcagtctgaatcacagggtgttctttctgagtaaagggtccattcaggaatggtactgaatggtacatggcattcctttatggtttgtggccgtttggcccttcagacaggcctctattcctgggatttgggttgcagtctcatcctggatgctcattggttgagtttttcacagtaaggtttggtgggaggagaatggattgaaagtgcagctgaggttggaggcagggccatcttaaaggaacatgacatcattccttcactcttgattgcagtgccttctcaaactatccctttcctaatctaatcagctcagtttgttgccagctgtctgtctgtttgtctctctctctctctgtctctctctctctgtgtgtgtgtgtggtacattttgaggtcagttttggagtaagttctttctttccaaggaaagtttcttttccagggataaaagtgagtttagcaggctcattgaccttccccccccccccccccacacacacacacacacacaccttatttccagttcccaaaggaggatgctgacttgcagcagagcactgattgctttggagaggatggcaaggagcagttgtgctatgtgttctatgtcaacgcgttagtttccaagtgtcagtatggaagtctttctccccttattctcactgctgtttgtttgaatttctttcctaacatagcatttcaccagttttaactgttaatgtttgttgatgcttgtgtgtgggtttgtgcttgcccacagcacatgcgaaggatttaccttcttccttgtttgaggcaaggtctgcactcactgctgcccatgcaaggttaggtggtttgagagcacctggggattctcctgtgcctgcttgcactattgccctaggtgttctgggatcacacatggactctatgtcatcccgttttagttaggttttggaaattcaaactcagatccaaacacttgtgtaacaaagtgtttaagtgtccatttctgggagatcaggtctgttcatgttagtgtataatcatcgtcccaaatcaaaattcagttctctatgctcttcctttatcccagcagtctctggcctgctttgtctcaggcatctcctgtacaaactgctattgattctgtctgtgtagtctcctcatgccctagccagtgtgtcagggtttccagccgtcaaaggctggggtgcgtaaccacatggttactcagcatcacagcatatgtgggtggtttccccgagtgttggacggagctgtcattctggcatcacagtgtatccagagacgctacatacagtcctctgttgatttgaggatgtgtccccagagatgacagttgtattgttgccttacgttctgagggagttgctcatgggagtttcctgatatacagacaccttgtactggatatagtgttccaactgcgtctcagggtccaagtacgacacagacactgactggtttttcctcttgtcaacagcaagagtactggaggttagtggaagagaaggactgtcatgtggcagttcactgcggaaaggtggacactaatacccatggcagcgggttcccggtgggaaaatcagaacccttttcaaggtaattgtacattatcttgtccgtgtttgaggactctccccaccagctctgacagccccttctttccctctgcaggcatggatggaacctcactgtcctcccaaataacacagggtccatcctgcgtcaccttggtgctgtgcctggtaagtatgacctgatctcttctggcttcatcgtgagaacagagccgggtggctcactagtagagaggcctggggccttggggccagagtccatgcagtttgatgaaatctgaaaactgtggacccccgaatagctgaggcatctagttaaaatcagagtatcagaaaaggcttttcaatattaatcctgactcctgaaggctgtttttgctagcaaccacagttaagtgtgctgagaagtgaaaggtgctgcttcttctggcttaggtaaagccactccacggagtgtctgcttgctatgaatactttgggccttgcaagggaagcctgggagactcccttctgtccaaaccaggatcccaccttgttcactgtggacagaggctcttaagccaggcctccctgctcctgggaggagggccagaatagaagactcttatctctatgtagcaagtggggaggggcagacagctttttcttaaagtattaggtctgtgagagcagaattccatatgcctctcctgaggacactcttaatgacatctctttatgttgtaggagtgactattccctggctaaatattggcatggtcttttctacctcatgctggtctcgagaccaaaatcaccttccatatattgactacttacacactggtgctgactgcatttggtgagtactcacccccagcagcaggtacagtagccttgggcacctcaggaagctgatgctgaggagggcagtgataaatagggcctgactctgtaggtagggaagagagacgtgctttcccctagcccgtgactgtgctttgtacctgtgctgcaagtgttggagggtactctctgtgaattgcctgcctaatctgctttctctcctccttccactgttctattttatggaattcccaaagtggattccatagcagcattcataaaaagtaccatgggggacagggctgggcagctttacctaagtggcctttggcaagaactccagacctagtctgcccaattgtcaaaaattgtgtgcccatgaggtgtgtggcacagtgtggtcttctcacagctgagctctctgatttttgtgttgccagcagcagatggggattgactgcatatcatatgatgtcctgtctcatagtctcatagtctccctcccctcccctcccctgccccctcccctcccctcttctttccctttcccttttcctatagtcagatctcattatgaatggcttcaaccatgaggttgctgggaattgaactcaggatctttggaagatcagtcagtgctcttaacctctgagtcatctccccagcccccgaaattttctttattaaatagaatcttcaactgatgtccaatgtgggcagcagtttgctagtgtggttgtttagtttgttcataacctgatgagcaaggagggctcgtgtgttgagtatgatcttcagtatcctgtggactgctaaggtgagaggctgggggtggaggttgacatatgtggaaacagatcgcagtgttcatgggcaaatgacagatggcagctgtgcaatgtgccacacacatgcttgtggagaagcattgtgcaggtgttcctgtggcttgcactgacctgtggcacaggcatgtgaagatgtgagtgtcctattgctgtgatgaaacatttccaaaagcagcctggggaggaaagggtttattttatttggcttatgcttccatatcactgctcatcatcaaagatgattggaacctggaggccagagccgatgcagaggccgtggaggggtgctacttactggcttgctcagcctttcttatagaacccaggacccatgggtggccttacctacaataggttgggcccttccccattaatcagtaattatgaaattttcttgcaggcttgccgacaagtgcatcttatagaggcattttcttgagattcctttctctcagataactttagcttatgtcaggttgacataaaactatccagtgtgtgtgaatcaggttgttttttatagctcgaatgtgtagttggaggtgttgaaacttgagagtgtgtgacctatttgaactcttatccctgggttcatgatggcataaaagaaagcagagccagggatatcatcaataaactttatggcacatggtttttcaactggtctcttcctgaccagctccaggtcctccctggttgtcttagtagcggggacctaggtactatgttttcccatctcgaacagcatcaaatcctgtgcctatgcctgagaacttggccactctttgcagtgccagagaactcacccaggctgagggagtgtgtacttgtgtgtgtttctgatttatagagggcttcactctctggctttggtttgaagacttttggctcaccctgtggagcagatctgcatagaaagcaagcagtgtgtgtaaggctatgcctgtggtttggctctgtgctgggcagaagcagccaacagcaacagagcaggcactgggccagcactccagcctggctgccccacagaggtctcatcaaatgtctcttgtctttccaccaccccaggtattgcattcctgctgaggaggagaacaagctggaggacgtagtccacactctgctgcagggcaatggtaccccagggctgcagatgctggagagcaatgtaatggtaggtctattattgttagaaagtgattctgttgtcagctcctgacaatgctggcttgggcctggatgtgctacaaaaggtcttttgggcctaaggaggaggaagctgtgtgtgcaccatgggttctgccttgccgaaaattgactattaggctggcattgacttgtgttttcatgattgccttgtttgatattttctgaaggataatcataatctggtttgttaggcagtccctccgtcagaattcctgtacagctgaacttcccccataacctggatggtgtccatggggtccatggtgcagaggggttgcccagcagagcagcaagggccatgcatctctcagttggcactctctccccagatctccccagaggtgctgtgcaagaaggggatcaaggtccacaggactgtacagcagagtgggcagtttgtcgtctgcttcccgggatcctttgtgtccaaagtatgttgtggctacaacgtctcagagacagtgcactttgctaccacccagtggacaagcatgggcttcgagactgccaaggtaagcagagcaggcgtccttaggtactggatgtgatactgactcaaccgtaggtctctgaggtgctgtcattcggtgctggagagcctccatgcctggaactttttataggaaagtttttgaggtttatattaagcttttgacttctatactggccatgccacagttgtggggaccactcaaatatagttgtgcttctgcctcatgctggcagtgaggtgccagaacttttcttggaatcgggtactcagtactattattctccaggtaagcacaatggttgaacatctaacagcattaatctaggtccaatggccactttagaaactcacacagcttctctgccactgtgaccctcagctgttacttaatcatggaaacagaccctttgtaaaggtggttcttctttcaggagatgaagcgccgccatatagctaagccattctccatggagaagttgctctaccagattgcacaagcagaagcaaaaaaggaaaatggtcccaccctcagtaccatctcagcccttctggatgagctcaggtagtgtagacccaggtctcaggacctcaggggaagcaggcccaggtggaagaagcaggtggcagttccctgaactgcaggccacctgcagctcattaaggactgaaactttttcctttggtcctctgctattcctccatcttcctgtctgataatgggaagctcttggtgagctgataatgaaaagtgctcccaagctctttggggtcagtgctgaacttgccttttggtaataatagtatagaaaaggaaggttgctgggcctctctccccatggctgaccctgtagtctagtctaaaggggtgatgacatgtcctttttagtgggagcaggtattcattgtgggcatttgaccttctgatgacacccgccacttccctgcacagggatacagagctgcggcagcgcaggctgttgttcgaggctggccttcactcttctgcacgctatggcagccacgacggcaacagcacagtggcggatgggaagaaaaagcctcgaaagtggctacagctggaaacttcagaaaggaggtgccagatctgccagcacttgtgctacctgtccatggtgagtgtatgtgtgagagcccagtgtgacccaccacggcctcaacaccaggcctacttcagggcttccttcagaccccagcctcctctcactatggtagcaggagtgggagtcacttggccacagtgggcagttctatctagtactggtgcactcccctaaatcccttgctttttataccacttagtaccacacctacattctgttacaccttcatactgggaaacaccctcatgttcccagcctgtatcctcctctgtgattctaaattctatcaggctggcaataaagattaacctcgaggttttattaatagtaataaatgtgttttgcttataaccactgaatttgtgattagttcttagaatctttcaaaggcaacctgttcttctgaaatttttgtttgcatggaggcttctgaaataaaagccctagacttaaaggcctgccaaatatttgcacccaagtgttgagaccattgttcctatttctttttgtaacatacaggtggcaggacttgaggggtatataaaggagacaagtacacaggcccttcttctaggccctctgtggtcagtggctttccctgtttcgtcaggtagcagggcgtaaccgtagttgcttaatctgctctaatcacccggccacaagttccttgctatctgttctggattcttgaaagatagaccgacacagagagatgggggggagggggacaacttatatttaatatgccttaatcagctcaattgctgggccactcctaaacatctatgctcatgcctcctaaattatgtactaaaatctatattccatctttgcttccctagaccccgtgaggggccctctgagcccactcttccccacctctcacatgattggtatgctctcctcttccttctgcagttctcaagcctgcatcttattccttctgcaatttggctttcttctctcggttcccttgcccaggaatcctcaagttccatctttattcaccagtcagaaccaacttggggcagggaccctctttcaaattagggaactcaaataacacaatgcaagttaaggccaaatacacaacagcagggcacttgtttggtaggcagcagtacttgatggctatcttggagattggaagacatgtctagttcacaggggtttacatgttctctggaagctgacagggtcgcaataccctgcacgtcctctggggtgctattatcaggagtattttggtcagtaacttcccaagcccggacctgaggcagtgccagtatatttagttccatctctggaggagagccaaggtgggagccgttcctttcttacttccttccccttccctgccctagcagaagaccctgttgcagggtttcttacccctgtggactgttgtgagccaccgagtcaggtttgggtagatgtgtggacagacccccttgaactcagcatgaaccctgtctctacaggtggtacaggagaatgagaatgtcgtgttctgcctggagtgtgcactgcgccatgtggagaagcagaagtcttgccgtgggctgaagctgatgtaccgctacgatgaggtgagttctgacttagaacagagttgaagttagcttagtgcctagccatgcttgcaggatggagactgaatggaaccactgtcactctaagtggatgctgtccattgtgtctcggttggagagctggtagcttgagttgttctcagtgtgtctggcccccatctgtccttacatccttggcactcagtctacagatctgccttggcttgttttccaacctctttccatgcatctcttgttctcacggactctgcccaattctatgcttcctccattcagcaaggttactccctacacaggagatacctgactccagacatggctctccagagctattcacactgccaactgcctcgatactgtgtgttggaaagaagatttctgccttcaggactacttgtgcccagagctttttcttgtggctccagagcctcctgtgtgggtcatcaggcatcactctgcttggctagtggctacaccatcagccatggaaactctgctcttctgcttctcgacttttcctagccagacaacttcttgccctctcatgagccaattgtcaccttttccttacttagccttgtcctacctgctaaatgatgtctgcttctcatggtagtgccatctatcccaggatctgcactgtcccagtcactaaggaaatggagtactgtgattggcctgagtcctagccctagaagagagagggtggttgcaatggcagcctcatgagatctgagcatcccccaacccttgtctgtatagccaggaacatgcagaaggcgctgcctcaaggactttcttggctgtggacagtatgcagtgtggcagggaagggatcatttgagcccaggacttgagtcccatgtctgccttacaggctgtggtattgtgcactctgtagtgacctctgagtcagtgctggagtggtggtggccgtgctctctgcatgatgtggacacttgccactgaccatggcctctgttcgtagttgaatgctttagactgagggtctaactcccgggtgggcagttctggaatatggcttcctgtgctgtccacctgctgggtatcatgtctatgtgggatccatactatgtcttcaggtccatacacttttcatgctcttgaattttgtattcagttctacacatcacattcacattactttctaaatcagtggctctcagccttcctgatgttgcagctctcgtctcaggttgtggtgacgctgaactatttgttgctacgtattaactgtacttttgtcatgaattgtatgtacgtagtatctagtaagataagcaggatatctgagacgcctgtgaaagggttgcctaacccctgcaaaggggctgtggcccacagattgagagcagctgtttcaaatgaacctcagtccaaagagatcatctccatgtggaataccatttagcatcccagttggtaccctagcatgttcagtgatgtagggtatacacttccttgcccctcccccaattcatgatctcagtcctgtagatgcttttggactctgcagtccttgtcactcctcttgggttcaaggaacatcttaaactgccaccactggccatcctggtctgaccagtgctgcacatatggcaacctggttcccttcttcaggcaccatcttttggacagtgcccaccattactgtgtgttccccagctctgtagctggctgggcaggcagcatgccatccatgtggtcccaagcactgcgttttagtcctaacttggccaacagaatctttcccttggaaagtagagcgtaggtctatttgcgtcctttttgttcaatggcagtaacatagcttctttggttcctactttgtcacatgaacagtaaatgtcacaatgtgcttaattaaaattaaatctcagcaatgagtaggaattaccatctggcatcctgtcccatgtgcttcttccaaagaccccagccaggacccagagttggcagcagtggtcagggccagggagtgtaaatctgtgcacatgattaggacttctaaaagtgcattctacaaactgagcactggggtaggaagccacatcttactgggaccaaagtcctgaaagaacaggagcacatctggaagcagcctctccctctgccagaggcttgctgttgtaaagggtcagcactagccctcaattgtgttcagctgggtggactgagaaaggtaggatagacacaagctcttagttcagtccttttcattccttgtgcagcccaatgacagacacacaaggggttccaggcctgttcctcccacacccctatgcactgtgaagctcccaggaagagcagggctcccagacctgaagatagacaggcaaggctttcacaaaggagcttgttttaaggaggcaggggactatgtcacatccttcagctgtttgtaggctttttagaggcagaacttgactgtgtgaacctggagtcttgtgtccaggctgcctccattcctcactgctggtgttcttgcctatgctctcttgtttttgagacatccttcctttgtgtccctggctgctcccaaatatgttctgctagaacctctgcagaactgtgattctacgtgtgtgccaccacacccagctatggataccttttagtagagagttgcacggtcctcttgggtgaaataaagggatatagctgacccatttccccctctaatgcagaggtcacacacaatgagtcatgtgagctgctgatgtcacatgctggagaactttagcatagcttcaatctgtaatgtctcatatttggatgctgttgttaaatttctggatttttcttgtcatgttggctctcaaagagggcctgctgcctcagcttctaccctacctccaactatctgaagcagtttcaggagacagtcttcctccgagtgtggaggcatctgtttctcttttgcaggacaggcatttgagttctttatggagagttatatacatgtgaatgcaagcatactaggggccaaaagtgtcagatcccccagcggtggtgttagttttagtggctgctgggagcccacaaggcagagaggtatgcacggtgctcagcagtctcggcagccacaggactttccttaggtatctccctgtcctgttcacaagtcctctgcatctctgaatcctaaagctatttagaaagcctgctaatgtccagtgacacacactgataagtcataggatttggtgcctctgctgcactaacttaatgttgtctgtctgtcctggcaggagcagatcatcagtttggtcaaccagatatgtggcaaagtgtctggcaaacacggtggcatcgagaactgtctcaacaaacccacaccaaaaagaggtccccgcaagagagcgaccgtggatgtgccgccatctcggctcccatcctcatgaagatgccgaacccatggtcacttatatattttttgtaattactatattctagtttggagtacttgctgtaggatacaagctgtctttgcactagctctaaagaagaatttcttctggttttagagaactgattttgttttagcattaaactgttcaagtttttgtacgtagatatctagatactgcagtcaggtttggaagctgccgtacactcactgtctaaaacccttgaggggctgtattaatttgtatcgccccatggctgtgaaatgcctttttttttgtttgtttgtttttgttctgttttgtttggtaactgttgaggaataaaggctttttaacccatttttgaagatggtgaagtttggagaacaaattttaaaaccatcagtcagatgagatttttctagattggaaaagggatagaagatacacacacacacacacacacacacacacacagaaaaaagaaaacttgaaatggctttactttggctgtcttttcttctgtcatgtgcgaagggagtttgtaacttttggaaccggagagccctgtttctttggctgggcggttatggcagctgaaggcaaactgtgaggtttgagtgacgaggttctcataccagcacatcactatgcatccgttcgagggagagagagacaaagacaaagactgcctgccttggagggtcactgagggagacctgtgcctgatttcattaggaaatccattctgttatttttttttggtgctgttggctactttatcaaaaaaacaaaaaacaaaaaaacaaaaaacccttcaatagcatccttgaggaaaaggaacagcagttgactgtaagtgcttccctgtcatccatgtgcaatttcccgacattccacctccatctctgcttgtgtccctcacatcagcattaatctttgtttccctcacacttagagccactaagtctgcagttctttttgaatgtgaaacacatctgtgctcctcttgtctattttttctcttcatgttttaacaaaaaagaaaaaaagaaaaaaaatcccatcccttttgtacatactcctgtaaattgttttaaatacttgagccttttcttggagggggagggaaggggtgagaagatggagaaaagccttacgtttccgtttcttcatcggctgattggatgcttacagggttctcttgtgacatgtataagtgctgcttacatcactcaacagcaacagaacgtggtagtggagtagctgttgcccttctccggctgtgtgtacagtatgtgtggaataaaaaagggaaactgttttcacaagctgttgtttgtttcataattggatcagtccatagctacccacattgcactgagcttgccagtggtgactgccaggaacgcctaggatccactttggtggctgttgttgcagaagactaaactgctttggactatttaacgattgcctgacagtcgagtgtttccaatgtggtcgtccagtttctatggccttgctgtggactttcccctctttgtcggtaacctttcgcctatggcttacagttcgacatttaatttattagcgctgctctgcacccctcctgccgggaggctctgtgtggttattgccagttctttgtttacttttcaggtttgtactacaaggtttaataataaaaagttttttggacattttgtctgtcttgtgggaagggattgggctttctttggtcagtggggcaggggctacacatcctctcttaggccagggagcggagctacagaggcatgtccgtggcactgctcaccactctgggctgcaactaggctagctcatgccctggggaccttggggaagcaagtttctttcccaggttgtcacctgatgctaggtaaaattaagttcttcagatcccaatttgaccactattggttatgctaacagactctgcctcccagtatggtagggcacggtgcccacatagcctggcctaggtcctatttccttcaaggccctctccagcagacctccacacctgtgtttctttaggaactcttggtcaatcagctctaagcacctgtcaaggcaggggcctctatacgacccatatactcaccagctgcacagtgtttattccataagctttattgtgagcgcttctctaatggttcttacatcccattagcaagtgtgtaaaattgaaaacctctaagcacctggctttgcaggaggattctgcgcacagctgacaagtcacttaaatgtcctgagttgagtcacactggtcactgtcatcactgacacctggggtggactttctgtcagtgtgtaatgtgaccaaggccgtgtccacctgtacctcctcctcatcagactggatgaggggggcatcagcagtgtccaggtcagtgcaggcagagggtgaggcaggtggctgggatgctgattctgagggacttggaatctgaagactcatttcattctgattggggttggattccatctctgttgaagaaagtagaaaaagcctctgattgcatttgggaactgccattgaggacaactgcccgagatcctgtccctcagcctagttgtagggtccacaagttacctgaccacctattctattctgtggtaagatgaagaagtctttaaagccatgtaaggttcagttctaaacacatggtaaaagttagccaccaatccttgataccctagctccttcagtttctattcactcgtgctaagatgacttactcggcctttagcattcctccaattttataaggattttcaaggaatcaagatttttacacacagtcagtcactgactaaatcatggctctgcaaagggctgagagggtaaggtctgagaaatcggaccctcactactgtgggcctatatatatatatatatatatatatagtggaggccgagggttgcccttccctcatgtatgtgaaagaaactgaaaagctagctgtgcagtggtgacaaacaaaacaacctcattaggaaagctgatcagggttaggaagcaactgctcagtgaacaggaaatgacagtgccgtgtgagccacacaggagagctaacacttccccagtcctctgggacctgaccagctcactggaagcagtggaggaggaagaagaagctgggctaagagatgtgactttagtgttgtcattactcttacccacaccaggggacatcacaatgttgtcctctccgccggagttcaggaagacatcgagagcctcctggtctgagatgtccatcaggtccatctgctccagcacgtccacattcacttccatggatgacatgctgcccataggctctgataaaagagatggactttttgctcttcatggtaatggtgagtttcgttgggctaattacactgtttgctcctagttcatgctttcaccaaatgacattccagtcttgaggtatcctaacttatcttttcatgtaggtggtatttggaacagggtgctcctatagcatgcaggggtaggtaggagctgtcttcatgggtcagaaggaagtcaggaaattccatcccgtgtcaatgtaaccaaaattgcaattaattctacagtggtagcatgagaaggactcagggccacagggcttgagtgcccaaggcccagtgcctcttagtcctaggtagtcacctcccaaccagcagccaagaaagtaatgctaggagtgagaacgggcctgggatggatacattctgaaccttggacttcacagatgaggagatagctgcagagcaaggggcagcacaaacaaaaacaaacacagcacagatggaaggtaagtcagtgtgggtgaggctcctaagatggaccaggtaaacgagttccccactgaaagttaagctttgcacaaactgaagatgggagtgagcccagcagaaaataagtagatggtacagtcagccagtcagttcctcaacattaggtatgagcacacacagcctcccacacatgaggatggagttgggttagctctacatatccaagttcacgaagagtgaataatttcgctgatggttctgacagtgtcattctgagccagtcaggataagcttaggcaagatggacttgaatatattggatgtcaccaaagctttcacacctttccagtgtgaaacccatagggacaactgcactaatgtcacagctactgtgggtggggttgggagtggcactcccccttaggctctcgtgccccagtggggctcttgagagtgtggctgggtgctgtggtgccagcagtcttctggattcgagcccagcctttgacctcagcctggaaaagagtaatgttgagcttgtaggacaggccaaactattcaccacatggaaatgagctatacctgcctagcctagtgactcacatctttatcccagcacaggggaggctgagactacagcatgacttcaggctatgtatctgtatcacaatcgctccagttttgtgattctcctgcctcagcctttagagcaccagatttattcacagctgttgattattcattatggttttagaaagctgtcctaaccgaagtagaaaaactttcacctaacttatgtcaagtaagtattaacaacatcaaaagttgtcaaattcaactaaaatggaatcccaacaggaaattctcagcgttggatgtcttactaccgaataaagaaaaatgagtctatatttctcatagaaaaaaatgaccccattggtgcctttgatcttagcactgagaaggtagagactctgagtttttcatattggcctggctgcagtgagttccatgctgtacagggctaggtagtgaggtcttacctcagaaaaaaagacgcccaaaaaagttcagttctcctgccatgcctcaggtgttgcaaagtacaggcatatactgccgtgcctggctacaaaactgatttttgccaaagcaaagatgagccgtggctccctggagcccagaaacaaacactagagcagagcggccagtggtcctgctcagtgtctaggatatgtccgtccgccatccgcccagggtaacctgagagtgatgtttcccaacgctgattgcagaaattggtcagttgtgagtcttagaaacatattacaattccaatcaaactaagtttactgaagaactaggaacaaggacaaaggaggtaatggggcggggactattgtccaccattctctgcatcggaagactgatgctgtcctgtgtggggtagggagctcagcggtgccactgcctgtgagatccagtggaacacctttaacccacttaaaagtcttgtccccagacattgccagatgtcccatagagtctagctagtacttaatgaaacacttaaaaaagtcacagtggaatgtcctcaactgtagttaaaggtttagaacacacaaaggtgtgtaaggtggccagagcaagtcaccttgagaaatactgttttatcagagaactgtgaaagtcaacatgtagactcagtgaaagacttgcttactgtcaaaggctaatggtttccttccacagcctgatggtgaggccctattcctgaaaagagcactaatgtcactgcatcagcaattaagctggcgcccaaccctactgacagcctctgtggtgctgggagtacttcgcaggtgtggtgggctgaatgagaatgactcccactggcttctttatttgagtatttgctttccagttggtgaaattgaggattaggtggtgtggcattgttggaggcgtgtcagtcactaggatgcacgccattctttagttctgtgagtgtgagtctgtgcgtgcgtgcgtgcgtgcgtgcgtgcacctgaggatccagatgcttcatgaagtcccacgcctgcctgaacgattgcatgcgctgtcacggtcatcatggaatccaaccttctgaaactgtaagcctcttatccgagcaacagaaaactatctaagacaacatgctagaagaggaggaaataaagtcatccgtgtcacccagctacaaacccagtgacatacgggtgcgatagtggcccaaaagttatgggagtgaccacccacttttgaaaaatcagctttgaggttcatagcttatcttgagactgctaaaggggtcccagatctgagactagataggtcacaaacctagaaggaaaatgatcactatgattatgctagaggaacagaacaataaactactgctactgacattgccacacacagtcttactcaactctatcagagaaactactgcttgcttcttgatgggtgttaacacagacccacaaaaaacaaccctacaacataagacagaacattcggtcctcagtagggtgtcttcacatcccttcttgagatttagacatttatatggaagaagagactgaaagattgtaagagctagaggtggcggttgactccaaggaaacaaccccttccagtcacaactggactaagacacatgaactcagattgctacagaaatggacaaggtctgctcacgttcatgccagacaaaatccagcacagagaagaggaagtgggaacaaagttctctctctaaccaggaagctctttgtaactgacagatgctggggaaggggaaatcagttttctgggatgatgttgggtacacactccagggcatgcctgatgggggcacagacttcatgttgtgtggctgttttatttaggaactttttgggctttttgttgttgttgttgttttctccccagagaaaagggagggagggagggagggagggagggaggggannnnnnnnnnnnnnnnnnnnggagggagggagaaacatgaagttggttggtggtgtggtctgaatgagactggaacccagaggatcctatatttctatgtttagttggtaatctgctttaaggattagcaagtgtggcactgttgaaggtatatctttgttggaagaggtgtgtcactgaaaatgtctcttttaaaaataccctgaatacttctttaatgaaagggaaaaccaataataatccataaggaactcccctagctaggagctttgtctcagagccttctgggacactgagctcaatcatggcagtattttctcctgtggacgtcaacactcacctcattctttccgtgcacttgaacaccagaaaggttagtctagtgggtacaggcagccctagccccatgggccttaatctgtcagcagagatccttataaacttgaaacctaacttggagccagaagctaggcagcaggcagagctgggcatctctcaggagatctgtccaaacccagagagtgttgcctagacataaaaatcaaagatgttccctgagagatgatgttgggtgcaggggatgaggactgaaaccgggaccttccatggcccactgggccttagtgcactgtgagctgcaggcctgcagtgccctgctccagggcctgcttttgctccctgccgcatcatgcatggctctggagctcacagctgaatttgcattctctcctgacacatttttggatacaaagttccatggctttaattaaaagtaaaacttgtaaaatgaagaaaagttcctattgctatttctaatctcatggaattgcctccccacgagagacattctttaatgttgactgatactctaaattaaggatcacttcgctccacccctagagatgaagatccttcctgaagcagggtattttgtctgtctgggcaggaagtctgcagcagctctccacagccaaggtacccgattactgtttaaaagtcccttccattctagctaaggcaaaacttgttctaaagcgcttgcttgaaagatacatgtattggcaacatctgcctggtttcttttttagttataaaacatattcaaatatgttctggaagcttgaagagaattattcttgagatgttcaaaaccacagtgattatcccactggacaatgctttgtacaacaaggacctatttattgtgtgccttctccttgcctagtgctaggctctatagcctcagactgcaacagtacctagtcctagctggcctctaatacatggcaggcaggcagagaagagtgcctttggacctatgagctttgggtaatcatcccatgaggctatgtgtcatgtttccctgagaatatagaaatatctaaggaaccctttcttttcatctttgcctcctctggctttataacatacatccaagatatgctggaccaaactgaacagggcagagttaaatttctcagcaacaaagagttctttacaatgttttcctttgtaagagttgctgtggtcatcctgtctttacatagcaataaaactccaactaagacaaaagttagtacccgggacctagggtattgctctgatagtcctacccatggttttgtttagtataatttgcactttgggcctctgtgttaggaaagcaatggaatgctttagggatgcttagtgggccatactagtaagagcatgaaaggcagtgttgttgagggtgaatgaactgttggggcctggctcaagaagctccagtggagaagagggttagtttgttacctatagattattcagtggagaagagggttagtttgttacctatagattattcagtggagaagagggttagcatgttacctatagattattcagtggagaagagggttagtttgttacctatagattattcagtggagaagagggttagcatgttacctatagattatttagtggagaagagggttagtttgttacctatagattattcagtggagaagagggttagcatgttacctatagattattcttgggatattttggtgaagaatgtctccttcttacctatgttcaaaaaatctacctgaggcaaaattgaagagttttttaattaattgcattttcagacaagattccaaaagagcctagtttggactgtgttctgtggttattaatgccatgcttacaaaggtctataatgaaaaaggacccgagggtgggggctggagagatggctcagaggactgactgactgcttttctggaggtcctgagttcaaatcccagcaaccacgtggtggctgacaaccatctgtaatgacatctgatgccctcttctgttgtgtctgaagagagcaagaacaagaaggaaaaagaaaaaagaaaaggtgcactaggaaggaaggaggtaaagccagtgttcaaggatataaacaaattaaagaaaagccagggggctggtgagatggctcagtgggtaagagcacccgactgttcttccgaaggtccagagttcaaatcccagcaaccacatggtggctcacagccatctgtaacaagatctgactccctcttctggagtgtctgaagacagctacagtgtacttacatataataaataaataaatctttaaaaaaaaaaagaaaaaaaaaaagaaaagccagatgacaaatggaataaaggagtagtgccctcagggcaggacccacccagctaagcgtccatacagtgaaaagaaattaaagaacactttgggtccaggtatggtaaccccagcactctggaggcctacagctctctgagttccaggacagccaagctcaggcagtgaaggaaaccatagaaaacagaaagctagtcaagttgtaattgaatgagggagccaggttccagcccaagcaaggggcagaacttgacagccacatggttctggctttagaatcaaggatggatttccccttcatgtccaaggaaagccgctgaggccaggaatgtgtcaggggtgtccctgaatagagtaccagagaggccactgcatgaaaggggttgtgagatttccagccatgactaaggaaaacaggtgaggctaggcatgtggcaggaagattttgcaaggccactgtgtgaagctgtgaggataaagcctggatacccaagatgttagggatgccagagcccaaggatacctaatggaaccagcccaagaaaaagaactgtgtttggaaaaggatttgacatcagacatggaaatgcagggtttagagtctggctagcggtcttgctttgatccagtatttccttacaggcttcattcttccatttggaatatgtataacctat

SEQ ID NO: 408 - DNA, 4071 bp, Mus musculus
tcccccgggccgggcgtcctggggcactggtacccagctgcccggctgcaggcgaatctggttttgggggaagaggaagaaaagtcggattacaagatcaaccaccaccaacaacaataaaaaccaccaggatatttttttgcaaatttctgacggctttaaattcatgaagcaattgtccccttttgcaatcagcatttggatctcagaatgagcaaggaaagacccaagaggaatatcattcagaagaaatacgatgacagcgatgggatcccgtggtcagaagagagagttgtacgaaaagtcctgtatttgtccctaaaggaattcaagaatgcacagaaaaggcagcatggggaaggccttgccgggagcctgaaggcggtaaatgggcttcttggtaatgcccaggctaaggcactaggaccagcctcagagcagtcagagaacgagaaggatgatgcctcccaagtgtcctctactagcaacgatgttagttcttcagattttgaagaagggccgtcgaggaaaaggcccaggctgcaagcacaaaggaagtttgctcaatctcagccgaatagtcccagcacaactccagtgaagatagtggagcctttgctacccccgccagctactcaaatttctgacctctctaaaaggaagcctaagacagaagactttcttacctttctctgccttcgaggttctcctgcgctgcccaacagtatggtatattttggaagctctcaggatgaggaggatgtcgaagaggaagatgatgagacggaagatgtcaaagcaaccaccaacaatgcttcatcttcgtgccagtcaacccccaggaaaggaaaaacccataagcatgtacacaacgggcacgttttcaatggctccagtaggtcagcacgggagaaagagcctgctcacaaacacagaagcaaagaggccactccggggaaggagaagcacagcgagcccagggcagacagccggagagaacaggcttcaggggctcagcccacggccgcctcggctgcggcttcctctgccaagggacttgctgccaaccaccaacctcccccttcgcatcggtctgctcaggacttacggaaacaggtgtctaaggtaaatggagtcactcgaatgtcatctctgggtgcaggtacaaacagtgccaaaaagatccgagaagtcagaccttcaccatccaaaactgtgaagtacactgccacagtgaccaaggggactgtcacatacaccaaagccaagagagaactggtcaaggaaaccaaacccaaccaccacaaacccagttcagctgtcaaccacacaatctcagggaaaactgaaagtagcaatgcaaaaacccgcaaacaggtgctatcccttgggggggcgtccaagtccaccgggcctgctgccagtggcctcaaggccagcagcaggttgaacccaaagtcatgcactaaggaggtgggggggcggcagctgagggaggggctgcggaattccaaaaggagactggaagaggcacagcaagtggacaagccgcagtcaccccccaagaagatgaagggggtggcaggcaatgctgaagcccctggcaaaaaggcctcagcggcttcaggagaaaagtctctgctgaatggacacgtgaagaaggaagtgcccgagcgaagtttggaaaggaatcggccaaagcgggccgcggctggcaagaatatgctgggcaaacaagcacatggcaagacagagggcaccccctgtgaaaatcgttctacctcgcaacccgagtcctcgcacaagccgcatgacccacagggcaagccagagaaggggagcggcaagtctgggtgggcagcgatggacgagatccctgtcctcaggccctccgccaaggagttccacgacccgctcatctacatcgagtcagtacgtgctcaggtggagaagtacgggatgtgtcgcgtgattccccctccagactggcggccagagtgcaagctcaacgatgagatgcgctttgtcacgcagatccagcacatccataagctgggccggcgctggggccccaacgtgcagcggctagcctgcataaagaagcacctcagatctcagggcatcaccatggatgagctccccctcataggaggctgtgagctcgacctggcctgctttttccggctgattaatgagatgggcggcatgcagcaagtgactgacctcaaaaaatggaacaaactagcagacatgctgcgcattcccaaaactgcccaggaccggctggccaagctgcaggaggcctactgccagtacctgctttcctatgactccctgtcccccgaggagcaccgacggctggagaaggaggtgctgatggagaaggagatcctggaaaagcgcaaagggccattagaggggcacacggagagcgaccaccacaagttccactccctgccccgctttgagcccaagaatgggctcgtccacggtgtcacacctaggaatggattccgtagcaagctcaaggaggtgggccgggccccactgaagacgggccggcggcggctgttcgctcaggaaaaagaagtggtcaaagaggaggaagaagacaaaggtgtcctcaatgacttccacaagtgcatctataagggaagatctgtttctctaacaactttttatcgaacagcaagaaacatcatgaacatgtgtttcagcaaggagcccgcaccagcagagattgagcaagagtactggaggttagtggaagagaaggactgtcatgtggcagttcactgcggaaaggtggacactaatacccatggcagcgggttcccggtgggaaaatcagaacccttttcaaggcatggatggaacctcactgtcctcccaaataacacagggtccatcctgcgtcaccttggtgctgtgcctggagtgactattccctggctaaatattggcatggtcttttctacctcatgctggtctcgagaccaaaatcaccttccatatattgactacttacacactggtgctgactgcatttggtattgcattcctgctgaggaggagaacaagctggaggacgtagtccacactctgctgcagggcaatggtaccccagggctgcagatgctggagagcaatgtaatgatctccccagaggtgctgtgcaagaaggggatcaaggtccacaggactgtacagcagagtgggcagtttgtcgtctgcttcccgggatcctttgtgtccaaagtatgttgtggctacaacgtctcagagacagtgcactttgctaccacccagtggacaagcatgggcttcgagactgccaaggagatgaagcgccgccatatagctaagccattctccatggagaagttgctctaccagattgcacaagcagaagcaaaaaaggaaaatggtcccaccctcagtaccatctcagcccttctggatgagctcagggatacagagctgcggcagcgcaggctgttgttcgaggctggccttcactcttctgcacgctatggcagccacgacggcaacagcacagtggcggatgggaagaaaaagcctcgaaagtggctacagctggaaacttcagaaaggaggtgccagatctgccagcacttgtgctacctgtccatggtggtacaggagaatgagaatgtcgtgttctgcctggagtgtgcactgcgccatgtggagaagcagaagtcttgccgtgggctgaagctgatgtaccgctacgatgaggagcagatcatcagtttggtcaaccagatatgtggcaaagtgtctggcaaacacggtggcatcgagaactgtctcaacaaacccacaccaaaaagaggtccccgcaagagagcgaccgtggatgtgccgccatctcggctcccatcctcatgaagatgccgaacccatggtcacttatatattttttgtaattactatattctagtttggagtacttgctgtaggatacaagctgtctttgcactagctctaaagaagaatttcttctggttttagagaactgattttgttttagcattaaactgttca

SEQ ID NO: 409 - protein, 1246 aa, Mus musculus
IHEAIVPFCNQHLDLRMSKERPKRNIIQKKYDDSDGIPWSEERVVRKVLYLSLKEFKNAQKRQHGEGLAGSLKAVNGLLGNAQAKALGPASEQSENEKDDASQVSSTSNDVSSSDFEEGPSRKRPRLQAQRKFAQSQPNSPSTTPVKIVEPLLPPPATQISDLSKRKPKTEDFLTFLCLRGSPALPNSMVYFGSSQDEEDVEEEDDETEDVKATTNNASSSCQSTPRKGKTHKHVHNGHVFNGSSRSAREKEPAHKHRSKEATPGKEKHSEPRADSRREQASGAQPTAASAAASSAKGLAANHQPPPSHRSAQDLRKQVSKVNGVTRMSSLGAGTNSAKKIREVRPSPSKTVKYTATVTKGTVTYTKAKRELVKETKPNHHKPSSAVNHTISGKTESSNAKTRKQVLSLGGASKSTGPAASGLKASSRLNPKSCTKEVGGRQLREGLRNSKRRLEEAQQVDKPQSPPKKMKGVAGNAEAPGKKASAASGEKSLLNGHVKKEVPERSLERNRPKRAAAGKNMLGKQAHGKTEGTPCENRSTSQPESSHKPHDPQGKPEKGSGKSGWAAMDEIPVLRPSAKEFHDPLIYIESVRAQVEKYGMCRVIPPPDWRPECKLNDEMRFVTQIQHIHKLGRRWGPNVQRLACIKKHLRSQGITMDELPLIGGCELDLACFFRLINEMGGMQQVTDLKKWNKLADMLRIPKTAQDRLAKLQEAYCQYLLSYDSLSPEEHRRLEKEVLMEKEIKRKGPLEGHTESDHHKFHSLPRFEPKNGLVHGVTPRNGFRSKLKEVGRAPLKTGRRRLFAQEKEVVKEEEEDKGVLNDFHKCIYKGRSVSLTTFYRTARNIMNMCFSKEPAPAEIEQEYWRLVEEKDCHVAVHCGKVDTNTHGSGFPVGKSEPFSRHGWNLTVLPNNTGSILRHLGAVPGVTIPWLNIGMVFSTSCWSRDQNHLPYIDYLHTGADCIWYCIPAEEENKLEDVVHTLLQGNGTPGLQMLESNVMISPEVLCKKGIKVHRTVQQSGQFVVCFPGSFVSKVCCGYNVSETVHFATTQWTSMGFETAKEMKRRHIAKPFSMEKLLYQIAQAEAKKENGPTLSTISALLDELRDTELRQRRLLFEAGLHSSARYGSHDGNSTVADGKKKPRKWLQLETSRCQICQHLCYLSMVVQENENVVFCLECALRHVEKQKSCRGLKLMYRYDEEQIISLVNQICGKVSGKHGGIENCLNKPTPKRGPRKRATVDVPPSRLPSS

SEQ ID NO: 410 - DNA, 295772 bp, Homo sapiens
ggctggtcttgaactcctgacctcaggtgatctaccttcctcggcttcccaaagtgttatgattacaggcataagccactgctcccggactaattttttttttttttttttgagagactgggtcttgctctgttgcccgggctagtttcaaactcctggcctcaagcgatcctcccgcctaggtctaccggagtgttgagattataggtgtaagccactttgccaggaccctcttggatttttatggaagcttcatgaatccagcattccttcccctagggtatatatggtggaccctttaagacccagaatccgaaagatgaggggtgggggaagccctggcgaggtggctcatgccagtaatcctagcatttcgggaggccaaggccggaggattgcttgaactcaggagtttcaggccacagggagctatgattacacaactacactccagcctgggcaactgagtgagaccttgtctcaaaaaagtaaaaagaaaaaagaaaagcagattagtgtcttgcactggggcaggtgaaagaagggcaggagaagccgggcacggtggttcacacctgtaatcccagcacttcgggaggctgaggcgggcggatcacctgaggtcgagagttcgagagttcgagaccaggctgaccaaaatggagaaaccccgtctctactaaaaatacaaaattagccgggcatggtagcacatggctgtaatccagctacttgggaagctgaggcaggagaatcggttgaacccaggaggcggaggttgtggtgagccaagatttggagccattgcgctctagcctgggcaacaagagtgaaactccatctcaaaaaaaaaaaaaaaaaataggcaggagaaagtcagagagcaactgtttcctgaggcctgtccctgagacctagcaagcccaacattataacaagagattataacaaaggctatgggaataggcctggcgaggtggctgagacctgtaatcctagcactttgggaggccaaggccagtgaatcccttgagctcgagctcaggagttcaagaccaggctggccaacatgtagaaaccttatctctacaaaaaatacaaaaagtagctgggtgtgatggcgcacacctctagtcccagctacttgggaggctgaggtaggaggatcacttgagccttggggggtggagactaatacacacataaaataatatcacacacataaaataatatcacagtcataatctattagatttggaagagtgttagagtccatctaggtcaatccccttttttcacaaatgaagaaaatgaggcatagtgacatcacaaaaagctgagatgaaacctcaagtgtctagatttccagtataatcttcccagtagccatattgtattaaataaccacattgattttatagttttcctctttgtatttgtttagaatcataaatgcctaaagttttctaggtaacatacactgtttgagaaccctcaatttcgtaatcgtgtacacatggacacataaaaacactgtctttttttttttttttctttttttgagacggagtttcgctcttgttgcccaggctggagcgcaacggcacgatctcggctcaccaaaacctctgcctcccgggttcaagctgtcctcctgcctcagcttcccaagtagctgggattacaggcatgcgccaacacgtccggctaattttgtatttttaagtagagacggggtttctccatgttggtcaggttggtctcgaactcctgacctcagatgatctgcctgcttcggcctcccaaagtgctaggattataagcataagccaccgaggctggccaaaacactttttttttttgagacggagtctcactctgttgcccaggctggagtgcagtggtgtgatctcagctcactgcaacctcagtctcctgggttcaagagattctcctgcctcagcctcctgagtagctgggattacaggcacatgccgccacatccagctactttttgtatttttagtagagacggggtttcaccacgttggccaggatggtctcaatctcctaacctcgtgatccacccgcctcggcctcccaaagtattgggattacaggcatgagccatcgtgcctggccaaaatattttttttttaaaatgaatgtttgacaattgagagaaagaccaaaagcaggaaattaataatccactaagtttcagtcacaatgtaactgccaatgtttgaatcttttctgtttcactctatgtgtctgtgtgtaggatcggaaagggagatggcactgggtttctgtaaggtgtgagtgaatcttgggttttggaaacactgagatttcagaaaacagaatataaattgtagatgtcccaatttggcaagagataagctctgtttttgtttagaaaattctatagattcatagataagaaactatgggcaaaagtgtttgatacgtagatcaaccagtatttaggcagggatcatgtctgtgaaaaccttgaagtgtgcaaggtggggtaaatgagagagtagctctagactgagctggactggtctatcatccaatgaatctctaggattctgatggtgaaaaggttattttctcctttcctgctcacttctgtggccctgacagagggaagaactagtagcttctgtggtagactatatatatatatatatatatattttttttttttttttttcttttttgctccctggagtgtttgtctccctcccctttggataacaaaatctgctctacccgccatgtccatggtgggaaaggagttttcttttttgttttttgaaacagtctcgttctgttgcccaggctggagtgcagtggcgggatctcggctccatgcaacctctgtctcctgggctaagcgatcctcccacctcagcctcctcagtaactgggattacaggcacgtgccaccatgccaggctaatttttgtatttttagtagagaggggttttgccctgttgaccaggctggtgtcgaactcctgggctcaagtgatccgcccgcctcggcctcccaaagtgttgggattacaggcatgagccactgtgcctggccgcaaaggagttttctttggcgctatcatctctgctggttggagaggatgacagaagaaggaaatgctgagatgaatggagagaaaaagagaatgaaggaatgaaggaaggacgatgacatcctttgtagccctgaaactcggactctgggtttccagataggtgagccaagcccctcttcctttttttccataagccattttcatctgggctccattcacctgcaactgaaggcatcctgattcatacagctcctccccctttccctgcctactcacaggatccctgtaatccctatacctcagtttcctcatactgatcccctgtggattagttgatcactgataaagttgatttttcccaccaaacacagagtgcagtattattataaacagtaacgtctattcttaggaactgcaggtttcccgtcttggctgctttaccagagtttctgaatcagggccagctctctttcaataacacaagacaatctaagcagaatagtaatgatagtccaaaatttttacacaatccaaagtaccagcgactttcagtgacttgtataaacaaggtccacagacgaccagtagggttgaaagcatcattttattgtatttggtttgtgctgtggcattttattgaggcttgacaaataagactgtaatttggggacaggaagcactgaataacaaaaagaactaatgtctccttgacatcactcactcttaagagggctgtttacatctgagtttacctcctagtgtgttttaaaatactcttgcaaatctcagttggctcgaaatagctgttctatgttctttcaatggaagcccccaccttctgagtacactggttcatagttatttataaacctgatgtcactcaaatattatttttacatccctctccttactccctcacatatgaagatagacctatataaaattagaaacttcacataaggtattcagtcacttaggtaggaattattgtcagtcagcaatcatttatgaagcataaattcatcatattgggtgaagcatgtctgtaaaactgttccgtggtaaccagctctttcttcttctttttttttccttggtgttctgaggcaatttaggaaaagcaatgagggctgggggctggacttaaaaggtctgtttttttaaatttttttatttttcgagacagagtctcgctctgttgcccaggttggatggagtgcatgatctcggctcactgcaacctccacctcccaggttcaagcgattctcctgcctgagcctcctgagtagctgggattacaggcgtgcaccactatacccagctaattttttgtatttttagtagagacggggtctcaccgtcttggccaggctggtctcgaactcctgactgcatgatctgcccgcctctgcctcccaaagtgctgggattacaggtgtgagccaccacacccggcccagctctttctttctttcttttttgagacagagttttgctcttgttgcccaggctggagtgcaatggcaggatctcggctcaccgcaacctccacctcccggattcaagcgattctcgtgcctcagcctccagagtagctgggattacaggcatgtgccaccacgcccagctaattttgtatttttagtagagacagggtttctccatgttggtcaagctggtctggaactcccaaccttaggtgatccacccacctcggcctcccaaattgctgggattacaggcgtgaaccaccgtgcctggccaggtccagctctttcttaaaaaaagatttctgtgatcaaattagtttgtaaaactacatgcccctttggggatttctaaaaaccctacagtaaagtaatcgagttatctttattataaggtagcagtctgcaaatttatttcatcgaagaattattttcttttcagtcccacctagtaacatttcatggaatcatatgtcttgaatcccattttggaaaaccagggaggtggcctgcactgggtatgtggagccgagagtcctgagtttgacccttggctcatccactcaactggttgtatgactttgagcaaatcacaacctcttaatatttcattttcacatttgaagagtgaggacagtaatacctgtcttgatctaagttgttttatggtttaaatgaaattattatgacagtgtgctttaaacactattaaagttatacaaatgaaagctatcattagatagctcggataaatatgaggtctttttggaaattaataacatacaagtgtaaagaaacttaacctagcaacttttactgaatgattgtggatttgagtttacttaggggccagcactgagggggaaaagcagcataatacaaaggtaaaggtaggactagagaatgttgggtgtagaaatgtctttgggaaataactgaatttaaccctctaatttttaattttatgtttgtagagatggtgtctggctatgttacccaggctggtcttgagctcttgggctcaagcaatccttccgctttggctttccaaagtgctaggattagaggtgtgaaccaccacacccagcctaacctgctcattttataaatgacagacccaaggcctatatgaggcaggtgaatggcatatggtcactcagagacttaatattagaaacatctgattccctcattgccaatggctgcctcaatatgagacaaatcatggccccatccaattttcaattaagagatacaagatacttacatgacataatcagaaaaaaatacaacagagaacaatttttttttgtttgtttttgacagggtctttctctgtcacccaggttggagtgtaatggtgcaatgtcagctcactgcaacctcagcctcccgctcaagccatcctcccacctaagcctcccaagtaactgggactacaggtgcacactaccatgcctgggccaccacgtccagctaattttttttttttttttggtagagatagggtttcaccatgttacccaggctggtctcaaactccagagctcaagtgatccttttgcctcggccttccaaagtgctgggattacagatgtgagtcaccacattcggcctcagaataaaattttaaagctcaaaaattattgccaaaataggaagggcaatgagaatccaggaatgagtaggccaagcagcgaggctggattggaaatgggcctgaatttggggccttgaagaacgtataacactacattggatttagataatgcaagaggaaaactagcagagttccagaatggaatggaagatgatggtaggagactaaatgttgggcaatagtctaaatagttgggcattatagttttggtgaaatattcaacagtaagcatttactggacatctttcaaatttgatgaagtttttggagctttggagggtatgagaagtagacaacatcatctctttagggaatttcctttttacttggagagaagaactagaaacattaaaagtggagaatgtaaacaaataggatgcaatgcaaaggggtgaaatatgcacttctttaagtatgtatgtgaacccctacacctacttcaaaactccttaacacctagtcatctcagcaatgtgttctttttagcttcttttctacattgctgatatagtactttttggaggtatcacaatccattgtaaactctgccttttttttttttttttttttactgagctgtgagcttcctgtgtcctcagggatgaggacagtgctggcatagagtctaatacaatcaatgtacctagacatgttctcatccctgcccctccaattgaagaggtcaaggctttgagatgtgaaaatcatcataagaaaagctgcatttgacttacagaaaatgaaaaagaggaggaaggagcaagaaaagccttggatggtcttgccaagatggtaggggaaggaagttcattaggagtaggttactttcacaacaggaaaatctttcaaccactaagaaggccaaccttttttctctttcagggaaaacaacactaatattattcaaatcttttggaaatgagcaaattccttcctttcccctctgccctgaggcctcaactttacacaatagtttttcacaccaggtgacctggagctggtagcctggcaggggagttcgcaagcccaggactgagaagtccaggccccagggctagttaggggaacagaaaagaaactcacctttgttcattaatatttgcctagggaatgaggtatctgcgttaaacttacagaaagctggttaaaatcttaacaacgtggagacgtggagattcccagtatgccagtcctaatgatcagaaagtttttagaaaacaccttgggtggccctactgtagtctgccccattggatccttcccaggaaatggcaccagcgtacaagttttgcagtattcagggcacaaaagatcatttatttttccaattgtgaagtgaacattagataaaattatttcatttcagattttttgaaaaggtaaaaataataaggaaaataccctctcgaaaaggctttttatttcgtttactgaaagcttccaataacgtgcctagttttaaactaggttactgttatttatcacataatcatccccacaggtttgatcaccactaatttgcagatgcggaaactgacaagctcagagaggctctcggttgccttttgggaagtggccaaggcgcgatttgaatccaggtctcttacctccagtttctgagacctttctagacaccaaggttatctcttcaaatactgctgcaagtaaacagctgtgtgagtatctagacttttgaagttagcagactctagggaataggtagaataaaatatatgggtatgtgttcgcgggagcgcttctgccacgttttattccgaggctagcctgagagatcatggaaaacattgcttctccaaaaccacagcgaaaaacaaggaaattaacaaggcagaatcgcgatgcgagacttgacaaagttgttaataaggcgaaggcccaaagcgctatgccagggcctgctacttcatttgtttcagcgattaaaccagcacgacagggggctggaggcaggtaaaaagcaggctcttgcgtggcccggacagttgatattcctggcactcggtgttcgagatgtttccttacaattgcgtgtctgtgcggctcggtctccatattccactcatttttgtctcaacattttgtggtattttatcacaaaatacgcccggcaaagcaaagatcccgttcagtctctttaaacacggctatcttttctcaggaggcagccgccggggcttcactcctgggccaccagcgacgtcctccaagcgggtcgagcggaggcgcgttcgcgacccaggggcagcgtgccgagcccgggcgtgggggggcgtggcctttccactcggcgacccccggccaccgcccaccccgcgcgtgggggcgtgcgcgactgcggggcgcggagaggggtgacctcggactaccctaggcgcccgcagcacgctctgtacacagacgcgaggcgctgtcctgaggtgacaccggctgcacggcacaagcagcaggcgccgccgatcaactagttcgcaccgaggattcctcttggtgcgtggcccagttttccttaggacgggaaccaaaccccaacctgacaccgcccccctcaccgccacgctccgaggccttccccggggaagcctcgcgtccctcccccgcggctccgggccgcacgcgcgcgattcctcgattccacaggcggttcgcgccgcgggtgggggcggggcgcgcggggagggggctggcggccgccaggggaggggggccggggcccggggggcggaggagggccggcgtggggagttcctcgctcgcggaccacacgctccgcgggccaatcccgagccagcctctagcagtgtcgcacgcgggacacgtccaagcgtttgttggcacggccagtgagggggagggggcgaggaggagggaggggagttgagtgacaggctttgcggggcaggctgggaattgtagttcccagcttccgtggccatagccattttgtagtcgggggactacaacttccagaagatcaaggggaccattctaaggtgccccgggaataggcggctctccccggggccgggcgtcctggggcactcctacccagcagcccggctgcaggtcgacgcgaaggcagtggcgggggctggcgtggggcggccgtggggtgagcggcaggcaggggaaagggggtgaggtggagcgacggagcgtgccatgcattgagctagggagcctctctcaattccacgcctgggctcggcgtgggagcgacgcccgagggcttgcctgggaggggttcgtcgaggtcgctcgggtgtctggttggccaggctgcgggggtgccctggactgggccaggggcggtcggcaccaggctaagcgggcgcctggcggctgagcggtgggagttttcggctggcgcccggcggggaattatccgaggagccctaacttgtataaaagcagagtccatttaaagttgggctggatagcctctctctcattggttagggggcttggaaaaaagagactcggcgagccctcgctgtggtgctgccgccgccgccgccgccgccgctggagttgactcttctgctcgcactgctgctgcagcacaaacgtgacttccaacattttttatttatctttcccttttcttttccaagatgtaactacggatcagacactaaggaccttcacgtttcgctgatgtagtttttggaggaaaaaggggggggagtgaagggcgtcggtttttttttgtgtgtgtgtgtatgtgtttcgggggaaattttccattatgagtgttttactaaagtgaatttttttttgtttgcttcgttcgtctttggctctttttttttccttcccaatttcggatttatttcaaggcgaatctggctttgggggaagaggaagaaaagtcggattacaagatcaaccaccaccaacaacaataaaaaccaccaggatatttttttgcaaatttctgacggctttaaattcatgaagcaattgtccccttttgcaatcagcatttggatctcagaatgagcaaggaaagacccaagaggaatatcattcagaagaaatacgtaagtgctcctaacaacacatcctttgacttgcagttttaagcaatggctgtgaatgtcaagtttatagataattctgcctctgaagggttttaaacacagcgtccgataaggctgtttcttttttttctgaaagagggcttttcaagcaaagtggtgtctgcctagtttggttgaaaaaacagactggtgtagagatacctcaagtgaataaattgacctcgaatgacacaaccataatctacttttagatgaaaggcaagggattttggtggagcttgaggtggggggtggctgcggtaatgtaactaaactgcattctcaagcggatttggccccgtattgcactttgcatgcaaatgagcctgtgttattattattaatgttatttggaaaaatcgtgtaacgcatgtgtgttggaagccctttaagttgcgatcgagggtccgattatggcgatcttctctttgcactggcacatcaaatttaatgtctgtggtcgttttggcttatctggtttgcaacataaaccagttgggaatcatgttacagcgaatgcatttgttgggattgactttaataatgaggctggttttgtttaaaaaattcatggtttccagttgtaggggaaaaggacacacactatggctaatgtttttaagtgtgtacgtgaatgcatatgtaagtaactacaaataatttctccctgttaactgggcttctgaaattgggtgattattcctagatttaaatggcttggaatagttaaatttgttttgtgcatagtacagctacgttttgattggcatggggagtgtttttgttttgtgtgtggtggcttttttttttttttaagtttgaggggagggaggaaagggggaccgagggattaaccaaatatgcactcgagtgatctgtgattagctgcatgctttaaattaaataactcttttttttttttcaaaaaaggccaaatgaacataccttaggaataatgcaacgtaagaggaaagtttatttaagttgggtagacaaattggtgttaatattttccctttttgatcattgtggtgtgtgtaatgagagatgaccttcggggcactggttttgtaaaaaaatatatttaatggaaaagctgaatgcctcttcaagagagctgatccttatctagacacgtcaacttcaactatgaaagaaatgcaaggttaaataatcaagcccaacttagaaagctgttccataaagaatttaagaattaaaatacatccgcattgcagagggctgggtagaatgcaaaggactagtttaaactcgggctgtagaaactgcactgaggcaaccttgtcttggagcgtggacgccttcccggggcacgtccgtttcggatgcagccacaaagcaaatggggtagaacttggacgagaaccgcaccccgcctcccattccggacctcgttgaggtggagagcagcgtggggtgggttttctttcttattgcgggcgttcagcggatcgtgtctccgagtccgggcgtccggctgcaagcccgtggctggcggcggctgcgggaggcacggcacgagttaatgcaccgggagcagagccggtgttcccgacgtcctcgagccggctgcgaaagggacggcccgcgggggtcgcggcaggctgggccggggctgggcgggcgggcgcgcgcgcgcggcctatagggggcatactccgggctctaggcgggcgcgcgaggcgggcaccggtctacccgggccggcttgcaggcgggcaggagggcgggtggggcgcgggggtggcgcggcctgcggggcgcggggaggggagagcgcgcggggagggggtgggagcgggggcgggggcgtgggcgtgccggggagggggcgcgcggcgcacagctgcagcgggcgccccccaccgcgcacacggccgagcatggcggcggcggcccggccggcttcccgcggccctgcctgcgggctccgacgcagtctcgagagcaacaggttaagccggcgagacgtcagcgcgccccctctccgccccccggttcttcccccgccgcgcgccggcgccccagtcccttcttccctccctccgccccccgcggcgctcggttccccgacgctcccggccgcactctgttgtcattgtgacgtcacaaagggacgggctcgggtggaaccttcccctcctcctccgtgacgtcaaaagtcgggcgggaggctccaggcgcggcggggcggcggggggaggagggagctgggcgggggcgggggctgccgcagagccgggctgcggcgtgggaggaggaagaggaggaagatgcgctcggcctctgccttccgctccggagcgtcgcgcttcccaccaggtgagggccggggagccgtaggtccccaaaggagtgccactggaccctgttctgatgccacttgggaagcggggagcggggaggaggcgcctcctttctgcaggaatgttttcacttcctctgttccaggtctcctgatggtgttgcattactagcgtggtgcatgtgtcccctctccagtgcttatgtaaagaaatgaaagtattcagggaaagctgtgctttgttggaggaccgcgttgtggatttggccaccttgtcacttgaagtcgtgttaggggtgcttcagcaggatgtggccggatgcctttcatgatgatgctgcacagcagcaactgttgctctttctggaagctttgtggtactacggtgggggggctttcctttgctgtgccggctctgtacctactgactgttattttggggggctggaccaaaggaagacttgtcattgataaatgtactgagaagagcacaggactcctttaagtctcaaggtgctctgggcttagttcttctgagcagggaaaccagaggctggcgttctgttttctcttttgtaaaatggaaaaatacctgccattgccacttaactaagtcactgaaaagatcatgtgcatggaagatgtaaaacagtatgcctctttataagtaaggtggcattattacttgagctggtggaaggcagcacgtttcccacaattggtctcaaaagcccgggatgcctgctgagttgccatttagtttattaccttagcaaagcagagttgggggtgcgattgtcgatagtaggctttgggagaaatgattgttatatttcgtaataaatgatgtccttgagaaactcataagttgcagtgtaatcctgtcttaattgtgttgagcacgactcccactgcaataccttaaataactgaaaacatttgcctttgaaagccccaatcgacttggacaataaaaacagttgcatgttttgctctagagatattttctgccgtttccatcattccactgcctggttattcctagggagaataacagataggatactggggcttcaccactatttgatcaggtatcagtttgaaatagagaatctctgccttatgaagatagtaattcctgtagttagcatgaaaacaaattgccagtttgattttctaggacagctcaagcagaatttgtaccactaggctgtaagttttaagtatctaattttctgatttgaaagtgtatgatttaaaaattggaaaaagtttttgttataagcttcaaaaggatttactataattacaactacgtaaaattacaaagaaaaaagtaggaagaacacaaaatatacagtggttggatttatgaggttttttgttttaaaacttattcatcacaaattgttcagtcacgttattttacagttggtggggtggtggggaaatttgcacgttattttattgctgtattttttctttcctgggatgtttacgtggcttttcagttacttgtttctagtagtggaaaatcttgctctgtgttacttaggtgcagggcagtggcagtttagctcctatcactgtacagggacagtatggaaggaagacacaatgaagtccaaagtgtcactaaaatttgaaagaaaaattatgtcgacaagtaatccaacttggtttattatccaggttatattattttacagtaggctaatacctaacttgtgtgtccctgtagccactggcccaaatagacaactagaattatttggtactcggtaatgcctgtttcctcatagtgggttaaaccagtccctgttgctgggctgaaggctattgacgcacttccaagtgccttggaaataactccagtgttaatatataccgtactccaaatgttaaactttcctccttcagaacaagacaatcttttggagtatataattggtgtctgttaccttcaaaatggaacttttttttttttttcagagaagacacgagaatgtcatattaaaagcgtagttcgttaaaacacttggtgaaggctaacctagagagcatttgtttttttgtttccttttttttttgagacagggtcttgctcagccacccaggctggaacgcagtggttcctcactgcaaccactgtcttccgggttcaatcgattctcctgtctcagcctcccgagtaggtgggattacaggcaccccctatcatgtccggctaatttttgtattttagtagagatggagtttcatttcaccatattggcctagctggtcttgaactcctgacctcaggtgatctgcccgccttggcctcccaaagtgctgggattacaggcgtgagccactgcacccagccagctgaacatttttaagctagtggtttgcccttgctcatgatggtgtgaggactcacactcctgacattgtctgaattctggctgcattgctctgatcatcctgatgttactggtccacgtctcccccaggattacagtagtagcagctctactaaccaccttttgtctacccatcctgcttgccctgttggctgcagtatgtcctgactgatatcccaggatacaggtcctggccacctctgggatgtacctctgtcccctttggctttcacccagaagtcttgccaagtgtcagttgtttgttcccaaatctggttattccagttgggcttattattgtaattacagttaagtattatgtcaaccttgaaacagtgtgaaaaagagcgtggtggctcatgcctgtaatcccagcactttgggaggctgaggtgggcggatcatgaggtcaggagttcaagcccagcctgaccaacatggtgaaaccccgtctctactaaaaatacaaaaattacccgggcatggtggcgcatgcctgtaatcccagctactcgggaggctgaggcagcagaattacttgaacccaggaggcggaggttgcggtgagccgcttgaacctgggaggcggaggttgcagtgagccgcttgaacctgggaggcggaggttgcagtgagctgagatcctgccactgcgttccagcctgggcaaaagagtgagactccattcaaaaaaaaatgtgggccagacatttttaagatgtttgggaaaatctgaaaggactgtccacacacattgctttgcaagtgattcccttttaagaaccaaacttcagttatgcccagacttccccaacaatcaaaacagcataatgtagaacaacagaacgttcagagacttaagctcagaaagaagacccatggcctcatatcaaaaaaaccgtaattaaaagtagatttgtctgtcagttaatacaaaatgttagggaataccttttttttttaaaaattgtttgttatctaacaaacttgttcccattaactaaccaacttctggttcttgtcatctctgataagagtgcttccaactgtgtttagccttaatccccgcatgctaaactggactccctgtctgcttcatgccatgtaacatgtaaagtgtggatcagtttaaagtagtcctactgaggtgattgtattacttttggagttaaaataattgtgccatttactgagtggcagggagcagaaagattagtaattttgcacctaattcatggagttcagaagcttctatcttgtaatctggcaactttaattatatattgttttacttatgagatattgtggaaggtctgttccattttaaatccttaagccttacctgttaataaaaatgaaaccaaatgaatctgttttttcatgtgctcaattatctttcgttttttttccgtcctccagataactgtactctttatatcctgtgactccctaagacaagcctcaattgcttttccaggcccccagtctttgtttttctgattccttttgtccataaaccttttccatacttgcctcacccttgcaggcatcttttattctaggaggtgagaactccgtggtatctgtctacatttttgtagaagaagagtgagcgagattttattctcattatccttctaggttttaatctttcttgggacttcagacaatcctataaccttctgccagcttcaggtttttttaataaggatttttttttttgagacagaggagtctctctctctcacccaggctggagtgcagtggcgtggtctctgttcactgcagcctccagctcctgggttcaagctattctcccgcctcagcctcccgagtagctgggactaaccagcgtgtgccaccacacccggctcatttttgtatttttagtaaagacggggtttcactatgttggccaggctggtattgaactcctgacctcatgatctgcccacctcagcctcccaaagtgttggaattacaggcgtgagccaccgtgcctggccaaataaggatttttaaaatgcagttctgattcagaataaaattatcgaaagtggagctgacctgtcattttgctcttggtggaagactcatgtttccaggacttcctgttcctgtcacttcttgcaggtggcttttgtctttcttgctctcttaggctgtaggaaagagcccacgcagattgttccagagggcaaagtatagatcattcctgcgtgagcagcgactggcagctcgactaccactctgggtttctggttttttttttacacttgtaccacagtttgtcttgccacagattttactattttaagggtgctgcccacctctactggggttcttttttccatttgaagaaatgtcccagaaaagcatggattatagaaaacacctccagatgacgacacaacacccacttctcttaacgggattgtgaagagaggactcagtcaattctgaaataaccgcctacattgtgagtttgtctgagaaaaggggtttttgagtccattttatagatgagacaagtaaggtgaaaaaccagtcagatggttagttttctgaatttgctccccccttttgagttcagaggacatagaagtaacatgaacgatcagtggagccccaaaaaggggagaagaaaaggttgtaaaagggactgttggcagcctttggagaggctttttgcttgggaaagttggaagggagggcagttttgtcagaagtgtccgtcttccctgcatgtttgtatttgttgttttttgaagaaccagttggtggagctacccccttatacccagctggctgtctctttgagtcatcattggaagactgacatcccgtgtcccttgggactggatggtttgtgctcttctagttttacaaatgcccccaccacattcttgggtgtatctgaggcccagtgtgggctgcagttctccagacttgcaggaaccagtttgatttcccagggctgttgactttttcttgtacttgtatcattgcccctgactttgaggcttaggggaccatggagcactggggaaatcatatgccctcagtcctcactaggggctgggccatccattaaacaaaggctgtccagatgtgttaatgaggcggtgtgagtaatgggaacattatacatgattacttacataatcatgggacagatgcgggtgttagagaaagaggaaccctactggtagaagtttttgagagctattcttgagagctggtgctgcctaaaaggtctcaattggattttaagttctaattttgtaagtctgtcaagctccaccacccatgaagaggaaggccagtgaacactgaaatattatcaacagcagtgtttatttaccatgctcctagaaggttaacaaaatacatagccacagggccgggcgcggtggctcatgcccgtaatcccagcactttcgaaggccgaggtgagcggatcacttcaggtcaggagttctagactagcctggccaacatggtgaaactccgtctctactaaaaatgcaaaaaagttagccaggcgtggtggtgggcacctgtaatcccagctacttggaaggccgaggcaggagaattacttgaggaggatggaggttgcagtgaggtgagtgagactctgtctccaaaaaaaacaaaacaaaaaacaaaaaaaaaacaccacaaaaacacacaaaaacaaccactgtgtaaccacagttttgcccctccatactcccagtaagagtcttccgtcatacacattggtaaactaggaattctttttttttttttttttttttgagacgagtctcactttgttgccaggctggagtacagtggcgctatctcattttcctgcctcatcctctcgagtagctgggactacaggcacacacgaccatgcccagctaatttttgtatttttagtagagacggggtttcaccctgttggccaggatggtctctatctcttgaccttgtgatcagcccgcctcagcctcccaaagtgctgggattacaggcgtgagccactgcgcctggcccaattaggaattcttaacagtaactttttttcgggggaggtgaggaggaggagtgaaaaggataggttgtgtgactcttgtctacctggagacctggtttactgggacaggagaatgtgggagatcttctgacacccagtttattgatctcttaaaatcttggtggttctgtctccattatttcccagccaccattttggtgagagcttggtctgaagtggtagtgtattatctgttggttctctctcggtttcagccagctgttagagtgtttggtgcctgtgggggcagaaacaggtgccaggaggaaatgagaagggattagggctgagcatgtgtttcttgcatttagtccttctataggtttgcagaagggggctgagtgaatgcttattctgttaagcagcagacttttgtgctttgtgtatatgccttattactgctactaaatggacctaagtaatgaaatgcctcagatttggacaggcttgtgaatatatggggtacctctgcagtaatggacaaggttgggaatgtgagcctacttcaagtttggccttgtgttaaactggctgtgtgactccaggcaggctatacaacctcgctgagctatttcctcatctggacaacttatttcatgcacttcacaggcttgttgctgggagaggcaggggaatttttgatgtgaaagcactttgtaaactgcatactgctgcacaaatgctcaaggtattattacccagttggaaatcaccaacctggagacatcaggcctgccggcggccttcctagctgactcagatataaatgaatcaaatgaattctgcactttgattcttaataaagcaagctgatagcaagtagcagatgcacattgggaaacagaacaaggctttacggattagaaggtgatgtaatcaccttctacctctgtcctatattagccaacacttgactcctaaatacacctggatggtgaattggaaagagggatagattgagaattaagactggagtggcactgaatctgtgcacgaagatgtttaaagaagacatagtccttgaaattaaaaatctgattatgatgtgaacacaattctttagtggctctctggtcctcaggatcgaatctaaaccaactttgttcccagcccttcttgatgtactctgggcttatcctgccacccatccacttcacacatccggggcttcagctgagcccagcattttattcctctacttgcttggtgaatggattgcctgaggagcccaccgtgtttgtctgaagcctgtcaccctgttcaccccgtctggcagagccaggctctttctccctgttggctggtctcctcgcactttatttttaggtgctggagttatttgcttacatgtctctcaccctattaaccccacaagagtaggggctgaatttatgtcattgtaggtcaatgttaatgtctaatacatagtatacattctaggaatatttgagttcaagtttggtggagtatttcgagtactacttagtagtgggagggaatcggtatgaatctagtgcaaaaagatagacttaactgatcacaattttggacgctataattttatagttgagaattcctgaggtttctagtactgttgtaaagtgacctgcttgtggtcgcatattttatcagacacagctggggcatgaaatccaggtcccgatacagtagaaggccctctctgttactgcctttggaaatacttttcttttcagggggattttcagttattcatggtaactgcagtaattgattcattttcatggaaaaataaaatccacgtgtaatccccatacctaattaagccaatagcattttactgttgtgcagatggccttttttgcttaataagaagtgattcaaatcagacaagtactcaaaagatagaaatcattgaaatcacatactggacattcctctacttgcacatacagttttatatatatgggccatactctttaagtgctgtatttttgttacctcctgtttgcatttataacttgtcatggtaatcaaagacagtgatttttaatggcttcaaggccgttggttgatagttaccactattttcttgactcatctcttcgggatgggtttttcacagatttggggctgttgtacaaaatgatgcatgcagcctgctttgcacgtgtctgtttgcactcaactctaaattcttactgtgaaattactgacttagaagtgcccgtatttacgttttgatctttcctagtacattgctttcttggagagaggctatactaatttacagtcccacaggtagtacacgttaggccagcgggttggttggtttgttggcttttaaaaaacaatacaggcatttgtaacaagtagtaaagatgtcagttgagttttatttaagtttctattttcttcctgtgtcctctctcagggcatttagaactaaatgagataagatatgtgaaagcactttgtaaaacaaaattgctctaagaacacaatgtgttattagtcagaacagctccagaagggaagggaaagggagagccttgggtaattgtacaatgatgttcttattcttatatgtatgaaatgctttttgttgtgaggacatagagatacttaagtaataaagatgacccacaatcacattgttttcatatgtgatctcagccttgtttgtgaggtgggctttgtatatttacgaagatccctttgggctgtggcttggaagactgttcagttaaatacagctggcattttttggttgcttaccatgttctgacactgtgttgggagtttgaaaatacgacattgcccttgtctgaggggcatttacagtttagttggcagcagggatgtgaaacaatgggaggagagcactggctttggagtcagtctgaagttgaggatctctgctctgtcatcttgggtagatcacttcacctctccaggtctcagtttcttcatctttgaaagggggagaattgtgccttcattattggcctctcaaggtcattttgtgggaggctgaatcaaatgttaaagtgtgaagtgctttatgaactgtgactatagccggacgtggtggctcacacctgtaatcccagcactttgggaggccaaggcgggcggatcacaaggtcaggagtttgaggccagcctgactaacatggtgaaaacctgtctctactgaaaatacaaaaattagccaggtgtggtggcaagcgcctgtaatcccagctacttgggaggctgaggcaggagaattgcttgaacccaggaggcagaggttgcagtgagccgagattgcgccactgcactccagcctgggcaacagagtaagatcctgtctcaaaacaaaacaaaacagcagaacaccaactgtgactatttagaccatgttattataagtcttacagattcttgtggctgtaattctccaagtgcaagattgaagaggaaactgtttctgggtcatctgtgctgattatagtatatcccagttgttcgaggaagaggatagaaattcagataataagggtgcttagcacctttccttctcaccaaggcttggtttttcttcctaacttatggaaaaatgcagtgtgagtctctttacacccagacatatttttggatggatgggatttttatcttccctctgccttccctggtttgtgaggatgagggtagtgttcacagtgtgactaagaagcagcatgacttttttgcatacttttgaatgaactactttgcctgccttttattctccaggcaagatgtacccttagagatgaggtggaacctaacacttggttttacctaaattgcctccttttccattcttacactgcccagagcactaaagctctgtttgttctattttcagcttgtaataatgtcttgatgttggaggatgaaagagctgatgtgaatagaaggcatttaataaggagtcatggtctggagtcccagtcaaattggtagcacatggttttcatctgccttgaagggcttggttgcatggtcttgccttcccagagctgtgacagcaccaggctggaccctatacacaatgccacatctccttctcaaactgatgatttggagtggcaaatgccactggctttgagagatgccaaaagaatggtggacttggcttcttaatcttttgaagatcataaaatgtttgctagggctcgctcatctgcacttaggacaggggttagatgggtatgttggggagatgaggttattttagtggggtttggttaacgttcagttttaaccactgttcagccttctcactgggactcctagctggttacatttttttgatgggggttacttttatatatttatgtatttatgcccctcattctaaaaaaggattttaaagccacgatgagctgtcattccaggagcaaataatttttacttagatctgactcaagttcactttccaaatgcaaaaaagggacagtcagattaaactgtggacagcagagtagttgttcattcatctcaatgcagcagtgtttgggcctggcagtgtttttgcttttggtttgaggtcttgacctaaaactttaagtaaaggcaagttttgcttaatagtattggtattgacactctgacagatcttttaatctgaaagaattttaaagatgcatgaaagtaatccccagtgatgattacatcttcgagtggcagagatcagatttttatttaaataccaatgcagtttatcacttttttccacagtgcagggggccagggagggtctggatttgggagggtctggatttaatagtgaacttctgaacttgacttactttgaggggagcgattggtgggtgttactgcatgattcagtgttctgtgtctttaaaaatgttttgaaatactcattctgtattgtaatcctcaaaactactgttaggattccaaaccattgtggtttaaacttagctggaatctaaaaggtggctgacagagggaaaggaaacctcctttaaataaagaacatatttggcttgcctaagtgtcccagagtctgggctctgggcatatctaagccatgggccaagtctcatagttgaagaggtcgggaaatacttgtctcaaatataaacaccagctcaatataaacaccatcaattagttctgcagaaactcctggtacaaataagaacttgcaaagcttcatgttcaatggagttcttgtctggatgagataaggagtgcaatactgcacgctcttctgtacttgtgataaatcaaaactctaatgatgctattaaaatgggttttcttttggccctggtaagctggaaagcattgggaggtggggaggatagatttcacttggaaatacctgaagctaaaaagtggtggctttttcttctttcttctaaatgtactccttgctctaattaagcgatgtgatcactgtcccaacactgacataccccaggatgaaacacactttctattcaagtagcctttttttcccttgccttcttccatgagacttgctgaaattgtcatgttatttctttccagaatttattggagcattaggcaaaagcctcttgggagtataaataatgatgattataaagaacagtcagtttaccaaggaaggccattatctttgacttgcaaagcttttacagccaaacattgtttgcttacagttctttaatacaaatgaagaccttaatggtaagaagagtcctattactactccctttgtacatggaggtcatcccaataaagaaaggacgatgtcactttgctcaggcattaacagcttgtttttcaggacaggcattatatacggtctatgaaggccttggatggtgttttttcttcttcttctttttttttttttttttttttgagacggagtcttgctctgtggcctgggctggagtgcagtggcgctatcttggctcactgcaacaacctctacctcccaggttcaagcgcttctcttgcctcagcctcccaagtggctgggactacaggcgtgcgccacgacacccacctaaattttgtgttttttgtagagacagggtttcaccatgttagttcgccaggatggtctccatctcttgacgttgtgatctgcccgccttggcctcccaaagtgctgggattacaggcgtgagccaccccgcccggcctggtgttttctcttctaaggaatgtggtttctgccatcagcagcaagtaatcctccttgctgagtgttaaaagatttctaaagttgataaggaatactgaatttacttttgtactccctactacgtcctactgtatattgtataccttatatacaaattcagggaattttttttttttttttgagatggagccttgctctgtcacccaggctgtagtgcagtggcgcaatcttggctcaccacgacctccacctccctggttcaagcaattctgcctcagcctcccaagtagctgggactacaggcgcgcgccaccatgcccggctaattttttgtatttttagtagaggcggggtttcaccgtgcaggtcaggctggtttcaaactcctgaccttgtgatccgcctgcctcaacctccgaaagtgctgggattataggcgtgagccaccgcgcccggcccaggggatggttttgactttgtctgagtaggcactgacatggaaaaggtatgtataaatgaagaatctcatgccttttttttttttttgcctgttaattttcttattttaaaatttttatagaggtggggtttcgctgtgtttcctcggtgggtcttaaactcctggcctcaagtgatcttcaccccagttcttccagcctcttacacctacgaatcattttctgtctttgtgcttttgcttattctggatattccatgtgaatggaatcatataatatgtggactttgtgtcttgtgtcttttaaaattatgtttctaaaattcatgctggagtgtgtatcagtacttcattcctttttgtggctgaataacattccattgtatggatgtatcatgctttgtgtatccagtcatcagctgatggacatttgagttgtttctatggtttggctatttttttttttttttttttgagatggagtctcactctagcccaggctggagtgcagtggcgcaatcttggctcactgcaacctccacttccgggtccctgttcaagcaattctcttgcctcagccttccgagtagctgggattacaggtgtgcgccaccacgcccggctaatttttgtattcttagtagagacggggtttcaccacgatggccaggctagtcttgaactcatgatccacccgcctcggccacccaaagtgctgggatttataggcgtgagccaccgtgcccggcccgtttggctattttgaacaatgctgcggtgaacgtttgtgtggaggtttttgtgtggatttgtttgcatttctcttggaataccttgttagaaaagcgtgcttatacgtattactactaaatttattttctgtcattaagctgtgtttcagttcatgcctctgaagtgatgtgctctgttcagcagagtcctatgctgtgccctccccttctggggctctagcttgccctttggagggtgtgtgtttgtgtgtgtgtgtgtgtgtgtgtgtgtgtgtgtgtgtgtgtgtggtaggggtcctcattttccttactgcctgtcactctccatgtcactgtgggtggccaagagtggtctcatttcctctacccctttgcaaaccgtaaacactggtcacacgtgcttgtgctggaatcatatgctccagtggcttgatggtgggacttcagatttcctgcattaccttaggttttgactttcttgtggttacctctgtcagcattctttggcagaggactatggggagtagaatgacctagaaattatccctgattttcttctccttccaagcctgctgaaccaaaaatggtttttatttttctttgaaaaactacccttcgtaatgaactccattaagaaataggagttcttcaaaggaggagggatgttactgtattcttttgatttctctgaatttactagatttattttccccaagttggtgtgaaattgttgagattggtccttaactagagtcagacaatttttttttttttttttttgagacagagtctcactttgtcgcccaggctggagtgcagtggcgcgatctccactcattgcaacctccgccttccggattcaagtgattctcctgcctcagcctccagagtagccaggattacaggcacccgccaccacgcctggctaatttttgtatttttagtagatacagggtttcaccttgttggccaggctggtctcaaactcctgacctcaggtgatctgcctgcctcggcctcccaaaatgctgggattacaggcgtgagccaccgtgcccggctggcaatttttattttttagatacagggtgtcgctgtgttacccaaactggagtgccgtgacgtgaacgcagctcactgcagccttaaccttcctgggctcaagcgatcctcccacctcaccctcccaagtagctgggactagagctgcgcttcaccatgcctggctaatttcaggcaatttttaattgttagaaaaactgtaaggcaacataagagaagtggatggtggggactgcaaatgtcatgtggcctagtggtattgagaagcattttgtgaagcagagagtgcgtgttccgattctgtaggagcacatgtcttggtgtgggtgtctttgccttcctagaacttcctgatgataagaagcctgtaaacaccagtgtgtccgtcagtatttggaatcttgtttattacatagtcctcaggttcattgtcaaaaaattctttactgatggtattaatcagtatttggaatcttatttatttcatagtgctcaaggtcattgtcaaaaaattctttactaatggtattaatcatgcttctcacactccagtttttctggtatggttttctgttccaaattgactcctgtgctcaggtcattagtttggcttactaacaggagccctgacagctatattcaatatttttctctgcagtggccaagtagccaagaatttactagtttagacacccacctcagtttagaaggtaggtgtgagtgtgtgtgtgtgtgtgtgtgtgtgtgtgagagagagagagatagagagagagagagaatatctaagaaggagttaatattttaaactttgcattgtttaactggaaatctgtgttctgccgggccgcttttatgtggtgtacctataacctatacacatacttgtgcctttcaaaggctaacgccacatccctcctactaaaattgcttattagagctaattttaagaattgagttagaactgccctataatgtaatgcagaatatttcccaataatgcctaggttaacaatgatagtcttgctgtattgtgcaaaaaaggcttctgttcagacccagctgggtttcaggcttaattcattgctctatggtgggatcaccacagctgctgtggggcctttacaaatgcaaaaaagctgtcagtgtttgtttcatcagctgcataagtgatgaggccaagttgaggaatccattccagtgcgcagtgtgcaggctgtagctattattgtttacagaattagtgtgttggagctttaaaatagttggcacatcgtctgccctttaaaagcacaagactaaggaatgagaccagttggttgtccttgtaatgttggccggatccagcccagcccttgtcttttaacagctactgctccgggctgtgctgtgggacttgactactctttggaggaagtgggggtgcttgctgagttcttgtctctgtagttctgcatcccaaacttaggtttgcattaaaaaaaaaaaaacaaaaaaaaaccacgcagtcatttagagttccataagtgtaattgagatttaaagccttaatcatcctcccagccccaaataggtataggactgtcagctgggatttcaaatatctgtgcagtaacattccagatttggctctgtgagatttattttgtgaagtgatactgctttgggacttgccctcatctctccccatgggtacagaagttaaggctacttcttggctggcagccaagaagccaggaaagccccattggacaggtcactttccaggcaattaaggagtattctgcagggctctccgtgaatgctgtcttaacagtgtaaggtgaccctcttccccagggacctgatgagcccgggcagcatgttcacttgcttttggactgggcaagcaggaatctgggaccagcatcatggtcattcacaggatagtgtgggattgtcccagcccctccctcatttacattcagaccccttctccactcaggggtctctgcctcatggaaactggagggcatgggcggtggctggtctgttacggttttgaaagtggagctcatcaggtctcctagccaacgggggtgaataattgtgcttccttcctcccagctggaaaaggtcccaaagtgctctctcatattcataaaagagatggcacgaggcttagtgtctccaaattaaaggtcaatactgatcagctttctctcaaagaactgtcacatatgctctcctggagacatttgtgtcttcccattttaccttaggaagtctctggagcccaggaagacaagtgtgtccgatgaatctcctgtggtgttggtactgattaagcagagtttggggatccttgtatggcccctcttttaaagagctttttagcacggtctctgccaagtatattttaactattagttacaatgatcttccaacagagagcaaacaacataagtaatagtttagagttttacttcttaacgtcttcccaaattccttctctttctctttcttacctgcaccctggaatagtagtaatgaaaaggaaaatagcaaaccgtgagctccatatcctctcccgctgggggaaggactaatttgcagggcctcataaggaaacagcagtttcatggtcattgttgtcagcctagcagcgcttggttgcacttccgttgctcaacgtgtttctcctggctagggtgtttgtagtatattttgagttttaggaatctttcatcaaagtttcttctgcttttttgtcattttaaggcaaaacattttcttttggtagcttgaaagttctacactctcaatgtttaaacattttttgggggcagggtgagaaacagctttgtggacgcatatctgattgtgtgtgtttgttatttcatgtcagagtcatctcatgaccccaggagacctcgccagtggcctgcctcctagaaaatgcactgctgtaataacaatcagggcgccagctgaccactggttgtccctcagccacttattagctgcatgtccaggaggatcaccaggccgtggtttaaattctcagtgttctccattgtaatgtggggtgcacgtgcgtccctgagtggagattaggtgctctaataggcacaactgtgcccctttcattgtaggcattctcttccacctgtatattagtattgcttctagctgcgtgatcgagggtttgggttaatgctgacatattgcaacttactggatggcaaacagttaagttgtcttctttggctgtggggagagatggtgaattcaacactctgaaactctgaacacagtgtccaaagagaccctgggcttcctggagtgttattctcttactctcctaaactattctcccactcccatgaaaaagaaaatcttaaagcggcttatcagtatctgacataagacagagtgaggcctttccttttatctacatagagatagctcaaagatctgcttgaggggcagcaaaaggcatgtcagcaaccaccaggaaaggatcctgaagcctaaccaactggttataaacagcagtaggtgcccaggagggaaccgataccttctgcaagagcatcagttgtgaaatggcctaggtacaaggatgttcttagaatcaggtttcaaattatagtaacatgtagacagactctgaatgctctgggaatggagtaagctggttctagtgaattttctggttgactgtttcaagccatggcattaactccttatgaaggatattttttggctgtcctgtcttcagaagtccggtgtgacgcgcgaactcaatggttgcgttcccgaggaccttatggagtgcttcctgtctgtctgccagtgctttgttactgtgcacctctgtagatatgcagtagggggtttttgggtggtgtgcatgctgatccccagagggtttatattttacctgcactcctgaggatgtgtttgtgttgcttggggccctgagaaaaaactgcattcagcggaggatttagtaagaagaaagttggttccatgaagtgtacatcagcagcccccgaggatgctgtggggttgcaactcctaaggcttaactgcggcggggatcggttaatagtatggacaaccccacaccccagaacaggggataggtgatggacgacagtgggacaccatacctaatgtgcatgcctgcttcctagaaattgtgatagtgtggtgactctttccttctctgaaaagaccaaaccccatcacttaatatggaaatttaaaaccaaacctccaaacccttctgacagcatttttgaccaaattggcttttcgtaagggtagagctagattttccgaagagctttaaaaacacagcctagaagcttatctttgtgaacttttgctgttgtcaacagtggatatcttgctgctgctaatagaaaacaaaaaagttcatttgccaaaatgcttgtcatttcctcctgaggagtgcagcttaacgccaggacttcatttagtcagagggaaatggttgctacctccctgttaagcttctttccattatccagttatggcagaatgagtgttggggcggcctggggagatgggggtaaaataaaggaacagctaagaagtggttctgcagaatgtgtacttatatccgaaagcctggatggaaaggacggtggctttggaaggggtgtaaaatgggagggggtggcaatcgctgaagcatgacaagcctccgaaggcctctgggacttgaacacaaaaaagggagctttttgcagctctttcacatgcacacgtctccctctgccccatccatcctcccctgctgttttgtaaatctcccagttggaaatttttaacatgggagagcttcttcctgtgcttcagttggcagaatgctcacacgcagctgcaaagaatttgcttttccttttcacagcatctctcatttaaaagcattagtgagactacagaacaaaataaaaacttcaggatttttcagaagtggaagccaagtttaattaaagtcaaggaagttcggggctctaactcttttgttaaacctcttaaagtcaggcgtgtgcgtgtgcccatggcaggcaaggtaggaaatgccagtgcctgtttctcgttaggaaatttaaaggcctacttgtctggtgtgtgcttggggaatgtcctagaatttatcaaaagatgtgctgaaccatcatgtctttggtggcctcaaaatgcttgccagtggtgaggtagttgcccctttcttgagggaggaggaaaaccgttaaatagctttctgtctcctcccaggcctctgtaaaacctcctaatctgagtgccctgttccctgtgctccacccttagtccctagaccaggccactgggctgtgagcattcttgttggggggggcggaaagaagtttctgactcgataactgcctcctaaagttggatttttaatctttcaatagtatttgaaccttcagcattttttacattttattttaagagacagggtctgttgcccaggctggcgtgtggtggtgtgatcacagcttattactgcatccttgaactcttgggctcaagagatcctcctgccttccctgccccaccccctagtagctgggaccacaggtgcatgacaccacacttggctaatttttaatttttttttgtagagatggctattttaaaattttttttttttttttttggtagagatggggtctagcattgtttcccaggttgggtatgaactcctagcctcaatcatcccacctcagcctcccaaagtgatgggattacaggtgtgagccaccttgcctggcccagtttctttgtctagcagcctttacaaacatttgcaaagaatatccaggcagtgtttatgtatgtctgcagtgtttttactggctatatagaccacagagtccagaagtgacttggatgggatccccaggaaggatacttagaatttacttgacagactgaagattggtaaacatggtctcaagttgagttttgctgggaaattggttagcttcgctgcaaccttgtcatttctttcctgagtaattatatgcagacattggtagaggttttttgttttttcataaagaatattaacacaagggttgtatacaaagggaacatactcatttcttagtctttctgtagatcctagcacttgtaactgatgaaatgatttgcctcagggtcgatccttccttccttccttcagtccgtccatctgtccgtccgtccttccgtctttgatggactttcactcatgttgcccaggctggagagcaatggtgtgatcttggctcactgcagcctccacctcctgggttcacgcgattctcctgcctcagcctccggagtagctgggattacaggcatttgccaccacacctggctaatttggtatttttagtagagacagggtttctccatgttggtcaggctggtcccgaactcctgacctcaggtgatccacccgccttggcctcccaaagtgctgggattacaggcacgagccactgcacctggcctgctcagggtttttcttggtcttcatgtatttgatcctattggttaggtagctgcaatcccttgccctcattttacaggcatagaatgggtactttatttaggaagggttatgattgcgagtcatgtcaggttaccagaacttgaaactctacctttggacttagcagtgactgtgttattaaggtgttggcatttcctttaggttcttgctctgccttgaaaaagctgaccagaggccatgcatggtggtttcacctgtaatcccagcactttgggaggtcaaggtggggagatcacttgagcctaggagtttgaaactagcctgggccacatggtgaaaccctgtctctactaaaaatagaaaaaattatggtggtgcacacctgtaatcccaggtacttgggaggctgaggcaggagaatggtatgaacccaggaggcagagcttgcagtgagcggagatcttgccactgcactccagcctgggcaacagagcaaggctccgtctcaaaaaaaaaaaggagagaaaagaaaaaactgtgggaccttgggcaaatcccacactttgctttcccacagttgttttccttagctgcaagtattgtgtgatgggaacacagagttcccctccagaatgctatgatttttgtctttcagaagtttgtagcctttcattttatttcattttagttctacaaatatttattgtctactttgtatacttgtccgattggagattgttttctcaggtggtagggagggacatgtgtagggggcatgcaggattgggaccaagggaggttcaggagggcttgaggccagtgggttctaatcacacaaggatcttgttaaaatgcagctcctcattcagcaggactgaagtggggcctaggattctgcattctaacaaactctcagggcctacacttcgtgtagcaagactttgggactgattttgttcttggtgcagtggttcgcttcttttttcttttttaaatctcacatctctgtcccaacctgagcatcgaagggtagggttcccaataagatctctgctaccaacagaagtttgaaaactattgttatagaagatccaggcctgatgtggtggcccatgcctgtaatctcatcactttgggaggccaaggcatgaggcttgcttgagcccaggagttcgagaccagcctgggcaacaatagtgagacctcatctcacctttttctgaaccagcagggactgaagagacactctcctacagtataaagatgtttaaaaacagtgatgcgggccaagcacagtggctcatgcctgtaatcccagcactttgggaggctgaggctggcagatcacttgaggccaggagttaaagacaatcctggccaacatggtgaaaccccatctatactaaaaatataaaaagtagctgggcgtggtggtgtgtgcctgtaatcccagctactcgggaggctgaggcaggagaatcgcctgaaactgggaagcagaggttgcagtgagctgagatcatgccactgcactccagcctgggcggcagagcgagactgtcgcctgtagtcccacctactcaggagaggttgaggcatgagaatcgcttgaacccaggaagtggaggttgcagcgagccaggatcgtgccattgcactccagcctgggcaacagagttagactctgtctcaaaaaaacgaaaaaacagcagaaaaacaaaaaaacaaaaacagtgatgcaattgtaaggcttgagcattgcttgaaaatgcatcttttggccccgtggccctctatgttgtcctttctgaagaccattcttcagttttcattctggaaggaagacagctagctataatgcgttgcctgcatagtgttatcatgtacttcccaaagcttccatgtcttgctttagtagacaaagagcagtgtcaggaatttctgcgtagagctcttactgttttgctggtttctatcctgaactcaccttgaaagcttatatagtttttaaaaaagagaagttgttactggataatagctaccattgattgaatgtatacctaccctaaatgctttacacagacagcattttacgtattcacttcttaccacaactctgtgacttagccatttcccccaaattgcagctgtggaaacaaagcaggtaaaggggccagggttggacccccctaccactacttgaccccaaatcaggatgtttcactttggagcctgtgtttgatttcactatcctggaaggtggtattacctcaggtttatgcagccatagtcctgggtttgaagcctgcctctgtcacaatctctgtgcctcagttttcttatctgtaaaatggatgtgataattatagtacctgggccactcaattttgcgtggcactggctatacattttatttgttgttatgattttgtttattattcttgccatagtcactaagtttattttcttctccctgctcccattggctctttaaaaatcattctctaaaatgttaaattagcaatcttaatgatttttcttcctggagttaggttaagaggttatatttgtgttttcttatcaacctacaaaataaagcctagtaagttgccatctatagagaaagcagttaggggattcagcatatggcatttactagattttgttgggtcctcattttttacgtgctaagtttcctcatgtgggtggggaggatgccttatgcctggaaacatcgcagttgcatgtagtggtctcccctacccttattttaaaatacttgagttttatttgtgagctattgaatacacttagcggggctctctgtaaacataccctgaatttaatagccaaatgatgtacacatgggatgtgcacatataatctcttttccaattgtccctgctatattttcttccttgacaaactataaaaccaagggaatgattttcaactaatggttgtgttctttaaaaaactgtttttcagccagatgtggtggctcacgcctgtaatcccaggactttgggaggccaaggtgggtggatcacctgaggtcaggagttcaagaccagcctgaccaacatggagaaaccccatctctactaaaaatacaaaattagctgggcatggtggcgcatgcctgtaatcccagctacttggaaggctgaggcagaagaatcgcttgaacctgggacttgtgggttgcggagagccaagattgtgccattgcactccagcctgtgcaacaagagcgaaactctgtctcaaaaaacaaacaaacaagcaaacaaaacagctgtttctcagggtagttttcttgaagcacgatttttcgaaatgttgtaaattagtaggaccctggctttgagtcaggatcctagatggaatgaaatgacacctaaagattggtgtcattcttggggatactcactgaagaacatactgctccattttcttttcccttctgcatttctctgaaaaattttgtctatatcttttttttttttttttaagatggagtctcgccctgtcacccaggctggagtgcagtggcacgatctcagctcactgtggcctctgcctcccgggttcaagtgattctcctgcctcagcctccggagtagatgggactataggcgcccgccaccacgcctgcctaattttctgtatttttagtacagacggggtttcaccgttttggccaggctggtcttgaactcctcacctcaggtgatcctcctgccttggcctcccaaagtgctgggattacaggtgtgagccactgtgcctggcctgcttctctatctttgaaaaaggagtttttggggggcattaaggaaatttgtcccttttcattttagatagttttgggggatgtctttaatgtttttttgtggttctttagaggtaggcatatgaagacactggtgcatttttatctgctagagaaatgggattgtttttaatttttacagagaaaaactaaacatttatatgcattatttagtattttgttctgaagaaacatgctctatttgtaaaagaggaaatgtgtgggaaaagggcaatttggcatgctgttgcatttgcagatccaaatttattttccttcattcagataatttaacacaggcaaataagtgatgtttccagagtggcttcttatatagcagcccaggaggtgagtgggagatttcagacctcgactttttgtgtgtgaaggggtgacttagccagggcaatattgtgttggcctctttttgattctgggtttttttgttggtggtgatcctgggcaccttcagtctttggttcagcctgggaaggagactttagaggtatccactccccctttcccagttttctcctgattcttccttctagtccttgtgcatattagtgggattcttaaaaagccactgacaatctgatggtctaaagctccacctgcagttagaaagaagctggtcagccttctggaatgttctttctccactggaggctagtgagcacctccagactaaaggaggttttggttgcgcttttagctttgaggaggtcactgaacttcaagagcccttctggtttcccattttgtgtgataggattaaaaacctctgttttgttgggttacctccatctctgtgacttggggtgacaacctcggaccagtggagaaggtgtgtgggcagcaggaagagctgtttgatctctccttgcaaaatgtttctgggctcaggttcaagagtggagaaaccctcttgaacatggaacagttggctcttggggtcagtagcaaagacaggaatgagctggaaaactttgtcctgacctaaaaggaggttacatagacagggttttggatctttggtgtttccttttttacaaaggccatgtgcacagctgtacttccagaattggaaaatttcctacatacacagcttcttcattagatactgataccggttaattcacagtcacctgtaattggaaacagctgctgtttcccagctgactaggtgttcaagtcagatgctttgaattagctggacttggattattcacattttaattaaagtccatttaccgccccccccgcccccccccccgtcttttgcctcttcaatgaccaggtttttacagtaatacatttgaaattacatgagtatcccagtagaaaggcataatgtaagttcaaggacttgcagttgattatggcgttacattattaaatagtgaatttaacagcattgcaattcccttttctcacccactgaaccttgcctctctagtggggaaaatttcattccatttaggaaagttgagacttttgtcccctttccttctcttgggacagagttgtattaacctaattgcttgtgtcactgctacagggaaggtactgcgtgaagtgggacaagcaattttctggtactttttgtctaatggggtttgcaaattaagccatgactagtggggatattttctcagaagggggaaaaaagttaacaattgctatggtgtggctgttgtccagtgcttctgtattgatgtagaatgttcactgagcagcttgtaggagaaaaagactgccttaatttttgggcaaaaagttagaagggaaattgctttgcatttttctctccataatgttaatgaggaaaagaggcaatgctggaggaaaggagataaatggatgtttcctcccttccctatttaagctgcctaagttgactaaagttcgacttgataaatgtcctagttaatttaattttgtgttagtgcctctcctcccctcgagtgtccagtccattttcagctgacttgcagaaaaaccaggttaatgcaaatccatcagattctgcatgcctgttaaaatgcttaagcattctacatggcgtgggagacatgatgcttgcctaaaagggtccctggagagataaagtatattcctgccagtgcatttagggagttatacatatataactgtctcatatgatttggcattgtcacatactgagcactgggagagccaaaggaggtctggggttggtaggctgtttggaggtaaaagtttactactggaatagtccttccagctcagccgcttccatttccacattgcctcagaagttgcctaaaggatgtgcatcttgttggcagccccatgactttctagaagccctgttgtgtctgtttagtgctttctacattaggtcggagatcttttttcattaggtcagagatactggactcctttttgttatggaaataacagtctcttggggttctctggaatgagccagggggtcctgttggcctggtccttggaggagaggtccaggctgttgctttcagtatccatgccacctagaatttccagtgactgttgagtcattacattgctatggtagtttcttaggaataggccggtacaatttgattgtgtttttggaccttcccccaagttacaaggccaccagcactcagactgtgggtataccatatggaccagggaacacattggacaaggcgaaagcttgttaccatgaagttcgttagaagatgagactccattcaaattttcagttcttcatgaatgagttcttagtaaaagtgctttgttgatttttttccatggtagtaactaccatgttttgagtgccttgttaagtaacataagtacataatattctcacacacttttgcaaagcagaatctattattttatttttacagatgagcagatagggctttggagagagaagtggcctgaagtagcacgcagtgtgggtggctggagtatatgcaggggctggagttacagcccagttttcttaattgctttgattttatttacctattttttatagaaacagggtcttgctatgttgcccaggctggtttggaactcctgggctctagcagtccttctgcttcaacctcccaaagtgctgggattacaggcatgagccaccgtgctcttggccttaattgttctgattttaataatggcatgatacccctgtaccccaagttatacagatgagagattttggctctggtatctctgtctctatcctgggtaaggtttctcagggttgtaggccagtctctttgtcaggaagagagctagtagttaaactgaaacaaaggtccgacagtctttattttgcattttaaggtacctgttgaaaatgactaaacgtaaaatgggacttttgttaattcagtagctgttactgaagcattagattgattcacctgtttaaaagtagttatgaaagacaacagagaacagctttctatttgtcgtaacttactaatagatagccaagtctgcaaaaaaaaaaaaaaaacagtcaaggattccatgtagttgcaaaaggcaagttcaagagaaagttggcaaagaaagatggatagatggagagaaagcaaaagaaatccttttttttggagagagaacacactgttggagtatgctgtaaacagtgtaagggaaaaaccccataaaaaaggtgaactctggttgggcgcagtggttcatgcctgtaatcccagcactttgggaggccgaggtgggtggatcatttcagatcaggagtttgagatcagcctggccaacatggtgaaaccctgtctctactaaaaatacaaaaattagcatgcctgtaatcccaggctgaagcaggagaatcccaggctgaagcttgaacccaggaggtggaggttgcggtgagctgagattgtgccactgcactccagtctgggcaacagagtgagaccctgtctcaaaagttaaagaaagaaaggtgagctgggcgccgtggctctgccagcaaaatttcaatcgaaacactgcaatgagccaggcactgtacctcatgcctgtaatcccagcactttgggaggctgaggcgggtggatcacgaggtcaggagattgagaccatgctggctaacacggtgaaaccccgtctctactaaaaatacaaaaaattagctgggcgtgatggctcatgcctgtaatcccagctactcgggaagctgaggcaggagaatggcgtgaacccgggaggcggagcttgcagtgagccgagatcgcgccactgcactccagcctgggcaacagagcaagactccgtctcaaaaaataaaaaataaaaaaagaaaggtgagctctgtaatagtgtagctggctggtgaaaatagtgtagctggctggtacagctcagcagaggaagggtctggggggacatgctcccccatccctgccagtctcatatctgccatacctgctgcgagaggaattgattggaggactggtttgggtggaaattgtccagccgggctgggcatggtggcccacacgtgtaatcccagcactttgagaggctgaggcgggcagatcacttgaggtcaggcgttcgagattagcctggccaacaaggcgaaaccctgtctctactaaaaatacaaaaattagctgggtgtggtggcatacacctgtaatctcagcttgaggttgaggcatgagaatctcaagctcaggttgaggcatgagaatcacttgaacctgggaggtggaggttgcagtgagccaagatcgcaccactgcacttcagcctgggaggcagaatgaaactgtgtctccaaaaaaaaaaaaagataaattgtccagctattgtataacaaaattcatatatacatatattcatatatatggacaataaattgccttttgttttcaccactaaatacagtgtggttgtgacccttagttttgtgtattctgactcacagctaggatttaaattggtcgaaggttgtgtgtattttcaacattagtgaaatactgttttctgaaatggttggagcacgtcactcctatctgcaatgtctgtgtcccaggtgatatgtatgcccactagtttgattttgttggcggtgggtaagttttgtgagcctgacttttcatatgtgtatggatttacatgtttagccccatggcacggcttactgcttagttccagtgattccctggcctctggggtcgtggaagtatgtgcccaggtgtattactctttatctcccttcttgctaatttataaaagcctttacttccataagtacttgcctgattaacaccacttgcattaaaatcttactgtcacttcccttagctttcccagcacaactttcttgtacttcattcatgtacaccattattaatttgtacttgtgttaatttgtcagagttgatgaggcactaccctctaatctccctactgttgtcatagttttctttctttgaaaaacagttactttcctgctcaggttctcattagcccctatcgtctatgggataaaatctaaactcttaagcattacctaagacccttcattaaatcagtctcctggcacttaggaggcaatcagtaagtattggttgttatcctaattttgcattccatattaacttgcagatcatctggatgaatttgattaaatccccttccctcactgactttatatttcgggaaatttcatgtctagggaagttgaaggaatagcatgaacatctggggcacttaccacctagactgaaaaattaacacctggtcgtatgtatgtatattacccattgtctactttcttctgtcaaatccgtgactttggaaattttgaaatagtgctcttggttatccattaaaaaagggtaaaataaacatgctgttgctcctgctgcagcacttcagtagtaataaaaaaaaacttcagtgacttgggtttttttctgccaaagtaaatgttggctctctttcagatgtagtaatgttgcttctctaaattcgttcgagttaaactaaagcagggccaagttgagaaattagtttctcggttttttcccttccaatttagaaaaaaattaagttttggatattcttgttcctgtaattttcttccgtgttccttcctcctcctgcattaaaaaagatcataaagattcagctaagatgtcagtgaaaggaacaaagatccagccttttacattctttatgtggagttattgttggtagtaatcttaaaatagggtgtttgaatccatgttgaggcagttaattcagtagtacagtttcttgttaaccacaaaatgctaagtaaaggtaaagccttatccccacaccctgctttttttttttttttttgagatggagtctcgctctgttgcccaggctggagtgcagcgatgtgatctaggctcactgcagcctctgcctcctgagttcaagcagttctcctgcctcaacctcccgaatagctgggattacaagaatgagccaccacccctggctaatttttgtattttcattacagatggggtttcaccatgttggccaggctggtcttgaattcctgacctcaggttatcctcctgccttgacctcccaaagtgctggaattacaggcatgagccaccgtgcctggccagccccttaacatgtgatttttgcctttttgtgatttttgtcttatgctgcaaaatacgcttgcgttattactagctaggaaatccaagcaggtatcacaccgtgccgtcatatgagtgataactgggagttttcatgcattagctggtatttgacaggtttgcaggtatgttagaaagtttcagtgtgtcagtgtttggtgtgtataagcgtgggagagcccaatacgcatgtgagatgcagcttccagtcagtgcgcatataccacttggagggcatgctggttgcaacccttttattctaataaggaactggtttggctaggtgaactacgaagtcattttggatttgacccacactggctgtgtctcactctttactgcagtttaattcatgtgatgctattaagataataactttgtccaagagcaaaagaacgtgaatacattgtggtatgtgtgaattcacaaacaacattcaagatcagtttcagaaatgttcagagcaaaatctgaagtccccttatctcctattgtactgccttcctcaaaagtaagccatcagtggtttgcacatccttctagcctttctgtgtatttacctgcatacatgcatgtttatgtaaacatacagatgggttccccgcgtggggggccccccacttcacttggggcctatttatataaatggaatgtaaggttatggcctgtgatttagctttttctcacgtaacaatatctcaaagatctttccatgccattctatttcatgctgcaagtagctgataggactagtgtactgtagtttatttagccacttccttctgatgactttcttcctagaagagtccttggcatttaggaggcactcagtagacctttaggttgttcatgctgttttgtttgctttaaaacatttctgtccatacacctttcaaacatatggtaatattagcatatgattgaattggaagtgcagggtccagggtatgtgctctgtgtgtgtgtgtgtgtgtgtgtgtgtgtgtgtgtgtgtgtgtttgagacagagtcttgctcagttgccaaggctggagtgcagtggcatgatctcagcgaactgtaacctttgcctcccgagttcagaccattcttgtgtggtagctgggactacaggtgtgcagtgcaccatcatgcttgaccaatttctgtattttaagtagagaccaggtttcaccatgttgcccaggctggtcttgaactcctggtctcaggtgatccgcccaccttggcatcccaaagtgctgagattacaggcgtgagccacagcgcctgtcatgtgctgttttagagtaggaagaaattttttccttccgaaaaccttcagccaatctacacacccactaacagcatatgagagtctttattttcctcccttcttgccaacacttagcattatacagcttctttggtttttgctaataaatatcactcatcattgtcttaatttgcatttctctgttctcagcctttttcgttggtctgtcagctgtccatattttttttcttcataacttttatccactattatattgggttgttggtttctttctctctctcttttgttctctctctttctctctctgtctttgtctttctctctttctcttttgtctctccccctctcctctctttcttcctcttctcttctcttttctttcctcagtttcgctcttgttgcccaggctgaagtgcaatggcgagatctcagctcaccgcaacctccacctcctgggttcctattctcctgcctcagcctcccaagtagctgagattacaggcatgcgccaccatgctcagctaattttgtatttttagtagagacagggtttctccatgttggtcaggctggttttgaactcccgacctcaagtgatcggtccacctcggcctcccaaagtgctgggattacaggcgtgagccaccccgcccggtctgattgttggtctttttcttatgactttttgtcagagcacttcatgttcctgaaatctatctatctatctatttttttattttttttattttttttgagacggagtctcactctgttgcccaggctggagtgtagtggcgcgatcttggctcactgtaagctctgcctcccgggttcttgccattctcctgcctcagcctcccgagtagctgggactacaggcgcccgccaccacgcccggctaattttttgtatttttattagagacggggtttcaccgtgttagccaggacggtctcgatctgccgaccttgtgatctgcccaccttggcctcccaaagtgctgggattacaggtgtgagccactgcgcccggccgttctggtatttattgaatatgtcgcaaatattgtctcctactctgtcctttgtcctttaagtatttttttttttttttttgagatggagtctcactctgtggctcaggctggagcacaatagcgtgatcgcggcttactgcaagctccacctcctgggttcatgccattctcctgcctcagcctcccgagtagctgggactacaggcatgcaccagctacgcccggctaattttcttgtatttttattagagacgggatttcaccgtgttagccaggacggtctcgatctgccgaccttgtgctccgcccgcctgggcctcccaaagtgctgggattacaggcgtgagccaccgtgcccggccattctgatatttattaaatatgttgcaaatattttcttctagtctgtccattgtcctttaagtattttttttttttttttttgagatggagtgtcactctgttgcccaggctggagtgcagtagcgcgatcacggctcactgcaagctccacctcctgggttcatgccattctcctgcctcagcttcctgagtagctgggactacaggcgcctgccaccatgcccggctaattttttttgaatttttagtagagatggggtttcaccatgttagccaggatggtctccatctcctgacctcataatctgccagcctcagcctctcaaagtgctgggattacaggcgtgagccactgcatccagcctcctttaagtatgtttatagtgttttttctttcatagaagttttaaatttttctgtagttcagtttggttttcttttatgggttttatgtctttgcttaggaatgcttctgtgacgccaagaatacgaaaatgttctgagaaattatctttctttttattacctcccattgagctaaacaccaccctccagcttgcactctcccatcaccctacccactaaattgatatggaatttacttctctggaatcctcaaaaatgatttcttctttcagccacatattatggatgtcttagggtttattcctgttgaagtcccaaatggtgtaatttttcaagtcttggcatacattgattgttatgtccatcagtattctgtgttaaataatgttttcatacatcccatggatatataggaaacagctctgggctatactccagagttcccagactcaggatccacttaaataaaaatctaggtaaattcccttttagttttataatccttttttttttttttttgagacgaagtcttgctcttgtttcccaggctggagtgtaatggcgcgattccgggttccagcgattctcctgcctcagcctcccaagtagctgggattacaggcgcctgccaacacgcttggctaatttttgtatttttagtagagacggggttttaccatattggcgaggctggtcttgaactcctgacttcaggtgatccacccacctcagcctcccaaagtgctgggattacaggtgtgagccactgtgcctggctgttttataatccttcataagaaaggacaaaataaggttgaaaaagagttaacatccattatgctattgtgtttacttttgaaaggcagcaaacataaagctaggagcttgcccttcaacaaacagctttagttgggtctggtagagtcaccctaagaactggctctgcgcccctcacctggattgcagtcactgcttgctctcatctgttgtacatatttagcattcatgaaatttcttttaaatgatgtaactgctttgaaaacatttcagaacaattgcattgaattgaacttttgcattaatgtgagtctttctgggtttttttttttttttttgaaaggaagtcttgctcttgttctccagactggagtgcaatggcacgatcttggctcactgcaacctccgcctctggggttcaagcgattctcttgcctcagcctcctgagtagctgggattacaggcacctgccaccacgcccagctaatttttgtattttttgtttgtttgttttagtagagactgggttttaccatgttggccaggctggtctccaactgctaacctcaggtgatccgcctgcctcggcctcctaaagtgctgggattacaggcgtgagccaccgcgcccagccgtcagtgtactttaagtatattttcattatgcaattaattacaatatgggaagtcagttaactaggttattactttgtgaagtaaagttaaacatctggtcatagaatgacttaaaaatgacaaataaggaaaaaaatacatatatatatatataacatgaggtaaagttaaacccagatagagggtatcattgctttcatgcgtggactttgaaattgctttttattcctgagaccttttctagttctctaacatgttccccaataaacgaggttagaggataacaattctagaaaagaaggcagcatctcgtaagtcattccacattgcatacagtaagtgtgatttctagccatgcatccttttaaaaaaattcatcttgcaataaaagaatttggagagcctttggaatcttgtataaaggaattttgctggcataaaacatgcattatgtatcacacttgtattttaaagcccacttgatgaaagagcagcaggttgacagtggttgactcaacaacctgcaatttctgatgtataactatgagcagtgggattattctttgtaacttggttatatgaagtttgaagtttttcctttcagtgcagtgtttcctttttcttgtttgtttgtttcctgagtctcactctgtctcccaggctggagtgcagtagcgccatctacaagccaattgcttgactctcctttgggtgagtggctaagtaagttaacaagtacaaacaacagaaatgctttctttgaaaatgtgagacttcaataatagaatgtgagttagaatagcaatctaattttataattggaagaattctttttttttttttttgagatgaagtctcactttgtcacccgagttggagtgcagtggtgtgatctcggctcactgcaacctctgcttcccggattcaaatgattctctgcctcagccgcccgagtagctgggattacaggtgcccaccaccacacccggctaatttttgtatttttactagagacggggtttcaccatgttgaccgggctgttcttgaactcctgacctcatgatccacccgccttggcctcccaaagtgctgggattacaggcatgaggtacagtgcccggctcattgcagtgtttcgattgaaattttgctggcagagcgcggtggctcacgcctgtattcccagcactttgggaggccgagacgggcggatcacgaggtcagcagatcgagagcatcctggctaacgcggtgaaaccccgtctctaataaaaatacaaaaaaaattagctgggtgtggtggcaggtgcctgtagtcccagctacttgggaggctgaggcaggagaatggcgtgaacccgggaggcagagcttgcagtgagccgagaccatgccactgcactccagcctgggcgacagagcgagactccatctcaaaaaaaaaaaaagcgcctcttaatagaaggtaataggaataacagccatccatattacaactgctgcctctttcccattgtcagaaaaataataaatacaaaattagctggctgtggtggcaggcgcctgtaatcccagctactccggaggctgaggcaggataatcttgaacctgaggcttgaacctgggaggcggaggttgcggtcagcccagatggcgtcattgaactccagcctgggcaacaagagtgaaactctcatctcaaaaaaaagaaaacacaaacaaacaaacaaacaaaaaaacccctcttgatcctttctttccttgttctctaatcataggttctttttcctaaaagtgcttttgcaatcgggtgaaatgtgtgaccccttcttaaaatatttccaaatacttttttaagtaaaatacccaggattacagaggggacccatgacattgaaatatagccatcaaaatgataaagaacaaatttgtgatatggtaatatgtttctttgtcctttgttgaataacaagtcctcatagtgggtctaattattgtaattttaaaataatgatgttatttcaagataatctgcaaccactgtaaatcagtataagagtatttgcaattttttgtgttgataccaaactcacacagaattacatttttggtgtgtggcgtatattcaaaatataagggaatgttacatttcagcaagagattggtgaaagtgaatatgggactgtttccctattcaagttcacagacttcagaacctctgagaatctcttttccttcttcctgcagttgctgcctttgtctggagctatcccactgttgtcaggggagtcttaccttggccttagcttcggtgtcatttcctcgaggagacatgtctaggttaggagcccatgttaaacatgcccatagctgcaccctctactcatttcagcactttgaatcatggacatttatgaaaagcattgtataatacccacttccccatttgtgagctctgtgagctttcggggtgtggtgactgtttctgccccatttaccgttgatctgccagtacctagcacagtgtcacaggcagcctttgaatacttgtatcttggatgacacaaatagcagttgaggcagatggaacaaagcttgtgagaaaagctcaggaggtgtgacagtcccaaagagtgaccaccacggcaaaggggaaggcacattggtggtatggtggcatattaggccattcttggattgctctaaggaatacctcagattgggtaatttataaagaaaagaggtttaattggctcttagtttgcaggctgtacacaaaacatggctgcttagcttctggggaagcctctgggagtttttgctcatggcagaaggtgggaggggtgggagcaggcacctcacatggtcaggaggtgggggttgggggagaaaaggggagatgccacacaatttttaaacacccagatatcacaagaactctcattcacgattgctaggacagcaccaagccatgagggatccacccctatgacccagacacttcctgccaggccctgtcccccaacactggacattacatttcaacatgaaatttgagtggggacaaatatctgaactatatcaagcgagtgcccaacgttattacttgtttgtctgaatctttgcagtggaatataagatccacaagggtgggattttatatgttagctgtttatagtttatatgaagatagtctgattgtttctcagtggctcacacatagtaagtggccagtatgtttcacatgtattatatcagtgtgtactttattcaggcctcagcttgatcctttgcaaaaatgagggagttccctcctaagacccctttgagcttctattgaagtctttttcttctctctacagttaaaggagatcttattgtagggcataactaggccctgtggggttacaatggtgaatcttacttggattttgcctcctggcgaggtgaagaagggtctacccttaaagcagctagtaagctctggtacccaagccggagatgagtcagcttctctcgttagtgagcagtggatagtggagctcagactgagggactgggggcaaggagcaggggtggttgtccaagccacggagggaggagaagtgtcaccactggggacagcacagacaaatgaatgatcttgattggggttggtgaaaccccgttaacagttaatccaacgaggtggcacttgagctggggcttgaagaagtgaatatgatttcctccagcagaagggtaagtccaagggaagcatcgagggacacaagaataatgaagagtcagcaccataaggcagggcgagagcaaaataaataaataaaaaagaataatgaaaaatagttaagaatggtgcatgcagaacactgtcagcagtagtctggtgtccttcttttgtgggtaactgtctaaaaagaaaatcttttattttgttacataaagccaattcttctattttttaaatcgtttgttactattatattaaaatagagacaggtcttgctgtgttgcccaggctggtctcaaactcctgggctcaagcaatcctcccgcttcggcctcttaaagtgctgggattacaggcatgagccactgcccagccccttcttactctttaaattgtaaaaaaaaaaaaccatgttttaaggccgggcgcagtgagtcacatctgtaatcccagcactttgggaggatgaggtgggtcacttgaggtcaggagtttgagaccagctttgtcaacaaggtaaaaccctgtctctactaaaaatacacacgggcgtggtggtgtattcctgtaatcccagctgttcaggaggctgaggcaggagaatcacttgaacccaggaggcggaggttgcagtaagctgagatggtgccactgcactccagcctgggtgagagagtgagactctgtctcaaaaaaacaaaaataaaaaacatgatataattgggacaagaagcactgtgtattgcacttggcaaaattgtggaatgtacaagtcactaaaccacttgtcttcatggaaagaaggagggagaagattttaaatttttctcagacaaattagtgagcttctattgctgtataattgacagtcaaatgcacccatttcaagcatacagttttgttaattatacatatctatgtaatcaccacccaattgaaatagagaatattttcattactccaaatgtgtttcctcatcccctcccagccactgttttgatatctgtcactatagcttgtccattattttcagcataatggtctcagattattcatgttgttgtatttatcagttcatttcatttcattgccaaataatacttcatcgtatggacataccacaatttattgatgtgctggctgataaactttagattgtttcccatttttggctgttattgctgtgaacattagtgttcaagactctttgtagtcatgttttcctttcttgtgggtaaatacttaggtgtgtaattgctgggccataaagtagtctgtgttgaggattataagaaactgccacacttctccaatgtccttgaaccattttgcaagtgttccagttgttccacatccttgacagcttggtattgtcagcctgactgctttctgtacacagtttgtagggttagtatttggccagaatcaatctcatgtgatgaagggttgctgaatagtttttggatgtttttttcccccccaagacagtgccttgcgctgtcacccaggctggagtgcagtggcacaatcttggctcactgcaagctccacctcccgggttcatgccattctcctgcctcagcctcctgagtagctgggactacaggcgcccaccgccacgcccagttaattttttttgtatttttagtagagatgaggtttcaccatgttagccaggatggtctcgatctgctgacctcgtgatccgcctgcctcggcctcccagagtgctgggattacaggcgtgaggcactgagcctggcctagtttttggatgtttaaaaatattttgaaaattcacgaggccaggtgctgtgtgtaagcccagccctttgggaggctgaggcagtgcgagatcatttgaactcaggagtttgagaccagcctggacaacatagcaaaactgtgtctccaccaaaaattaaaaaaaattaatcagccgtggcggtgcatgcttgtagtctcagttactcaggacgttgcggtgggagattgcttgagcccaggagttcaaggctgttgtgagccgtgattgcaccatttcattccagcctgggtaatagagcgagaccctgtctcaaaaaaataaaaattcacatgagaagaagtgtatagttaatgaaaaccatcttggtgaatgtgtttatcatctcctcttagtttaaaaatgctcctttactcatcttcctgaagttatggacctaacaaaaaaatccctcacttttcacacatggtatagcttgctattacagtgaagtgaagttgttaggggcacaatctgttttcccctcctgttctcagtgacctaactaatctggtttctcagcctgcgtcaggcttgaaggagcgcttaaatgaagaaggggagtttcttggatgagaggaggagccttggccctgcagtgaagggatgctgcagggatcctgctaggccagaatcgctgcattcaggagcagtgtgtgggatgcgcagccagacccttccagcccagtagtggtgggacaccgtctcttgcacggtgcctacatgcatattctaaaatgttgttttctctagaagtaacacagaaaccacagaaatggagaaaagaagttaatcccttgttccactaccccacacaaatgttgtaaatattttgctgtaatttttttatagttgttctttccttccattcaaatatttttgtactcctactgtatatacaatttttgtttttctatttttttactggacagtgtcatagcattttcttatgttattacatatgttccataataacaaattttttgaaacctctctcattgccatcttttctgaaacaaatgcccttcgatttaggtttcataatggatgttgtaggtctgtgtgattaggctttttttttgagtcttgctctgtcgcccaagctggaatgcagtggcgccatctcggctcactgcaagcttcgcctcccgggttcacgccattctcctgcctcagcctcccgagtagctgggaccacagacgcccgccacctcgcccggctaatttttttttttgtatttttagtagagacggggtttcactgtgttagccaggatggtttcgatctcctgacctcgtgatccgcccgcctcagcctcccaaagagctgggattacaggcgtgagacaccgcgcccagctgaagctttttatttgatttctgtgtcctttttttccataatagcaattttaacaggtatgtaattttctatacagtgaatgtacaactgcagttttctttaactattacacaatgtttaaagatttgtgttttcttaggatggattatcaaatatggaatctctgggtcaatggaaatagacatcttaaagtcttctgttgtattttgacaaatgatttgccagaaatgtaacactcctgagtcccggtgaggctcagagagcaccccagggcccactgtaacatttaaatattaaaaatggaaccagagctaattttagtttaagaaagtttaagttgtaatattatgtatttgtttatgttttgagacgagtctcactcttgtcacccaggctggaatgcagtagcacaatcttggctcactgcaacctttgcttcccggggttaagtgatcgtccacttcagcatcctgagtggctggaaccattggtgtgcgccaccattcccagctaattttattttattttttgtagacacgagatcttcctatgttgtctaatctggtattgaactcttggcctcaggcgatcctcctgcctccaccttccaaattgctgagattacaagaggcatgagccaccatgcccagcctaagttgtaatatttttttagtttgaactaaaggcaggacacctttagaaagacttatgtgtaaatgcaactataaaaagttttacagggcaccagtgcctgcttgggaagttgatctttgtctgtctcttctctgtgtgagtaaagcattgtttgatccagtgcttgactttgccatgttcctgtgtgacgcttatgccaagttgcagtagtcaggacctctacttccaataataggcagcacctgccacttacagtatggtcagtgaactgagggatttgcacaggcccttattagcctggcgtggtggtgggcacctgtaatcccagctattggggaggctgtggcaggagaatagcttgaatccaggaagtggagcttgcggtgagctgagatggtgccactgccctccagcctgggtgatagagcaagattccatctcaacaaaaacccaaaaaacctgctagctctttgaagggacagatgaaggaattagtgggcagaatttttgaacggatgttgtaaatgtttgtgataaggccttgttaaatgtatttctatttatttagtaaacactgagttcttagaatttttcagaaggttgttcctagccagggagacaggtatacaaactgatcattggtattaggcagtgtcatacaggcagacttgacctctcttgacctcctaagaatggtccttgagactggatgcttccttaccagaagatgaagagtcctcacagcctgtgccggatttctcactttctgtgggaatgtgtctccctgtttcagaatcaatttgtgctcttttgttgttctgcttaagtgggtatgtcatagcatctggccaactcctctgctatatttgtcctctgaacacaaaagggttgcatgcaggccagtggcctggcattggctgccaggagggacctgctggtcacagggcaccaatgcctgctccggaagttgatctttctctatctcttttctgtgtgagtaaagcattgtttgatccagtgtttgacattgccattttcctttgtgactcctatgccaagttgcagtagtcaggacttctacttccaataataggcaacagctgccccttatagtatggtcagtgaagtgagggacttgcacagacccttttgaaagcttccaggaaaaggaaggccaaccactttaggttaggtgcaccccagagggaagggagtgccctttttttctttttttgagatggagtcttgctctgttgccaggctggctggagtgcaatggtgtgatcttggctcactgcagcctccacctcccgggttcaagcgattcttctgcctcagcctcccgagcagctgggactataggtgcgtgccagcacacccggctaattttttgtatttttagtagagatagggtttcaccgtgttagccaggatggtctcgatctcctggcctcgtgatccgcccaccttggcctcccaaagtgctgggattcaggcatgagccattgcagtgccttttaaaggatgagaagaaattaggtaacaggtcacaaggttagagaagcagagtgaaaacctgcttaccctagcaagtgaggaggagtgaaagtgcagggcccagtgcagtgttgtgtgtgcgtgtgcatcacatacagatttgctggagtggggaggttgatgcaggacatggaagggagatgaggctggagaggtagaacttgctctgtcgggagtcaagaaccaatgaattgtagaaccaatacattgtacacttaaagctggggtggcgcgtatccctgatgtcgtgtgactttagtgtgagggcctcaacccaagttttgcatatagtgagtgatacaagggaaggactttgtctcctggaagatatctgggaacttgggacagagcaggcatcctggagcagaagctgttttaggaagagagtgtaatgaattgagataactttttcttttttggtggattaataatttcttgaaaaaggaaacctataaatccaaattcaagaatttagataacctgagagcgattagaaactgcctagcaaggtctttgcctggtatagaaccatcttattacttcatgcagaccatttgtgtgaccagatgtgtcatttcttttttttttctttcttttttttttttttttttgagacggagtcttgctctgtcgcccaggctggagtgcagtgacgccatcttggctcactgcaagctccgcttcctgggttcacgccattctcctgcctcagcctcccaagtagctgggactacaggcgcccgccaacacgcccggctaattttttgtatttttagtagagacgggatttcaccgtgttagccaggatggtcttgatctcctgacctcgtgatccgcctgcctcagcctctgaaagtgctgggattacagacgtgagccactgctcctgtcatttctaatagtaattagaagttaatttatataggtaataagatttgtggagtaaagcattttagggccatttcaacggaaaacagtggttcagcattggcataggtgctctgtgatgtaatggaaagaatactgcatttattgttggaagtcttgattggaaggagattgctgtatgatgaagaccggtttcagaaatacatgtttcaatactgaataggccctttgccacttagggttatttatttatttatttatttttgagacggagtctcgctctgtcacctaagctgcagtagagtggcacaacctcggtttactgcaacctctgcctcctgagttcaagtgattcttctgcctcagccttctaagtagctgggactacaggtgtgcgccaccatgcacagctaagttttgtattttagtagagatggggcatcaccatattggccaggctggtctcgaactcctgacctcatgatccaccctccttggcctcccaatgtgcggggattacaggcctgagccactgtgcctggcagggttttatacttaaaaaccattttatacctcacgcagagaaagaccaaggactacacctgtccagccatttcgtaaggctagactctcgtgcacaaaagtatttcggtaattttttcaacctcctttattttgtgatcttgcttcttctcaacccagaaaagatgtttccctttaaaaatagtcaaaatcaaacaccagtgccttggtcagtaacattttttacttctttgaagtaaatgctattgtttttttattcttggcataattcctagcctaagttgctgcacttgggcatttgtagcgtgcattctaatagaatcattttgggagtatttgaacgttgtgctagagaagactgcagcagcaaatcaatataacacgatattctctgcatctctcagagctcctggtggcatttatcttccttcatacttttttatttgttcttacttagtttgtggttatgttttacgagtggttttttaatgaaaagttgcaaaacctagtacaaagattttcccaaatgttaaccatagcatatttgtgtgacagtattctctctcccttatccctccccatcatcctccccgcaacacatagtttttataattctgaaccatttgagaatatgttgcaaatataatatccccttatcaccaaatacttcagtgtctatttcctaaaattaaggatattttgttcccaagccatagttaacaatgaggacactaatactgggaggccttaaagctgctacccgtgtccctgtaacatgtccccatcgtcctctgagctcttacttcctgacagacacattaaggtgttgtaggctcatcttgggtgttcccagccccctgtcttgatcactttatggtttttgatgctgttgtaaaggttttgtttcttaaatttcattttccattttggtttccactgcagtattcatagcacctcagggctggccctgtggccttatcttggcttcctgcttacatcctgtgactgtctccatcctcagagtgtcccctcctagtttgagtaactgcagtgaatctgagaagtcctgcagtctttccagtctgtccttgtcatctaaaacatctccataggtgtcgtgacaaccagatgtttgtaggtatttctttttagttgtcattcattgactgcttatctggttattattattttttaaattataatttttttgagaaggagtctcactctgttgcccaggctggagtgcagtggtgtgatcttggctcactgcaactaccacctcctgggttcgagcagttctctgcctcagcctcccgagtagctgggattataggcgccgccaccacgcctggctagtttttgtattttttagtagagacggggttttatcgtcttggccaggctggtcttgaactcctgacctcatgatctacccgcctcggcctgggattacaagcatgagccaccgcccggcctggttgtgtttttataagtcagggtcctttcccagacctccacatacagcactcttttttttttttttaaactaaaagtgtttttttgtatggatgggatctcgctgtgttacccaggctagtcttgaactcctggcctcaagcagtcctcctgcctcagcctcccaaagcactgggatttacaggcatgagccaccgtgcttggccagcaactagcttgttaaggatgtttggcccctactcagtggggttggtaagctcacctcatcctttcctttacaggatctgtggcaaatcctagccccctttgaatccttttcagacttcgtttcccacaacactcctgtcagagttagcaggagagtggaaacaagtactagattatttagtagaccctagattttctctacaaatgtaaaatgttatttttactgttgaaaatcagcatatgtgtagtacagaaaatttaggaagtggaaaaagaaaaaaaaaagactgggaaactacaacattcttaatgccctcttatatttattcaatgaaatctatgcacaagtagatctaagacaattgagtcaggtttaaaatgtagtatgttttcctttcctcttcttaggagctctttagcagaaacatagtagccaagacattttagggagcttacccaactttttcttgatatgtagcaatagaaaatggtgtaatcagaatgcagtcaaaattgcatttgaattgtagtttaagtcatttctttttatttgattaatttgctttattaagtatcttctggattccgctctcctatgcttgcaaaatagtaaaagagaacaaattagaaagagaagaaaatattttcgcgagaaatgactgctagttttcattagcagttgttagtgcaatgacagttctgataaggttcccaagagcactcattgctacagtgagaactcagaattccatgggtatcttttcgggctcggtggttcacgcctgtaatcccagcactttgggaggcagaggcggatggattatctgaggtcaggagaccagcctggccaacatggtgaaaccccgcctctaggaaaaatacaaaaattagctgggtgtggtggtgcatgcctctagtcccagctacccgggaggctgaggcaggagaattgcttgaacccaggaggcagaggttgcagtgagctgagatcatgccactgcattccagcctgggcaacagagtgagactccatctcaaaaaaaaaaaaaaagaaaaaatttccttgagtttcttatgttttgttaactttctgttatttgtacggttgaaacctcagaggattaggataattgccttttccagtttccctgagctgctgaaaataaactttcatatttttactctccatactcagtatagtttacatctttaaaagtgaacatttatacatgtattacttacaaaaacactcccttctctcagtaaagacccaaatcaatccactagcaaactagaacaagagaagttagtgctgggtatccttaaatgtgttctgagaatgattttatttgcgggggtggggggcgggtggagcagagaggatgctttggtggtgaaataattttggggtgcttgggttctaagaggatcatggtgtacacgaacacatctgaaggaaagaaacctggctatctgtacccgacatttgtcaaacttcactgacccgtgagccttaattttgaatacaaccccttggacatagggttctctggagcctcctttgagaaggaccaaagtcttgtaaagaacgttgagtgtagtttttgtccctgctgccaccacctaatttgtaaggatgagggcatcagtaggtagcttgtaatcttcattgggttctcaaattttaggtgtgtgtacaacagaggtgtgtttggtagaggaagggatgactgggatcatgagttaaggtcttgcatactgaggtggtggggcagtttcagagggaaccaaaacatttgttgagtcccagcttttcatcaggactcctgtgctttgtgtcagaaatagatgccatccctttttctgtaggaaggaatttatagtttggagaaggtagagttggatttggaacctcagttggcctgcgttgagaactgctggtttcctgctcagttaggccagttagggggaaataagaagactgccaaaacctgtggcttgtgtctcagttccctttctccagccactgcaccagagtttgggcgccacacagatggttctcagtggcagttcgcagagcggtcctcatttggccggaagctactcaggcagcctctgtttcctcacttcagcggggtgggcttgggtgtgggtgaaagagataagatatttagcagtgagtcatttttttctggtagtttgacctggttgctttgaggatgattgcttcatcctttctcgtactttacccactgtcccttaggaaaatgggggtcctgtccggccagtgttgttggtatctcaggccctgtggatgtgggattctgcatatctcttgaactgcctgtttcctcccaacctccaaaaggttataatgtccccattcttctatgagtgaccaacatggaatgccatgtatgctcaaaatatgatttctcattggcccagtgtttgtaagaagaaacctctgatttagggtgtgcttctttatctcctgcatttggggttgggataggcagaaatctgttggaaaaattttccgcagtgaaggttggatgggtgttctgtcctgtttttaattctttgaccacaggaccttttctcttgtaaacacttaaaaacctctaaggctaatgagcaaagcctggtgtgatgtatattttaaggaaaggtgtataacaatacatgtgtacaaggagggaagcggagaagggcctgggagtagaagggatcattcccctgcaattggataagtgacatttaagctgcattccatgtaagcttttgggcctggaaaccttcccctcccatcttcctgagatactgtgcttgttgtgagctcattcagagtaataaactgtacccgtaattcatgagcttgcaaggccttctttaaccgcttgcagccaggagactaatgacaacatttaaaattatagattgctcattttggagtctatctgtttcgagttatgaatgaaatttcttagccacttactggacagtagaacctgtttgcaaagacccagtgtcctcatgttgtgtgtgtgtgtgtgtgtgtgtgtgtgtgtgtgtgtgtgtgtgtgtgagagagagagagagagagacagagaggaggggtggagaaagggagcaagcagtcccccctttatgtatgattcttagaggtgttacaggatgcagtaaccatgaggactctggtgttgcacagaagttgaattcttacttggaaagtttaggtctgggacggaagggtgacagaaaaaggttaaggttacccacactctatcagtggtagttatcaatgagtgactgttggtagacagcaagcaaatgatactggggtaagaaggttctggatatgaaagaactaggtaagattgcaaatgtagtctctctataaaccagatactcaaaagcaaatgtttaaagcagcgtataagtaactgggttgtccataactatttcagaaatggctacaattactcaaatcccaggtctttaaaaattccaaaggaacagcaagggccacataaagaggaaaatctgcaaaatggtagggtggtacctgagttagcaaatgggaacttgagctcttctttactataaaatttttttcttttttcacagagtgccgagagtattagcagacctttaatgcatttggaagtgacaccatattaatcatgtggatttcactttctgtcatgagttctatacattttggcttgaaatcagtcatcagtgtgatattcagaggtttactacatctcattcatacctttattttttttctagccctctcacccgggtttcatctgagtgactagaagtggcgtttatttattgactgtggaggttaacttacactgatggatgattgcagtccattttccactaagcgagtattacatgaaatgagtattgttgaccacattttattttctcttgtggaattaactcaatagtctgtaagtccttaaaagtagtttttgtggggtaagtctcttccttttcccatagtgatttgataggaagactgagtgaaaaacaatagttgtcttgtatatttgaaacgtaaggaaaattatgtggatactcaagcattaaattcaaatcagtaaatggggctgccctctttggtatgttggtaaacatgttttattattagcttgagaaggaaatgcctggtatagtgactaagactgtaatagggaaagagaactacttttctggagcagtaaaagttttgactaatatagatgatcagtgtttgtgaattttacgttggtatgtgtttttggtcattggtaacttaacagaaaagtatatgtcaagagaaagaatagtttatagctctttggacataggagggaaacgtgataccttttcatctttctgaatgaaagatgatgattcctgatctcaagtcttcattttacaggtattttaccattattaccaacatgttacttgaagagtaatgaagaggccgggtgcagtggctcatgcctgtaatcccagcactttgggaggccgaggtgggcagatcacctaaggtcaggagttcgagaccagcctggccaacgtgctgaaaccccatctctactaaaaatacaaaaattagttgggcgtggtggcgtgcgcctgtaatcccagcgactcaggaggctgagacaggagaatcgcctgaacctgggaagcggagttgcagtgagctgagattgcgccactgcactccatcctgggcaacagagcgagactctgtcttgggaaaaaaaaaagagtaaggaagagaaagctttccattgttgacttagtagttcaaagcctaatggtgtttttgccttgataatcaggaagatttattcctatgctttatattgattgtggtcactgtactttcttttacatgttttcttactttgctagatttgttaatttttacggtgacccacttttagttaagtgagaatttctttctaaatcaggctgtccattgcctaggatagccaaccttaaggcaaaggataacatataacctcattttgtatctgtttattgtgatcacaggttatttggtggttatttattttttatttattttttgagatggagtcttgctatgtcgcccaggctggagtgcaatggcgtgatcttggctcactgcaacctccgcctcctgggttcaagcgattcttctgccgcagcctcccaagcagctgggattataggcacctgccaccatgcccagctaatttttgtattttttagtagagactgggtttcaggttggtttcgaactcctgacctcaggtgatccacccacctcggcctcccaaagtgctgggattataggcatcagcgactgcacctggcccaggtggttatttttcaaagtgagcaatggttattaagttaaatgacacaggattttgagtaaattcgaagttatgccaggaattataatcctaattgataatttataaaggtagcctacagaattttaggtcttactgtgacaaactagtagcaactggttcctcgaccagctttctggtggaatgtgtgatgatgatgtaaggcattcatcctataggtagcgcacctcgaacttgaacattcataggcatcacctggggatcttgttgaaatgttgcacattctggggttcattctgtttcaggcagggcctgagggtgtgcctttcagataagctcccaagtatgctactgctttgccttgagtagcaaggctatgggcagtaatcctgcacgggcagtgtggctggccagaggcttattgcctctcatgcaaagccacttaactcctggccttccctctttggtgggtgctttttaagccttagggcttctttaaagtccaacatttttgttcataggctttctatacatttattggaagcactgtttaatatgcttctcacctctttgcccagccaaataatacccaatgtgagaagagttgctcctcctttgttattatttcaacaatgtgattaaacaatttgggaatgctttgaatactgacctccgctcccaaggacaaaacccaaactcaatcactattaaacaaaacaagcttgttgaacaaggaaatagaagttttcaacaatttgacagtggtatttcaggtgcagaggttactgtttgtattattagtgtaaggtgccttctttttagttcacctgggcgaatcctggctgcaagtttaataatcggtaatcttgaaaccagcattaaacccagggcataatttagtggttgggagcactgggttgagacctcaacaacagtgataattcgtttaagctgtgtgactctaggcacgttgcttatgttctctgggcctctgtttcttcagctgagagataatcacagtctcaaccttggtctgggttgctgtggggattaaaggaggtaataaatgtcaactgctgtaaacagtcctagagtaagtgcaggtgatagtggctactcccgctaataaccagccttgataaccagctgagggcgcagggctcaggagcctcaggatcagctgcccatctcgctgcgcagcctcagttgtcccagcctccttttgctccttttcctccctcctggagctggtggtagagaatggacataatttgctgatccccccccccccccccgcccacccactgtaacttggttagttaaacctgcactttttggtaaaatctggagaggtgataatttattcactttttttagaggactctaaagccagaggattctaagcctccaggccacctctcccagtccgtccaagttgcagacaccagagagcagccagctcatggttacagtccttctctgaagcagccagacaatcatcggaaggcccttcacagactcccatatctagatgagtgatgctttacttttgacctttgtagcatggcctttccccctctaaccctttaatcatctctttaaaaaaatcaatcaacaaatatttattgaacgtttccttgtaggctttaaaatccacccataggctgctctgtgactcttaaggatttctgccctgcatccagagagaatgcagtagctctggccaatttacttagtatctgctttcttagattatgagcattttctgtttttcctgggagtccatgggtgtgtccagtgctggcagggggcaccatcaggttgcaaggttgaggtggtgcatcttatctgcttggtgaggtgcagggaggggtggagcagctgttttcagcatgtgtttcgctctctttattggccctttcagctgactgctttttacaaccagttatgatggaacatttaagacttgttttggggtcaccacaaccaagttttctcttctcactgattggcaggaggggtgcccactgggagccagcacaagtctgggattttttggttggacagggtttcttgcctgcagtttccagctggtaaatgagcctgggcttgaggaagttgtcaaaggccttccatcttttaaatcttggccatgtagctggtattgttgaagaaaacgtgaagaaggattttaagaaatggccattgaagattgatgttggccggtcatcctgcacactgtccctcctttatgtagcgtaatgcaggatttcttattcagagagcaactccgctgtgggcctaccccaggagaaaagggtgcagggagggtgctggctctggctaattctgtcactccactttggagaggggaaaagcctcctgagcagctgaatgcctttggttgtttccagttttcgccacgctaaatttcattccccatcctcctcctcttgccctacaacatagcttagcttagagttaaaattggtttcattctttagtgctgtttctttctcttcttgtttgcatttgtggatgagtttagattcaaactagaatgtggttctgatgtgtgagtaaaagcacctcattttcccctaaccacagcctcatcactgggtacttggcagaagcagacaccattgttgactgaaaataaatggagttcaaggggtcttcagggttcttggccttgattcctccccacccccatctctttggagcacccctccaatatctaattgttaacattctgtgtgtgagagatgtattatgtattaactgtttaaataaagtcctgtgaattccttggacagtgtattatgaatttacaagggagttcactatatctttaggtatttgtgttatatgcattatcttacccattaatacattattctgaacttttgtaaggaaatagttttctactattcatctgtggttttggttacagtttttaaaatgcagagacaaatttcagttccatttctggtggcccacttgtgggaccaaatctatctttctaaacgtcagatttttagaagctctaccagcaatcctcgaggcttacagttttcccgggtttctgttggcaagtaacttcagcttttcgtactttgagatcacaagtggcagacgctcttaagtgcgtcacagttaggttgttaagatttgagggggacaatctcctttggtgtcgagttcatcatccacagcagtaggaacaacaaaaactcaagaattccttccccctgcagtgagccagccagcctcttttctcattaacaacatagtcatatttcttttttttttttttttttttttgagacggagttttgctcttgttgcccagggtggagtgcaatggcacaatctcagctcactgcaacctctgcctcctgggttcaagcgattctcctgcctcagcctcccgagtagctgggattacaaacgcctgccacacgcccagctaatttttgtatttttagttagtagagacagggtctcaccatgttggccaggatggtcttgaactcctgacctcaggtgatccgcccgcctcggcctcccaaagtactgggattacaggcgtgagtcaccgtgcctggcccaacacagtcacatttcataaggatcatactgtttatttagtccacattctggggaaaggggaaaaataccatcttccttaaacttaatttttaggtacttaaaaattttttttgacttttgttaaaacctaggagtaaaacacaaggggcaagtggagtgaaggaaaatggaaggtggggaaataggcagcttattttttttcctgaccttacccattgtactttgaagttaatatatatattttatattaattatattattatatataatcaattatattaatgtatattatatatatatttttaacattaaaaaatttagactgggcgtggtggctcatgcctgtaatcccagcactttgggaggccgaggtaggcggatcacaaggttaggagtttgaaaccaacctggccaacacagtgaaacctgtctctactaaaggtacacaaaaaatgagctgggcgtggtggcaggcgcctgtagtcccagctactcaggaggctgaggcgggagaatcgcctgaaccccggaggtggaggttgcagtgagccgagacagttccactgcactccagtctgggctacagagtgagactgtgtctcaaagaagaagaaaacattttttcctgttgcccagactggagtgcagtggcgctcactgcagcctctgcacccccggattcaggtgattctcctgcctcagcctccctaggagctgggatcacaggcatacggcaccattttcggctaagttttgtatttttagtagagatggggttttgccatgttgcccaggctggtctcagacgacatcaggtgatcttcctgcctgtgactcccaaagttctgggattacaggcgtgatcccagttttgttttgtttttagtacattgcaattaatgtttacattcaaactttaaaattccttggatctttgttttcgggatggggttgtggttcttctcccccaccagaaaaatgtgatttagctgcctcatttttggtatttttcttctctgatgacttacctctattgaaaactttgtagtctgtggggagaaattttgtatgtttctgtacttcagctactaggttctccctttacttatgtgattagtttaatttaagatttattactaggagctcatgagaaatatgttcattgcccaaatttgctaggatagcagagcctagtttcatctaatttgcagagttcattctcatgcataattcatcggtccaagaaatacagactcccagccagcgtagcttaaaacttaatgattttctcaggagccagtcaggtgtcaactaaaacaagcacttgataagctatagaccctgacatggttttgttctgctcaaaactttcgagtttccattctaatcttgatgcacagaatggttggtaacggttcttcctccttaaatttttctggttttctgaaagggtgcagggaataccctcaccccttagcagcttctagtcctcttccttaatcctttacctgttttctcattattatactagtgaattttgtttaattcctttgtgctggtttggaacaagtgccatgttaaatatcatttctatgatggagtgcattctaggttttaaactgcaggtttataaatgaacttttagaaggtgggcgatttgaaagtgattctgtgtggaaatagaagccagaggggccagattcaaaggccatctggatctggagcctcatttattgtcaccaagaactggatgtttgtgctgtttgtcatttccctcaactcagcctctctaaggataatggcttttcacagaagcctaaatgtaatgctttcttcattcccttacttccctttaaaatcttgcatataaacattgatagaaatccagaaagagagagtcctgttttctcccctgtggttaaatagtgacggttgatctactgaataccttccttccttaaaaacaacgagattaggtaattacagcaaatgtggtcattagcctcatctgctcttattatcttattatgtatttgttactgtgagagccaaaagatgtgaggataagccagactctccctactttgaaaagacaggaattgtaaaaacacgtggtcactaatggaatctgcagtttgatccaccatgacttttgcttactggtgaaattggttttcttatattttgtcaacagtaaataggctgtgtgcttggataatagttaggctaatataggaaaatttaatcatggcttttctcaagtttaatttgaaagagtgcagtggggaagtcccctgcagggtggaaatcgtagtagttgaacatgagtgacctttttggttgactgactgcccttcctgtgaagctggcccaatatctttcccctgtcaggattacttcctgtctcagcctgaatagtttaagtagctgcaagattgatgttggatatctctgggaaaattccattctcttgaatttagctgacagagtacctctttcatttctttcattgtgttccatttttgacctcggaaggaactaaacattatttctcatccaacagactcattgttcatcatctttgggcttaaaaatcctgtgttccctcagttatttcttttatgaaggtttcaggtgcctcattattctctatgtggagactgtgttagtgtctttaaaaatcgacattccatgttttaagcatctagtatacattataagtagtgtgatattttgcatccatttcactcagccaccctgcttctaggaatttggccacaaggatgtgtagtaagtattttactgtgtatcccagtgaaaaatggaaaccaataggggattggttaaattatggaacgtctgttccgtgcagtcattaaaatgaaatggtagcaagaatgttgactgacataaaataagtgaaaaaagcaagtgagaaaacagtatttacagtttaatttttttgtcttatcttggaaaatttagtaaatatatgtatacatataatatataaagcatacatatataaacgtgtgtgtgtgtgtgtatatatatatatgtatgctttgacaaatgaagtggtggtgtaggcacaggtgggaggggcaactaatccacactgagggatgacagaaggcttgaaggacagggattagccaggtgaagatgggattggccagtagtgtgttccaaagtgaaagtggaaagcccagaggtgagaagtggcttggaagagtttaggaagagggatggatgctcaggagataaggcttatctatattttctccaggaaacgtgtattactctgtaataaacaaaaaaaatggtacctagaaagcttcttcttccaaagaagaaagtcaaggaagcagcaggaaaacagattgctttgttgctttaaggctgtggattttggactcttaatgagattaaggccagggaggctttcccaggttggctggatgggctggggctgggtgtctctggtgaaacagatgaattccagataggtaatttaatttccagaggtgccgcacaaatgcctttgcctcctgctactggttagagcaaaacaagcatgtgatttatgtaaaaatacatgaatattagtttttatcaaaaccctgcagaagaaaaacagtagaaaaaatgatacttcctgccatagcctctttgtggaatgaaattaagaaaatcaatattctttacaaatgactagtcacagtggaactggtctgttgaacctaccctttgtagatagcattaatacatcaccctctcccacattactccaaccataacagaaatagtgatttacataggaaaatgcgagctgaattaaacaaggatggccctgaattctgctgtagggattcttaagatggcacaagctaggctgtgaatgccttggcctcccctcttctcccctgtttctgggtcatgctcccctctggatttcttgctgggtagttctggagggaaggggatgcccttctacataagcatctgcaggtgcagagatgggatgggcctaagtgttctgagatcttccaggagatgggatttcaatctccagaattcccatccccgcttggctctttggtggcccagttctggaagttgagatttagaccaagattatagtcttaaaataaatcttggatgtgactcctgccaggatgacttgtaaataatttcgtgccagaaaccgagctgactttggtttgtgggctggaggtggctgattccaactctgggaattcattctaatttttggtgccctgttcaccctgagttgtcttctcacggctgcctgcccagtccctgtgtgggaatgggaaccgtcatagagtgaatatgaggacttcacatcctttgggatgcgggtattttagttccagggctaacatggcacgttggcagtgagatagttgctataataattctctaataagctgttggtctcagagacccttccgcgtggcgtatcaatggggcttgtgacagtaggagttgggatcttagaggattcatatcacccttgctcctaatccagtaacccctagcagtgcccatcaccagcctcacaccaccttgtaccagtcttgggcatggtgagtctctctggtacacttttacattagaaaaagtctgaagaggctgggcacggtggctcatgcctgtaatcccaaaactttgggaggccaaggcgggctgattacctgtggttgggagttcgagactagcctgaccaacatggagaaaccccatctctactaaaaatacaaaattagccaggcatggtggcgcatgcctgtaatcccagctacatgggaaggctgaggcaggagaatcgcttgaacctgggaggcggagtttgcggtgagccgagatcgcgccattgtactccagcctgggcaacaagagcgaaactccgtctcaagaaagaaagaaaaagaaaaagtctgaagacttgtgagcaagccttttctctcccataggtaaatattcgatctgcctttctgcacaatacaaaagcaaagtccttaacacaagccacagatggcactctgattcggcttgcaaaaaaggtaactgtttttttttttcttttttcttgtaatattttccttaaaaaatttttttcctcttaataccctaagccccaaaagggagtttgtattgtaaaatattctttaataagtcacttttaactacgtgaaactgggggaaattttccacatttggaccaggtccctggattgtattgccagaggtgtggcttttggcattaacttttatttaatttggatggctactttctagagaaatcaatttaacctaaaaaattgtcatagctcattctacatatgcacccctactgttctagatttaaaaaacaaaaacaaaagctttctaagtcagttttgattttgagacggagtcttgccctgtcacccaggctggagtgcagtggtgcgatcttggctcactgcagccttcacctcccaggttcaagcagttcccttcctcagcctcccaattagctgggattacaggcgtttgccaccacgcctggctaatttttgtatttttagtagagacagggtttcactgtcttggccaggctgggctcgaactcctgacctcgtgatccacccgcctcggcctcccaaagtgctggggttacaggcgtgagccaccatgcccggcctcagtttggatttttaaaaaaccaatcttattgaagtaaaatttatacatgcagccatttcaggtgtacactgtgataacttatgacaactgcacacatctgggtattaccatcccatcaatatatgcacctcctgtcacccgagaaagctcccttgtgctcctgtcctgtgcccccatgccagcgccgacctgccttcttgcactgtagattagctttgcctgttgtaaatgccatatagatggaagcacttttgtgtctacatcccttcactttgctttgagattcatccaggctgtgtgtatggtttgttccttcctgttatggttcagtagtctcctctctttctgtctttctgtgttcttcctgtgactcactcattgtctgtgtttctttttttccctgtaagcctggcctggtcctttcgtgattccctgtagtctttttctcaagtgggcattaaagcaaccttatctttcacacacactgaaagaacctagtaactgagagatgatccagccagattctgcccttacctttacccctcaccaccccactaggggacaaaacaagcaaatatactgactgacccaagccttgttgttccgacgaaaacactggagttcagcatctttcccgcaaaccgagctgcagcctccagtttcagaatagtgccttccataaaatctgtgggagttttccgtttatgttgcttgtttttaaacaatcttcttggaaaagaattcagtgctgttaatggattgccgtcggagctttttttacattacacctgtcctctgcttcctgatctccttttgatggttagggagaatatgttgacttagaatagcaaggagccatggcaccccaaggaaacaggaaaaatctcagttttcatggatgagaaagtcccattctattgtctgtgtgtgcctgagtatgtacactgtaacatctcatttttagttgtatgaagaaagcgctgtggctgagaaccagtgtttggaggttggggtagggtagcctgggttcatagtcactacatatcccagctccccaagccctaggaggtactgcacaagcagtacagacagggtcttgcatttgtgcctcttcactggtgacttcccattttgaagagtgccagcttttctgggaagtctgctgccaacactgagccgagccagggttgctgttcacatctaagcaggctgttggtgccgcggcagcatgctgtccttgagagcactgtggaatttgcagtgtgccgtacagattcagaaatggtgtatgtttcttgtggcattagtgttttgacttgcaaatctggaaaagaacaggaagtcttggtggaaacactctctggctgatgtatagaaacctgtggagttaactgcattttaagcaccaattattagaaaatgaatttcttcttacttggggagatttctttcagatcttaaatacatttgtcatctaaacctcttctcctaggggcagatgatccctgccttgggcctaggagagtagacattggtaattacctttggcctgtgtctccccaaatatccttataccttctgctggcccatggctgtctagaagccctcatggaggtgctgcttttgtttttatctcttcatttggggagaggatactgcatctggacccaaggcccaaggtgtcctgatgttgagtccttccaattctgggtagccatgaacagtgatgctgttcatagataaggtcaaagggacgggcttaaggttaagctcagttagtggatggcagaggctgtattcaaattaatcttgatccactctgcaggttgctgtggctcctgtttcccccactcctgtggtctcctgctgtgattctgtcaaattacccatttatttataacatttgccactacttcaaatactttgttatttatgtggttttggctttctctgctagaatataaagtaatacaataatttaaaaaaatgaagagcaagactctttttgttcttgaggtgaatcttcttgcttataaatttaccccaagcacctggaacagtgcctggcatgtggtacttaagtatttgttaaaataatgaataataagtaaacggcattttgaaagttgctgtcattcaaattatgatttgtggtgttagagttcttataggcagggcttagttttaataaatgacattgagagctagttataaatcatacattagacatagtttaatcagtttggtgcttgtgtatagaagcggacagaaccctggagatacagttgaggcctcttcagtgagaggagggaggaaacttgccttggaacagtgtcacagacaatccatggtacatagatgccagaggtagacactgtaggttagggaaggtttggggactgtgaaatgaatgggcagcaataattagtgaaatattataaattgcctttattactgttggtttcccgactgcttcagtaaaaccaaaaaatacgcacatacttagcctgatgtgtttagttggggttgccgttatagaaaagcctttcagaagatacagaagagtgatcctttcagcagcacatatactaaaattggaatgatacagagaagattagcatggcctgtatgcaagtatgacacagaaatttgtgaagcattccatatttttatgtattggaaaatcaggtttggattatgcagtttctaaaattgaagaatatttcatccttaccaatatgttttgaatagtattttgccttagaaataatttttacatactaaataatacgtatattaatgaagaacaaaaggaaacggaagagcaacgtgcttgtccaaaaattctccatgtgtataagtgaattgattctgccagaaagaagagtttagacatgtttttattgcaaacaacttccttcagatgccaggtagtagacaatctacaggactagggaggatgagagatgtccctttagaatgctgtttgaacccatgatggattaattacgaaggttgatgcccatctataccagctggctttccaagatttatttgacccgttgctttgtcttggagaactgcagtctctctcatatagctttgatctttactgtgggaatcatagtgcagtcagtacaccatagggtcaagtgctcagtctgccattttaacacagaaaacttacatatttagaagtagtcacgtatctagagtgtgactggactacctgaataattgagatgagatacggtcaaaaaagtgagatatcttcatctgcttcaggtggcttttaggctgcaaatccctagaagttgtggttgtccggaagttaccaaaataaatgagtggtgtttcgcccaattctgttttttcaagttctgtttcaagttctgttaaaattgttagcagaactgggaaagtgcgttaatgaagcaagcaagtcctgtagtgtgtgctaactgggcccagtgtgccgtccatacgttgagtacgttcattagtgatttcagacatgagtttctcagggctcccaaatttatggaagaagtaagtgatgacttccaaattctttgtcttcagattgatttaaagtgactgagggcataagctggaaccaagattagaaagaacacagtttacacgagtcctgcttccttttttttttcatcccgtgaatgttatcttcagtattttctcaactaatacgaaaagtaccactgaagtggggtctgctggcttgaaaacatgtgtgaaatacagattctatgggttttttttgacatggagtctcactcttgccaaggctggagtgcagtggcacgatctctgctcactgcaacctctgtctgccttccgggttcaagcgattctcctgcctcagcctccctagtagctgggactacaggcacacgtatttttagtagagacagggtttttgaactcctgaactcaagtggtctgtccacctcggccacccaaagtgttggcgttacggacatgagccaccatacccggccagattctatgcttctgtctcagattcagttgctaccctacagaggtggccagttaggagtgtttcataatgaagattatgtctttaatcattgtgaggtttgtggctgaggacagtagtccttatgcttgtgctggttagaagtaaagaaattttggactgttcttgctattttttttgagatggagtctctctctgtcgcccaggcaggagtgcattggtttgatctcagctcactgcaacctctgcctcccagattgctgggattacaggcacccaccaccatgcccagctaatttttatatttttagtagagacggggtttcaccatgttggccaggctggtcttgaacccctgacctcagatgatcctcctgcctttgcctcctgagtgctgggattacaggcaagagccagtgcacctggcccactgctattgtttttaacacagctttgaaagcagtatgatttggttaataggatggctacagccagacaccctgggtttgaatctcagctctctgtggaatgaccttgggcaagtcatttagccagcctgtgcttcaagttgcttgtgtaaaatggggataatagtacctttgttatagagttgctgtggggtttcaatgagtgtacttttggtctagaatgaatcttttgtagacagtcttgagtataatgggttgtgattttgtgcttcttgtcccatcagttatttataattagcaatggtactttgttgcatgtacttaatttgattttatctatttagcagtagaattttttttcatcagaaataatttcttcctgtccctctgtgaaatccccttgagaaaggggtaagaaatagctctgaggaccagttgaaaaataatcgatctgaaacacaacagacaatattaacatgtcagttttttctgttttgcaggaaaatgcaagtctcatttaggataatagtttgatttcctgaggtggttatggttatggttttgtgtaactgagagtcatttaaaggtgatgcataggtttgcaggtagaaatacagttttgtttgaaatctggggtgttcaaccgacattgtggtaagagtaatttcccccaaaactccctaggaaatttttaccttttacttcagtagacctggagtcttgcctcttgaactgaaagtgaggttgaacttcatccgtaaaggtgagttttccccaaaggtacctgaatgcttgccgtgtaactgatgggtccatagtccactgccagaaggtaccctcttgcgtctcggaggtgctggttctgaagtatcttttttgagttttagttggagtttctcttgttgagaattttgaatctcagaaaatgccatggctgcgtgggtgtttgttttagctccacacccttcatcttcagggtggatgcacccttgggtggcgttgcacacagctggcgcgtggagagccgatccctccagggtttgtttctttaataccagacccgctcccacaaaactggtgtatttaggcgtcccctcttctcctgtgtttgttgctggccagcagtgcctgcaagttccagcagatgaggtgaggatggacagtgaggtagaggctagtctgtttgcctgggttcactgaagttgctaggttttgagtttgctccagattagtgaatatatcagctgtgagaataagagtgattaaagcatggtggcgcatgcctgtagtcccagctactggggaggctgaggcaggagaatcacttgaaacctggaggcggaggttacagtgaatcgagaaccctgccactgcactgcagcctgggttacaagagcaaaactccgtttccaaaaaaaaaaagattaaacaaataggacttctccatttgtatttaaacttcaaagagaaagctgaactccaaggcccagctggaggacacgtggatccagccagcatgttagatgtaggcaattggagaaggacagggagacagcagtgaggtgcagggggatgaggcacatagttgtctacatgaaacaggcagatctttgttttcgtatacctagaatagtttccatgtccagcaagaacttccaggtttttgttgttttttgtttatgctttggtggtggtggtggttgctaccacctggagaaaagctgcctttgcagccccacaactgtgcagttgctgtgagtgagcaggctgggaaccacatgctcttgttctgacattcactggaggcacccccctcccctttccttacaaggcatctcagaggattgtcatttgaggcaggccggattcactggtgtgactgtttcaggactggcttgtctcattaaaaaacattttttggatcagaaacaatgaggggtgggaaaggcaacaaaagcctcttgagattcccggattgctcaggatgttataaacagtaagtgctgcttttgatcttggagggtggtgtggggtaggcgagaaagggggtggtggttattgggaagagggctggagccagacagccataatggcttgtccaaaggctgctgtgaatcccagtggcaaagagctctgcacttcccgctaatttctgttttctttactgtggctggctttattaaaaggacataaggaagcagcctagacattcagtccaatcagttttctagggtagcagatgaaaaataaaattgggccttttgtatttacagagaaagtaagtagggtggctagcttttatggcttattcactttcttgcagggagagaggatgctgtctgtctgtctctcatatgtatataacatgcttggaatgctataagttatcaaagattcattagatgagcacagatctttcattctgtcttgaaacatggcaaggtttgaagttggtggaccaatgagaagctgtgctgccttgaacaataattttaaaagagttgctctgacagcatatcttttgtaactttttcctctctgtggttctgcagtagccattttgtgtctgagtgacatggaatttctgtgttgcttttttcttttttttggagacagagtttccctcaagccagttgcccaggatggagtccagtggtgtgatctcagctcattgcaacctctgcctcccgtgttcaagcgattcttgtgccccagtctcctgagtagctgggagcacaagtgtgcgcaactgtgccctgccaatttttttgtgtatgtgtttttagtagagacggggtttcaccatgtttgccaggctggtcttgaactcctgtcctcaagtgatccacctgcttcatggcaggtgagccactgcatccggtctgtccatagtttctggaacacaattagaagtgagatctgtgtttgagggagaagcaggaaaagtttaacctgaggatggccctttaactttatatgatgaaaaactacctaatcaatggttgcagattatgtaaattaaaatagtggtgggtacttcttaaacaaattatgcaaatttgatgcagtcatcaaggcttcttgcttcactgcatcatttaccttttgatttcagagaagttcagccccttgactctttccttattcgaactggagctaagcactgagatatttcagccatacgcttgttagggagtgtatctatgtaaatacaagtaattttaagtagacaaggctatattagtagaacctgattacttttatcttgctggtttcttccattgttttattagtatgtttcaaatatttaccatggtgagccgatcagcttctgatctatgtggatcagtatccaacaaaaactgactagaagagactgtggttgtggatgcttgtgaagagaatggaaaatgtattacagtgttaatgtcctctacaattccagtgacttagtattcagttaagacacaggtaaggtgttggttataagccggtaattcaagttaggttaactctgtttcttttccatcataaccagttgaaaagaggaagactttacatttaattaggtagttcgtagaatgtaagtgtgagaatagaaaaatatatttaagaaactcagtcattgttctttacacaaattagagtggattggtagctttgggggatttaagtgggttgaagtagaaggtgaaatgatgactgttaattatcaaaaaccatacataaatgtgatttgtagtttattttgaaacctactgtagtttaaattcatctggtattcattacaatgcagttcttaaagaagatgaaactgtatagctaatgacccaaatgtttccttcttatctaatcagggatccttctttagtagctagattagatgttattcagaaaggataatataggaaataattactgtatttcatttgtggagttaagcatatggcctctaattcattttcatatgcaatatatgtaaattagagaccaatctatattattttcagccatggccatgcaagaatatgattcattctctctctctctctgtgtgtgtgtgtgtgtgtgtgtgtgtgtgtgtgtgtgttagttaaacttgcatgtgaagtatgacttgcagtttgtagtaattttgtgatgctggtacattttctcatcttgtttgggagttttatgaaatgttagaattcaaatttggggatgggaggcggtgtatcatatgaatgatttcattattacaagtagtattttgcagtagttagtatgttgtgagcagattgaaaatgccaggaacttaaaagaatttttggaagaaaataactagatctgtgcaagaattcaacagtctgattactcagtgttatcaattacaaaacacctggccctgtgccatgatatatatactatatatcagtataatcagtataatcatacaccttcttgtggggataaagggaatgaagggaatgtcatttttttacatcacaaagaaaaatcatgaaattattaatagttgtgagttgtccactctgtaactaaggctaactatgaactaatgaactcacatgtagtattaattacggcacatatttcattaatgggaacctgcaattcaaattatgtttgagcaggaaatatttaacaattttgtaaacctttttgattgggccttgaaacatggtttgtagctttttattacttctgctctgtttcttaaatgtgggtggcagtgaaatcaagatctctattcagaaccaaagactgactgtcagggggtttatctacttcgtaacttgtcattagaaaacatgatttccttcagcttctcctcgtatttacaagccaattgcttgactcttctttgggtcagtggctaagtaagttaacaagaacaaacaacagaaatgctttctttgaagatatgagacttcaataatagagtgtgagttagaatagcaatctaattttataattggaagaattcttgttttttttttttttttttttttttgagatggagtctcactttgtcgcccaggttggagtgcagcggtgtgatctcggctcactgcaaacttcgccttccgggttcaagcaattctcctgccttagcctcccaagtagctgggattacactgcccagcactacgcccagctaattttttgtatttttactagagacggggtttcaccatgttggccaggctggcctcaaactcctgacttcgttgttcgcctgcctcccaaagtgctgtaattacaggcatgagctaccgcgcccggcctggaagaagtattagatttagtgtctagtggttaatgggagaatgggaaatctgcatagctcctgtttggtagcatgaaaaacacataattgtaatttcaaatatccaaacaggcatgtagaatcatagggtcatttgttgaagcttagttttcaaggagcagtaagagtgaggaaaaggtgcacaggcttctgtgcttctgattatgagacttggttagagggcacttgccaggcatggtgacacactcctgtagtcctagctacgcaagccatattcactattatcactctctggaccaattattgatttgcaagttcctgtgaaatgttttatcacccagtgtgttttgtctgtgtacaggaagcactggatacactggctaggtgtgtgcttttaagtaacattcttctctgattcctttccttcaaagtgggagatactggtagcatctacctaccctgcaaggatttaatgagttttaatgacatgagaaatgcttagatttcagggatttgtctaaacccaaatacctgggccatatttttagccaggagccagggaatatttgcactaagccactggctgacccaaaacttctctctttaagtcatttagccaaacagcaaattagggagccagcagctcattttgggggtgatgttttgtatgagaagttggtgaaccctggggtagcagtaggggagatttcagcatagagaagaggggatagttgatttcctaaaccacttccaaattatgtcttcaaacaaaataaaactttccccttgatttccaaattccagaatattaggcataaccataatataaacataacagcatactcttaaaccagagagaaaaattccaagctgttctgaattatctggttcatttgagattggactgtatgcaatttggtcgtagcagcaggctcattctagcaaatgctaaggtagcaaacaccaggactgtaggttacttttcctcacaacattctggttgtaggtttcctgacacattcattctggctgtttttcttttgcactctgtggtacgaaacctcttagctctgtgtgggtggtgggcttttgcttgccaggcaggcaggcacagcctggtttcccaaatgcatttctccctgattgccttctctatccattaagcatatctgaactgtgtaggattagctgtgtcttgttctttccttttctttcttacaatcacaggaatgagccaggtgtgtgtgtgtgactcaccctagcccagcctgggtgtgctacagcaccgggaaatcctgccctcttggcctagcgtcttcatagatatgtggcttggccttctctctttggtgcttttcccttgacagcaaacttgtcgtcttttgtcttgaactttattgctcagagaccaccctactgctgtccttttacttcagatcttcaaattcagtcacatactgaggtactaggggtttggacttaagcataagactttttaggggacacaaggcaacctgtaacatttcttaacattgccttccaaagaaaattccttttgttgggtgtggtggctcacacctgtaatccctgcactttgggaggccgaagcaggcagatcgcaacatggtgagattctctctttactcaaaatacaaaaattagccgggtgtggtggtgtgcgcctgtaatcccagctactctggaggccacgtgagaatcacttgagccctggaggcagaagatgcagtgagctgatcgcgccactgtactccagcctgggtgacagagcaagattctgtcaaaaaataaaaaaggctgggcgtggtggctcatgcctgtaatcccagcattttgggaggctgaggcgggcggatcacaaggtcagcagatcgagaccatcctggctaacatggtgaaaccctgtctctactaaaaatacaaaaaattagccgggcgtggtggcgggcgcctgtagtcccagctactcaggctgaggcaggagaatggcatgaaccggggaggcagagcttgcagtgagccaagattgggccactgcactccagcctgggggacagagctagactctgtctcaaaagaaaaaaaaaaactggaaaaaaaaaaaagaaaatcctttttgatttgtatgaagcccaaggtattatcattcatcctttttgtgtcctaggaaatctttgtataacctaagattggaaggattatctcttgtgtttcctcttggagttttataattttttcccccacattttgcttgtgatcactttaaaaagaaaagcttcacgaatttgcatgtcatctttatacgggggccgtgttatcttctgtgtaatgttccagttttaatatatgagctgccaaggtgagcactatgacccccctcctttttcttcttctttttcttttttttaaaagacagtctttgaaccaggctggaggttcactgcaatctccgcctccgccttctgggttcaagcagttctcctgtcttggcctcccaagtagctggtactacaggcgtgcaccaccacgcctggctgatttttgtgttgttttttttttttggtagttttgtagccttgctttattttccaggcactttgcaaactcctgagttcaagtgtgatcctcctgcctcggcctctcacagtgctgggattgcaagtgtgagccaccgctcccgccaactgctttttgagttaatatttgtttggagcaaagtacgggtcagaggtggttttgttattaaaaaaaaaaaaaagaaaagaatgtcttttgttgttgttgttttaaactctgaaagcattccctgccctttgtcaaagaatttcaacagccctgaaaggaataaagtaataagttgcactcaagcctgcctaaatcccttgctggaggagatgcttttagagtttttctgtgtattcgtatgtgtttataatttctttttttttctttaatgaggaccataccacaatttcaaaacttgatttttttaacttaatttagtcaccacctttacttcctcttcaaacatggtttttcttcccattttctttctttataaagacttttataatctgtaccttgtacctgagggaattgtgttgttgttaattttgacttttatttgcaataagaactttcgaattgagacccagtatttgtggctacctgtgtgtgtgcacacacacaactgaaacaatttcagcttagcctcactctccgtgttatattgtaatctatcctttttttccccctatttaatttaaaagaaaattgcttgtcaagagacccagcatattgatttcctattagggatcagcggtctagaagtacatcttgaacattcacagcttgtcctgaatttagctgtgggaatgtctaagggtactttgaccagtccatactacagagaccctttcttcatgatggtgtggtgtgcaggagggtgttcaggggtgacatgatgttctttttgtcaacttgggactttgatttcaccagagtaaagaggatcgtagaaatcttgctaagtcaaggaaattcttatttaccgccatagactttgctccatcacagcggttctcaaactgtcatctagggatccctagatcatagtcccttcctgggagtttccaaggcgaaaagtagtaccatggtaaaaactgagacattattgtcttcattttctcacaaatgtgcagtggggctttccagatactacatgatatgtgatattgcatcagattgaattgagttatgagaactgtgttgactcccgttaagccagatattaaagacttttgcagaagtggaaagcagtgccacttttctcacagttttttcaatgtgtaaaatacaattttcataaaaattttatttctgttaacatgtaatgattgtataattttctaaatgaattaatatgaaatttgttttaatttctagtatggtaaatatcaatgtgtatatgaaacccaggtaaacagtagcttttttgagtcctgaaaatatgcagtacacttctatgcagcctctcctaattgcagaagtatcaacccatggtgaattttgtttcatttacacctttactctaagtgaagcaaatctcagacatttttttggggggtggaaggtggagacagggtggagttcagtggtggtgccatcatagctcactgtgacctcaaacacctgggcttatgcaatactctcgcctcagccttctcactagctaggaccgcatgtgtgcaccaccatacccagctaatttttatttttggtagatggggtctcactatgttgctcaggctgtccttgaagtcctggccccatgccttagccttccaaagtgctgaggttacaggagtgagccaccacgcctggcctgtcagtattaatgtttttattttctttggagacagattctggctctgtaacccaggctggagtgcagtggctcgatcttcgctcactgcgacctccacctcccagactcagacagttctcatgcctcagcctcccaggtagctgggactacaggtatgtgccactgcacatggataattttgtatttttagtagagacatggtttcaccatgttggccttactggtctcaaactcctggcctaaagtgatcagtccaccttggcctccgaaagttctgggataataggcgtcagccaccacgtccagcacagcattaatttttaaaagctgtgaattctatttagagaaaacatacccatgataatgataacataatgagtcaagtgttcagatttcccctactgtcagtctcatgttttcaaataaggtctatacattgatactggttgggttgataaaacatgtttgtttttaatctctctgtccctttaatttgttgttcttgaggaaatgaggtcacttgttccaagtgccacagcttttgagagtgaaggtgggtcatttaatctggcagcaacatttgggcccgacctgaaacacggctgatgggttttgctttgggatcttttttctcccctttctcttactctgttagcctccttcctccttttcttttttggggttggtgctgtttcttttttaaaaatttgttttttaaatagacaaataaaaatggtaacttctaggttccttttttgttttcttttttaagagacggtcttgccctgtcacccaggttggagtgcagtggtgctatcatagctggctgcataggcgccttttgactcgcctccaccccacccctgcacattttcatattatagtcccttatcagtctcagggcataactctgcagtatgtgtaacattcagcatacttggtgaggccacgagggggagatctgatgatggcatctagggcaggtataaatgtgagtgatactgcattcagctgccatcccttccattctggaagagtgtgtgtgtgtgtgtgtgtgcgcgtgtgtgtgcgtgtgcatgtgcgtgcatccccgcatgctgccagtgggtggtggggaggagtagagaggactaagaatgagggagggaggtcataaaggacacaggaagccttggaaagaagggcacgtagcaatctctggggtaaaacagcagaactatagaaatttggttctaggacagtctttataaaaagaataaattcaagaagcagatgaatgggcttggttgtgacctggactgcaacgcggtctctgctgtctttactttcacattcttgtccttcaaggctcaatgttatgtcttttgtgaagcgtttttcatcccccacttagatgcattttccgtgttggagtagctgtgttgtgcacctcgtttgtatttgtctccacacacattatacagtatcttgtttgttttcagagaacccctaccatccccagcctagccacctttgattcatcttagtggattgccagtgaatatttattacaggcccaggacatgtagctgttcaataaatattggtgcaatggaagactctcctctgtgtgagagttcatgaagggaaccaggaggtgaattttaagggtcagtggcttgcaacactcctggaagggctttccaggacctcttctgaggtccgaagaagcaaagatcaccccccacaaagtcacctgtatggaattcaggtagcgatagagcttgtgaacaggatctccaaattctccaaaacatagtaaagctgctatttactgggcacccgctgtgtaccaggcactgggcaggatgatatgctttacatgtattacttgcaattcctaataacaccagtgtctgcaggttgctgttgcaggttgcaagttactgtgctgccttatacctgtagttacttgaaatgctgaaaatcgaaggtaatagaaaaacttattatcatttagtgtcattgggagcgttaagtgattagatgtatggtgcttagaacattgctaaattttattgactgcttaatcctgttgttccagaagcagaatttgatgtatacaattgtttatctaggttgcccagtgtaatatagtaagtgttaaagccaggaccacagcctcgtttactccagacttcagaacatccatacagtcaaaatgtgtgtctgtggcctcaaagtaagagattcagatggtcaagaaacaccttcctctgtttcaaattcacgatgacttcatttacacctgtgcagcacatgttaatatggcatgggctattattgctgcaggaagggtacctgtcaagtatgtagagtgcaaagggcccttccttagatgtctagctgctgaggccccacctgtgtggggatgggcatggaggcacctgccttgttcaagaagcctgtgaacagtgaccagcagtaaaagccagagagatcttcaaatgtagtatcttaataatgggctttttttttctagttcttctttttcccttggggccacatgagcatctgtacacctattgtaaacccattgtgtcaaggaaacaaagtaggtcagaaacaggatttaggaacccaaagaaataatctttgttgatgcttaaattgaatgaggcagaaacaaatgtctctttaatatggttttttttttttggggattattttggtatcaccccaagcctgtaattccctccttagtcatcatcttactatcccttgggactctggcctgggattcttctgctttgtggttgtgattaatcctgcaatgagtgagttggggagggatgggcctggggaagtcagctgctgctagcagcaagcaggggtagggtttatagggagagttgacatcctgctgggatctaacagaaaagtttgaagattattgtgctgaaataaactagctcacaattttgctgtttgactcagggcaagctcactgtaaatctcaaggagtactggactgtatgatggcctcttttgctgtccttatccccactggaggatgcacagattagttaatgtctccctttcatgaatgcagcttttatctttaataagcgggttaaaccgcatgcgctctgtctagtctgtgaaggtcagccagccattcggattttatcttcccatttctagactgctgacagagttcttgtgcaaagttaggaatctttgggttttaaaatgttttcttcctttgcccatccatgacatgcccttattcttgaggggaggaaaaagaaggcctgagtctctgttaggttgcaaatattgtctattttttgggagtgatctttgtagaatctgggcagtgacttttgttgttttgtagtcctgatgatttaaaaaacatatctcatatatttctttacatacagctcagagctcaacattgaaatagatgttcagcagattcttgcccccacttaattttcactgggtttctgggtttttactgtgattaaacttgacattcatttaaggaatgagttgtgatgttctctggtcatgacctaaggaaaaggatatatatgtgctctaggagtgaattctggtgagaacgtttgtattctttcctttcctctttgatttcacaagtcaggctgtaactttaaaagaaactataggggctgttccccaggttattcacaaaacgagtctttgtctgctttttcattcaccatctggtatacaaagctaaattggaatcgtgcttgttttaattattttctacttgtgtggccaggaggttatttggtctggtgaggttacattataagcctgcgcactcattaataccaccgaatccacatcctgcgccagcattggaatggttaagttgatccacttgtgtggccagagtttgatacaacacagtggtcacgaccacattaccggaggaagtatggtgtgtgggttttgccctcttcttttttcattttttcttccaataatgttaattgtttcagtgtattttttcttccagtagaaatatgacttaggttggcaatcttagattagtgcctggtgtttattaaagggacaatgtatttcaaaaatcagttctaatatattaaaagcatagagtgtaaattaggaaaacagtcaaaacatttaacattttgaacacttcacagaatgagtaatggaaatagtgtagccagaaacttctctgcgtggtcattattattggtgaatcagccaaaagatgcaatcattgctaagaggtattgtttaatactgggaaagtcacatcaaaagctttctcaaaaaatatatattttaagtcctccttccattcttcactttcctgtcttggggagacagaatacttcaaagtagtctgtttttaaaaggtgacttctttcaggttttgggaaagagtgttatgtgttgtaattaagtaattgttccctaagatagtccttaagtacaaggacatctcactagacttcattgtcttgtgaaaggagcggtatttcaggaattaactactcatttaataaagcaaaaaggctggatgtgatagctcacacctgcaatcctagcactttgggaggctgaggcagttcgatcacttgagcccaggagactagcctgggtgatatggcaaaatcctgtctctacaaaaaaatacaaaaattagctgggcatggtggcacacacctctaaccccaactagttgggtgtctgaggtaggtggattgcttgagcctaggaggtcaaggctataatgagtcatgattgcaccactgcactccagcctgggtggcagagagagagatcctgcctcaaaaaaaacaaaaacaaaaacaaaaaaaacaaaaaacctgtaggccaggagtggtgaaggaaaacagaaagagtgcccttagaagtataatactggaaactgtctttttgagcaacactttaagaaataccccagactgaatggggaattcacaacattttgcatttgtcaaaacctgtagaatgtagaacacaaagagtaagtgaatcctaatgtaagctgtgacttccattaatagtacggtggggggccgggtgcagtggctcacgtctgtaatcccagcactttgggaggctgaggcaggctgatcacctgaggtcgggagttcgagatcagtctgaccaacatggagaaaccccgactctacaaaaattagccgggtatgttggcaggagaatcgcttgaacccaggaggtggaggttgcagtgagccgagattgtgccattgcactccagcctgggcaacaagagtgaaactccatttcataaaaagtacggtgggaccccctttctgcagtttcgctttctgtggtttcttaaaataaacaggtgtctgaaaatattaaatagaaaattctaattcataagttaaaaaaaaaatcctagacttaatgtccctccttccggactgtattgttctgtttgatatttgtgagcacacctgctaagccagtccattagaactgcatgcttgatgcaggaactgatgccctcagaaagtctgcttgaaaatagtcgcagtgccaagctcgaaaccagttgctcttcgccatatgtcagagtgaggaaggaagggtggggggattagaatgtgctaggaaaaaattccgacaaagaattagaattttatgcagaaacaactattgataatttattaatatttacagggcatgtcaaatggttctgtgagaaaaaccaaattagcaagctacctcaggaatttaatttttagatatatctgaatattaactggggctcaaacatgccagacaattcttttagtaatgaattagaatatatcatgtaatactgttaccatccaagactcccagtgttaacaccaaatcttaattttcatttcattaacctggcaggtatttgaaagcagcattgtatcaaaacagctttattatgtagaaggagcaatatttaatagctctgttccaaattactcctaacttccctgtatttctgaaggaatatttattatagtgacaaaagcctgtacagcagctccaggagaagagaccacagtgtttagaaaaagaaattggcttgcagctgtggtgggcgctacttgtgtaagtccagctgtcccccttgagctcctgccagtctgataggccttctaagttgttgcaagacctgaacagttcacttgtctagatcctgcagagctggaaagagaacaatttttttgtgtgtgtgtttgtcctaagaaataatccaaaatagttttcaatacatacattcgttgtctgtctactccttgtttcttaaggttcttcccgtattcttctgttatttttaaaagaataacagctttatagaaatgtaatcctcacaccataaaatttaccctttcttttcttttcttttttttttttttttttttttggagacggagtcgcccaggctggagtgcagtggccccatctctgctaactgcaggctccgcctcccgggttcacgccattctcctgcctcagcctcccgagtagcttgggactacaggcgcccaccaccaggcccggctaattttttgtatttttagtagagacggggtttcactgtgttagccaggatggtcttgatctcctgacctcgtgatccacccgcctcggcctcccaaagtgctgggattgcaggcatgagccaccgtgcccggcacatttacccttttaaagtatatacaactcggtgttttttagtatattcacagttaggcaagccattactactatgtaattgtggactattttcatcaatccaaaaggaaatcttgtactgatcagcagttattatttcttcccaggccctagcaaccactaatgtcctttctgtcactggatattcctattttggccacttcatataaatggaatcatatgctatgtggccatacgtgtatggcgtctttcacttagtattatgtttctccatgttccgtgaatcagtacttcatttctaatctcctcctttttcagttcttagaatggtggttaaatacacataacaccaaatttatcattttaaccattttttgtgtgtacaattcggtggcactgacaacatttgcagtgttgtgcaaccatcaccactatccatttccagaatgtattccttattattgctgaaaaaaattacattgtatgaacactgcatcttatttatctaaccatcatatattctagctatttgagtgccagattggttcagtaaatacgtgggtgaaagagaatagcattatgcatgatcaggaatgaaattcaaagttggtgccataacatacaagtgactagggagtcttggggccagggaaacctaaaggtaatcttttcaaaggagccacctatcaggatgttctggagaatagaagggtgcttcccccgccccgagactggtttggatgaacacacaaaatatatttagtgggcaaacctttaaaatatgacatcttagcgtgcggaagtccataaccccaaaggagggcttgctcagtacatgcagaggtgttcccagagcatgtataagtctgtacggttgtgcaaacaggaattgatctgacagcgtgaagacacagcagccttctctaattaaagcctcttgatgacattaaactgtgttgcttaattacaataaatcatacattaacagatcatgtctccaaagaagcattgtcagtgtgctgcataatggaataaaatttgaccttgtaatcacaggggttcctatggaacagtggcttatgtcaccaataggaacatgagccctagagttactttggcagaagtcagatcttagaatgcttccttataattctgtttctataaaaatgttttttctatattgatacgtattttaatgtgaggatgctttttatataccttgaaggagtaaggttttccattcattccctgccactacttttctgatcaccccctcttcatttcaagctagtctggatttgacataatttttacagcagtttttgcatactccttttaccatgtgcttgctccttttgctgttttccattgcgctttggggtaccagctttctgactgacagatgggccaagtcaggtacaggctgttgttaccaaagggcatcttccatcatgttgtttgtttcttcaatactgtaatatttgagagagtgtacaactctagatacagaaggccttttgaaattctacacaaagtcacaataaaacttggggtactgtgggcctggggagattctagttcctgttcaaaactactactgccatttaaagaactggaatataactgcatatcataccacctagactcatgaatattgctattttcattggtttaattttcaaaaattagtggtattaaaccagtggggtatatttaatttcttcatgatgcagattattaaacactcaccagccttactttctctcttgattttataaatggtaattgaaagtccatagattttaggtttgtggaactggaatgggcccccaggggatattcagtccacacccctctttttttttcttttttcctccttcttctttccagagacagtcttgctccttcacccaggctggagtacagtggcttgatttcggctcactgcaacctccgtctcgtggcttcaagcgattctcatgcctcagcctcccaagtagctgggattacaggcatgtgccactatgcccggctaatttttgtatttttagtagagacagggtttcaccgtgttggccaggctggtcttgaactccaggcctcaagcgatctgcccacttcggccacccaaagggctgggattgctggtgtgagccactgctcctggcccacacccctcatttttcacttgaccatgttaggtatgtcagagtcaccttgcttctggcaggtcagcctcctatagtgctgtttagaacttcacatttgacaggtttgactgttttagaagttctctgctcttccttcacatctgggatgccatcattcattctttgttctcttctgtgtgaacatggtcttgttgcagttcccctttctctgcctgcctgtccacattgaggtgtccctggggggtgtcttttctcctagtgtccactgtccacactgcaagagtgtgctggagactcccagattttctgtctgtgcccctcaagccttaagcattcctatgtgctgctcagtgtttctgtggaccaacagctggagcaggctctgtatctcctcctccagagcatggcccctttggcatgatggcttacccctgtaatcccagcactttgggagtctgggggacggattgcttgaacccaggaatttgagaccagtctgggcaaaaccccatctctatacacaacacacaaaaaaatagccagaggtggtggtatgtacccgtggtcccagctactcaagaggctaaggtggaaggattgcttgagctgaggattggaggttgcagtgagctgagattgtgccactgcactccagtctgggtgacagagacccgtctccaagggtgaatgaatgaatgaatgaatgaatgaatgaataaataaataaataaaggcatggcccctttatcatcccagaagagaggtaattccggtgagtgctgtggagatcagtggctgccttttcctgaaactgaaaaacaggtggggaatctgagggagggaaggaaaagtatatcaagcctaactaatttatttttgtgtttaacaacactggtggttcagtaatatttcgctattgcgaagatttctgtatattgttgttaaaaataggaacctaagattaaatgtttgtggcttttcatgttttggaatgaactactttggtcaaactcaaaaagtaatgcttgctaacttagttagagctggagtatagattttaattctacatttaagacaatatttgtaaatgcctgtgtacaatgacatataataagggtcttgtagggaaaccgttttgtctggggaaagaatgttccccaatgttgaacactactgtctggagcttgttaaaaacatacccccttcagtgttctaatttagcattggttcactagtaaaattcaggattcttttttttttttttttaatagatttggcagtatacagttctgtacgtttcatgttatttttacatttgtttttaaaatttaagagatgaggtctcaccatgctgccccaggctggtctccatctgggctcaagtgatcctcccaccttggcctcccaaggtgctgggattacctgtgcgagccactgtattttttcactctcttactgtaattctgttgcgcagtcaggattggagacttagtgatctggttagcaagttctctcgccagagaagagttaacttatttttagtattcagagtgtagttcagtaagtcacacataaaaatcaatttgttatttgtaatcactccacttaaatgtgtaatgggaaaggttccattgtcctcctcgcagggtgagtgtaaacgaatgcgaaactgtctctcttcctgcctctcttccaaaaccctgccatctctttcctgcggctgagaggctctgcttcccttcatgcagttttaaaccaccctaactgccgatcaaaacccccagaccttgtctcttctctctcttacatgagagaggtttgaatggctcttatctctttccttacaatgttaagagttttcctctaggcattggcaatattactaagtaaaatgagcattaggctcagctgccaaagatgcacatcagaccagatgttcctagaggtgccatgtatgtgtctctaaagctcgacagacacaggcactcatggctcagggcacctcctgttatcctttcctctcccagcttgggtggctatgcatgcctgcagcaggcaaggtctgagcccaacagccacgatgggggaggtgggtggtagaaagccatggtggtagctgagaccctacagggccaatggatgggcacttctcgtctgccacaccaatggaacccctgcccgaggaattcaacctggtctgaactgggaaaagacataaggattagggggggtccacttgcactaagcaaggggctttctccccccacccccctgaattttcccctttttgcctcttaaactgtttctctctttttttccttttctgagtgagaagggtccccctcccaactctgtttctgatagggaagttaacgaaggaacggcccctgctggctgagaactgcagatttgagagggcacatttgagacactctacacagatacaaacagcctctaaaatgctttttcagtcccaaacttgattccaagcttcaggcagaggccctagaaagaaaaaccaggtctgagggttccgaggccaggcaacaggcacaatgtaaataggaaggaccaagtcctgccaaccaaatcctccacctcacggaaggacgccatgcttcatggtgtaaacaggcccagggaactcagtttgccgacagcagggagaaatggaggcgtaggtgagggcagttaattcctattctccaggttttctttgcttcatgggtatgtactgcagtggtacctatggctggcccagggataagaagtggagagtgaaaggaggccactcgctttctctgtcacagcctgagttttcgctgaaagaaggaagggaatgagggacgcctctattccctgtctttcagaatgggcaaccagttctcttcaccactcccagcttatactcctctggagtgtgtcctaaaccattgggactgcattgactctcagaatctggaggaaaaatgcgtcgtagccctctgcacaaaggtttagccaaattacgatttacagaaaggactggcttggcttcagaaagaaaccatttattttgataccatttggcaaatctgtagacattgaggacagatgggctgaggccccatatgtgcaggctttgtataccttgcaaggcaatccagacctttgccgacaatataggattgatccagccctcctgtttgctgtctcagggaaggctgcaaggggcaagcccaggaaagtaaagaggcactcccagcagaggaaccagctccctctagccctgcccctctggtccaccccaacttccctatctagcttcagcctctcacttgctccctcctaaaaattcttgctctcaacaaggcccagtctcactctttcccttccagcagatgccctttgaatttgggcccagtaaggcccagttacccttctccctacaggacttaaagcaaattaaggaggatcttggcaagttttcagatgaccctgataagatatatagaggcttttcagaatttcactaaaatatttgaactctcctggagagaggttatgttacttttgaattaagaccttgacgaacactgagaagcaggctgctctgcaagcagcagagagatttggggatgagctttacgtcacatacagcatcagggaagggggcaaacattatccaactggaagagcagtactaatggatgaccttaaatgggatcccagtgacgaggtggaagacgggaagcggagacactttcaggtgtgcataatggaaggcttacctagaactaggaccgggcctctcaattatactaagttgtccatgattgaccagggatttggagaaaatcccactgcctccctggaaaggctaagagaggccttagtaaagcacacctccctatctcctgattcagccaagggacagctaatcctaaaggataaatatattactcaggcagcccctgatatcaggaggaagttgcaaaaactggccctgggaccagaaattacattagaggacctctggaaagtggctacctcagtctcttataaaaaagagagaagatgcaggtattcccagggtgcacctcttaactgctaaagatagggcaagaacagttatctctcccgccccacccgccctgcttttttttttttccttaagagagtttcgctcttgttacccaggccggagtgcaatggtgcgatctcggctcaccgcaacctctgcctcctgggttcaagcgattctcctgcctcagcctcctgagtagctgggattacaggcatgtgcctccacacccagctaattttgtatttttagtggagacagggtttcaccatgttggtcaggctggtctcgaactcccaacctcaggtgatgtgccctcgtcggcctcccaaagtggtgggattacaggcgtgagccaccatgcctggcccagttagctctcttctaaagtttatctgctcccatacaaggtttcatttctttcaccagggagaaaaaactcagaggacaatgttgctgttagtatatttcacttcttatctctatgatctttggcattaattttttttttttgaattggagtcttgccttgctgcccaggctgcagtgcagtggtgtgatcttgtctcactgcaacctctgactcccgggttcatgcaattctcccacctcagcctcctcagtagctgggattacaggtgcatgccaccatgcccgactgacatttgtatttttgtccactgcacccggcctcagatgccatgttctaatgggctgtgtctataaagttattaaagaacaagggccaagtaatttggggtgcctttgaagtgctgagcatggcctttccaatttgtgtgcaccttctttcattcttactttacaaatgaaggaagctgatgtccagtgaggtcatacagcaggtacaataatgggctgatttctgagcctgattctcaatctgtgacttgtgcgacatcattgtacttttgatactttgtcattagttgggtgtggattttactacctgggagtagttatgaacaaccagtttggtgctaatgaaaagtagttgtgattccttgactagatatgccaaccttcaggtttataaagactactctcatcttgctttggctggtctttgtagtggatggatattggagaaacccatgaggtgatatatatgaaacaatatattggggcagacttttattcattcattcctaggacttaggagccctgctggtgttctgtattgtgccccatttatagccatgatggtagagttagatttatgaagctgaggccgtgatctttatttcaatcctacttggtcgtttgctggtcagaaatgtgtctcgttcctctttagtgggaaaaatgtgagtgtgaatgtaagatagttttagataacactcagttggccttatgacctatctgaagtcctgaagtcagctatgggattacgatgtttgcctccaagctgtgtcttgggaagggatgagtctttctctgcatagtaatttaaacctggtcaaagacctgaccacctcgaagcaggaagcggtgctaatacactttctatatccaaggacagttatctcttttaaaaagaagtgaaacaaaagagactgtattcaaaaggaagtcttttcttttatacccacgctctccttcctgcccatgtgatgttagaaaaagtgttattttcactgttacataaaattttttgatgggttcttctgtgcagttttgagatgtttcctagctgatggaaaagtataaaaaattcatgcagaaataatgcctgctgcccagcccattttttcttgcttcatgtacctactgtttacataaatgtttttccctcccatatgttcttttttactcttccacatttgagtggaagatatttaaaaagttttcttatgtatacttatgattttacttggaaacagcaaatgtaaggtctagaagcagaggggctttcagcttctctgcaacacacaggaaagtagacaaagtttctagggcaggccccagcctccagggtaagataggcatgtgccagcaaccttgcctacccgtcatgaccctgccatattataggtactgagtcatgcttcaacaaggcttcccacacttcattgactggaccttctgttttgtcatcagaataatttatatttgtatataaaatttcttggtggggggtaatactgtactctagcagtgactgaagaggtgccaagtaagtttgccacctattgtgggtttagtctttattgttagtaaatggcaaagagaaatcgatgaaaggcagagtttagagtagtgcccgcttaagggcaagatgacatagtatctgcattgatagactcaataaatgtttaaacaaatgaaatgacatagtttaatattatgggagggtgtgtgatactgatcatgactcaaactgtagaaagaagagtgaatattctttcattatttcaatcctatttaagtcctgttgagtacagttccataccctattttgtatttgatttacaagagcaatatatttttatcttagaacatttgggctttctgctaaaataaaaaggggggggacagcatttataccacacagtgataattattaccattttgtggtatccatttttcttttctttttcttcaccaagttgggtaaaacatcgagaaacaaaacagaaacaatccccggagcagcattgcacatgctcagtctctcaaagtctggcttttaaataattttctgcatctttccttgtaattgggtggagaatgttccactgggcagctgagttgaatcgccacaatctctccacttggcctctgtgcgacttactgtaaacatctattgtctcccaggcagtatgcagtgtgatccctctccccacccattgtgcccatttagcctctgggactacccccacaagggtggaaacctggggcagagcagacactaaatactgtccaactagggtggttggatgctccaggtttgtcagcccagtcactgtcctgcattgcctcctagaatttattagcacctacctagcattggggtatctaattcaaactaattagaattagtttgatctaattctgtgctgttgaaagtaacaaagtagtgagcttagtgcaccttcataattaactccttatgataaaaaggagtgaattgcttattcagaatatacacatttttaatggggggtattctattaagttctattaacttttctagtttgttaaaattatagaaaaatttgtggtttatactggcaaaattttccataaaattattcaactagcttcttcttcaaagtgaacattattatgcatcttgaccttttcccacctcgttattttgtgtcgttacttacccataatttaggtgtttagtactagtactaagttaggaaattattactgaggtgctttgattgaagacgcctttactgagtccttgggaagtaaaatagtgacggttaggcctggagcagtggctcacgcctgtaatcccaacattttgggaggccaagacattttgtggtatccagtgttttgggcgggttacctgaggtcaggagtttgagaccagcctggccagtgtggtgaaaccccatctctactaaaaatacaaaaattagccgggtgtggtgttcatatctgtaatcgcagctacttgggaggctgaggcaggagaagcacttgaactcgggaggtggaggttgcagtgagccgagatcgtgccattgcactccagcctgggcgacaagaacgaaactccgtcaaaaaaaaaaaaaaaaaaaaaaagggaatagctgctttacttcacagtcctagttaaggatttaaaaaaaaaaaaaagctcatgagcatgctcttcaaattttggttttgtgatttctggggttttcccatttaattccagatggaagagtgtcattaagttctcttcaaatgtaaccaaatttagtgtgtattattattgctggtggaatacaatgatggtgaatatcccattaaaaactcctccctagcccctaatcacattgaagttacattaaagagttggatgtgtattgaaagtatgatagtctcttgctataaaattaggctattgtgcagtcaaagaggcctctgctaagtgtggttccattttggtgtatttggagggagaggaagggcagccggtatcctgtcactgtgtcccccaacattgagcagatgttctctgagttaatgttgctcttcagttatctttgacagaagcagggtctggttaagatcagattgtttagactaatgtacattgatcttggcataatgatcacaagactataagccagctagacaagcaagtgctggtggtgagttgttagattaaaaaaacaaagcagttgttttgagaataacttcggtgccctggacttacattacaagacattggttttgttgtatgctacttttagatttacctgggaggaccttttacttaataaatagctccagactattaagctcggtgctgctgatcctgcggagaggacccggacctgagagttagtgggagccaccctttcagacagacagggcgttgaatgcaaaattctcttgaattttaaggaagtacatgataatctgttttacttgggagtatgtagtgatttttttttttttttttttttttttttgtaaatttccaagggtggctgtgaaacttactttcgtggtagtggtggacccttgaagcgtttttggaaagtagatgaaagagggagatgtttactaattctgttatttttattcagtgggtggtgcttgagtgggtataatttcctctctaacattctgtcatgttccatgtaacttagataaagcacactctggcatataggaatttccctacttgcttaccttgggatgtggagtgtgtgtggctttgtcagactcggctgatgtaatgaaaaatggaattaaaaaacgtgactgagagtcctactaaagtctgagctctctggtttaaaaaaaaaccaacgcagctgtattgctatgtctcacttaccatatacagttcacccatttaaagtgtacaattctttttttttttttaactgttaggttgtgcaagcatcacaatttaagtccaaaacattcccattcctcagtctctgattgtagaaacaaatgatctatgactatttcttaccatgagtatgcagattatttgatgcacagctttttattttaccttctttatagatttccacccaggaaaaaattttaatcccaggttgtctcttacttgtatgaagttttctgtaataatttcttaattattgtaattctatgaacatcaactgaaatgtaattttattaatagcttattctgtaaaaatgctattaataataataaaaatatcaaaaaacgttttgaaggcattgcattacctgccgttttggattatgatcattcttttgtgtggatagttgaagattttaattttttgacaagctcaattgaattagggaagtaagtttgctgctattgcaaaatcatataatgcatgttaaatatcagttatcagtgtaatttgtttttttaatgcagcagctggtttctaggcttaggaatgatagttggcagattttcctactgctttcctgtgatgtttgttagaagcttctagtatagtttcttcatttctaagcttttgagactgattgtatgctgcttatctatatatgtagataagtttcttgtctttcaaggtcttttcaagaggtgctggagcagatttaggaacgcagcatagtttaatattgttaagcagggatgtgtacctgaatctcttttggaagtacaaaaattcaccaagttggtacctccggctacccaactctgatatggaaacctggggtgatctgctgtcaattacgagttgcacctcagctagagaaccgttgttaatttatttgtcctctaattgaaaatctggagctcgagcttactcattgatcttggtctagttactgtattcccatcctttcctgtgtaattgagaaagagcttttgataggaagtagtatatggaaaagtaattcaacctcttggaattttcaactaaaattcagttcataattaaacatattaatttatttaatattattcgttcccattgctgggaccgaaataagaccataagtgcattttatacattttctagcttttataagtttgcttcctttaaaataccgattttgactttattcctcttagatggaaattttctgagaaagaattccattttcttacgttttcttagagttacatgggcaacattgtagttcagcacagcccttgggttgctgggagtctgttactgggtcattgagccttgggtggaccagaaggctcacactgatgaagccttgggaagggaactgcctgggattgaatctctgctctgctgcttatccaggtttgcaacttgggataagttagcttttctttcatggagtggtgatatatgaaacatacattccgtaagtgttcgtggttttgttgtcgttcagctgtctgtattagaaataatgaattattattcagtgatttttcctgtctgataaaagtctgttgtcagatgtagattggacgcttagaggttcagggtctttcatctagttaaatgcgcattaaagcatctatttggtgaacattacttttgtggcataaaatagtttaaatgtgcttcccaaagatcctggcttccattaagatattcatttattcattaggagagtaattcattttttattacacagtagcttatagcaggtgttagaaactccagttaacactaatggcaatcagcatttaacttttttctttactgtctgctgttttgtggttttccaccatttattcttaattgtcatatatagtggaagtaattaaatccatgagtcgcctcctcttgttataaatgtttgtaccccttttaagtttgcttggctttctcagattctggtttcaattaacatgcttatgattttctgggtttgcagggcagattagtaggctttggtgtggcttttttctttcttcctttctgcctttacgcgtttggttgatgcatctgtgtacctaacccacttctctgggagaggggatgtggagccatcgttttgtcttgatctccaggagccttgcttgattttgtttgttctgctctaacaacgtctggatgcttgtagtgaccagcttgtagtggtcaagttattcctattgaagtaattgtaattttttttttttttttgagacagtcttgctttgtcacccagtctggagcgcagtggtgtgatctcggttcactgcaacctccacctcctgggttcaagcagtgctccttcctctgcctcccaagtagctaggaatacaggtgcttgccaccacacccatctaatttttgtatttttagtagagacagggtttcaccatgttggctaggctgctctcgaactcctgaccttgtgatctgcctgcctcagcctcccaaagtgccgggattacaggtgtgagccaccattccctggcagtaattgtaatattttatatcagaagaaaagataggtagactgttttcttaaagcagtatttgtcatccctgagacatttcgtggttaagaacatgagaacacatgtgaagtaactaaatattcagcagctactatatatttaagtagttgggttgagaatttagctataatttatgggcagaatgaggatatggggaaaagaaggacccaggtaggtggtgaaatgctatcctaaaccttttgaaagtatttagaaaggaagtatgttgatgaaatgcaggacttaacgagaatgtgtgtggggaggtggtgggaagtatgggagaagtgcacatgcttgatgatgagagaaatgattattttgtttcatgcaagcaagcattcttctcagtattttaaccttttaaaccatcagaattcattttgccttccctgattcctcacgtggttggtgagcatttgagaaaaatattttattttccatgatatgtgtttagattcctgggtatactctctaatgtattattgttgagcttgtgtaagaaaatgagatgaagaatgagatattcttcaccaattacaccaatgactttttaaaaagtagaattctgttggggtttaaacatttccactttgtgtatgttggtggtgatggctcaaaaatcctttactggacaaggaagtatattcatttatttttcagagcggatctcgctctgtcacgcaagctggagtgcagtggcgctatcatggctcacaatagcctcttcctccaggcctcaagtggaggctcaagtagaggctcacaatagcctctaccttcctgccacctcagccttgcaaatagctgggatcacaggtgcatgccaccatgcccagttgattttaaaaatgtttttgtattgatgctgtcttcctattttgcccaggctggtcttgaactcctgggctcaagaggaagcatccaaagtgctgggttacaggtgtgagccaccacacccagctgcaaggaagtttagttattttatttttcttataattattattatttttgttttgttctgttttttttttgagatggagtctagctctgtcacccaagctgtagtgcagtggtgtgatctcggctcactgcaatgtccgcctcctgggttcaagcaattctcctgcctcagcctcccgaatagctgggattacagccgcccgccaccacacccggctaatttttatatttttagtagagatgggctttcaccatgttggccagtccggtctggaactcctgacctcgtgatcagtctgcctcagcctcccaaagtgttgggattacaggcgtgagccacggcacctggccaattatttcttttaattctatttttttctatgaatattctttgcagtagataatctttgtgtggaggggttctcagtattttttaaattatattttataaacttccatgggctgggactggttcagagtcttcataagctcatagaaatgctttaaagtttgaacttaattaaatttttttttctagaagttaacttgtgggttttcttttcctcttctcttcagttatacttgaaaaggtagagagaattgctcttgctttcttctcgagtataaaaatgtcaaacattgttctttattcttcgctgaaaccatacaggtaaaaagcccacagtcaagcttttgcagacccagctcccagctagatgagaagcagctgcaacaggagaactagcgtggggagctctaaccagagtaggctttgctgtttaggtttagtggttgctattttctacctctttgtgaatggagaggtggaggcggatgaattaagccaattaattggaaaagaaatacttacttcagtagcataccatctgaagcaataggatggaagtttaagacttgttaattaagaccatgaaagaactccatggacaatgttgaaaagggttttcacattaactgtgtgtgtattaggaagggaaaaatgttttcactgagattcctgaaaccatattgcaacatgagtttccctcttgaccttgcagcttatgttggtctgcttttcaatattaaaagaaaaatgtggatcccatctatgaagtcatagctcatttaggggtgatgtggtagataggtcctggttagttttgaaggacctaattgctatattaggttttattttctaatccaagatggtgactttttgttggaggtgggagatactaaagaaaaatgttccatctggatggaattttgtgggcaggtaagtttttagtgtctccatccacaaccacaacaacattgtgtgccctaattagttacgtgtgtgaagtgggcctaactggagtagccagtgagaatgacttggacgttttcagaagaattatttgcaggttggaaaattctcacttctatttccaggattgttcagtctggaggaacagtacaaattaaagtgcactgttttagaagtgggactggattttggcattggcagctccataattgtagttttggccaaagatcactgatggcttttgactcatcacgcgtgaggagctcctgcaggaatgctgaagaaaaaaggaagggattccatgaagggaagtaaaaaccagagcagaaacaccgagcttcccagttcctctcccccaccaccccttacgctagtgctgcattctatcaaaagacagaaggaaagatgaaggctggggatgctacctccttcccgcaagcaatgccttattctggccttcagcttaatacatcatctcttctagcttgaatccttgcaggtactcttttttggagatgagacggacaccgttgaaatgtatatacaatgacagagtttattctcaggctatgattctgcgtcttttgctaaggatgtcaaatctggatattctcggttcttgtggtcccgtattattggttagatgaggaaagttaacagagatgggttgagtggaagtagctgggcccaccatgtcctggatcttaatgttggataagtctgctgtattgtttgttgaactctgcaagcccagcatctgttttaacacgcggctggaatttggggagacagccctttccatcaagcttgaggctgtgacctgaggcatacatcagtaacgtcacagaatcatgatcagaaaggtctaagggtgaagtcacagaatcatgatcaataagatctaagggactgggaaaccaatatgctgttatttttgtgctgcatgttgaccaagcacctgaaatgaaggaaataagctgtgttttgcaggatttctgatgaaggcagacctcacctggctcactcagtttctccgtgtcttgagctggagatgttaatcaaaacgtgcatctaatcaggtgttcgtcttcattagtaacacggagactctatagctagtgggaagaactttggtgttactgacttagctgattccaagatgtgctcggtattcacattttaaaatgcctaaaatgacaaacaacccatttgcatcagtcaccttgttctcatagcctgagtatgagtgaatttggtccaggttgttcataacctcatcacttccttatagtcatcgttgggccttcactgattgcatttaattgctatttaaacaagattcacatggatttcatttcaatgccaaatcatagtttaaggttttttttttttttttttttgaattaacaaaggcatagaaactgagtggcagcaggctgtacatttgattttagtgaaatatttggtgtgggaggaatgaccaaaatttcacttttgattgcaaaataactcccaaatatttttggcaacctagtaacaggaagacggtcctcaaagttatgttaggtcctcaaggattgcttacttattccagggtagctggaggcaggagaaactgccacatccttgtactgaaagagatttcaaagtaaaaaaaaaaaaagcagatatcttggattaagggttactaaatagcagtcatgttttcaatttgagtggtatgtaataaaatacaaatttcatatttgaaggtgcctttttggttaacgaagaggatgttgctgaagacctactgtgctcatcaggtatgaggaaaatagaggtcaccccagggagcctatagattagtaggtgagccaagcatttctgagtaataccaacagtaactaatgctctaatagggtctggtaaaaacttctctgaggtaaagagatgctgaaaggtgaatatgagtgagtgaggggaaaagctgggaggattccggtcaacctcttgtttttgttcccaccaatagctaccaggtagggattgctggattaaataaaactggaaaccttccttctagctggggtcctcatggaaagacactggcctcatggagcaggaggcctgggtctcatccctgctctgctccagaggggttcaaatgagcagatctttctgggtcccactttcctcatgtaaaatggaggggtggcaaatgttggtgcatgtgtagcgtctgatgctaggagtaggtgcatttatatcacacaaggctaccgacttgcacctgtgttctgggagccaatcctattcaccactggatttaatttgctcttcttggggaagtgaccaatgtatggattcaactgggaagttatcctgggcttctgatgagttgctgtgtggtccagagaggcacacacttttgtgcagccttataaaatgggatgttttggcatctgtagctgcttcccttggcagggagcaatggcctgagtcactcaccctcttggttcttccaagtgctctccactccccgcttccctctgctgatgacataccaggagattcttcaaactagtgttgacttggcttgagagatggtattaaagagcagttactactgtacatatccttttaaaaaaggataatcactgcgccgaatctgaggctgtgatgcatttaaaattgatgttgatatttcttcctttttaatttttttcagtaatagttctccctcttttctgtccgacgtaagggaggaacacagctagctcttcattgcaggcttatcttccccgttgccctcctgaaatcctgttagtttcttgaacccaaatttattgacatattattcattataacagaaaatattaaaggctgctaaaatctgagccatcatgcttagctgagattcctgaaagactataattttaacaaggaaggctctcttgttaagaaactatgtagccccccgcctctccaccccgttcttaatattaatgttacattgtcctctgtctgtaagctgtttcctgataacgtgcattgtcattggagaggaagactattcttcccccagctcagatgtagattactaagtaaaaagtccccagaggaccacatgaccacatgatccaggaatcagaatagtgaagggaaggctccaagcatggcctgggaggtctaagtcagggatacaaatgaagctctgcatcttggggtttccttgcagatccttttcctgtgcttcagtcctttccaccttactctcccttaacgtcctggaaacatgaagttgtctgagtgtctattaagtagttcacttggctgtcatgtagggagcagacaatgatggtgtgcttccagcaggcagaacagttcaaaggcagggtgcaacctctgcttttcccccctcagacatgactgtaagtctaaattcactgtaaataatgtgtacagtggaataagttttgtaaataaatacgcatagcatagcgccacgaggttacttattacagctgcaaagggctattgagacatcaatacatcttttgcttttattggtgaacaatactctgttgcatggatatgtcccattttatgcattcatgagttgatggacacttggctgggtggtttccatgttatcgtcatgatgaataatggtgctgtgaacatttgtaagcaagttttggtgtggactgtttttcacttttgggtgtatgccagagaattgaatttctgggtcacatggcaactgtttaaccttttgagtaatagccttttgagtatttttcagagccaccgtatcattttacactcccactgctgtttgaggttccagtttctctgcatcctttccaatacttgttgcctgtctttttagaaaaatagttattgtagtaggtgtgaagtggtatcgcattgctgttttaatttgcatttacccactaatgatattgagcatgttttcatgtgtttattgttcacttatatacattacagtagaaatcttgagcttaattcatatcgttgtacctattctgagagagctttgattcattcatatcttacttaaatttctacttaaatggtggttttaaaaagagcagtttggagacaagaatgcttatgttatttaggaaaaaatatcattatcgaggaaggtctctttctgaacaacaacagcaaaattttattccaaaatcgaatgccaattgatcgtggtgaattaagtgttctagtaataagctgctggctcagaagttaggagcctgtcacattagaatgatccttttcctggtgggaattccatgtttctctttattgagaactcagaacaattgtaaaccccttcaaccaatactctactccttctacctcttcaggatttcaatgcaaaaaaaaaaattcttttcaatcaaaacaattacttttctctttctagggaaacgtaacagagatggtagttttgcatgagttggagccaccagttatttttgacccactcaggtgttcatacttcgtcagtaggaaattcaaggaactgatcttttatgtacagtaaaataaaaacaaatggggaaaaaaatctgccacttatgttcctaaagcgtacagtttaagataacagtcccctctgtgccagcacatccctgtatagccttttcagagttcagcatgaggtgtatttcaatggcagcaagttcagtcttgttcacaggtgtatctaagtaaaagggattttgcagctgggattgatcaaggatcatcagacgagaagagtatccaggtgagcccaatgtaatcacaagcgtccttattaaacagaggtaggtggctcactgtcagagcaaaaaatgagacgagaagacaggaccgaaggtgggagtgatgcagtttgaggatggataagggggccacaagccatggcatattagcagccgttagaagctgaaaagggcacggtattggattctctcagagcttgcagaaaaatccagccttgctaacaccaccagcacagtgaaactgattttggactacttacttccagaactgtaagaaaatttgtgttttaagacagaaatgtgataatttgttaacagcagcaacaggaaattactgcatactttaatgctttctttgtcctttgttaacacaggggttagacatttgatgttactgcttaagtaacactcagtgtcaggcacacttctaaaaactttcagtgtattatatacacagcagacattcaagcacagataaggaaatgagcatgtacttaacattccccaagatcatagagccagtaaacagctgggatttgaacccagaccaccggactgtaaaagtgtacagtatatcgaatgctacttagctgggttaggccacatgactggtgaaattcagctggtaatgtagtttggaaaccatagaatacctacccctacaagcaagaattgtgtggttgataaatgctgtaaagaatgttaaaggagttccttagactggggtataggttggtcagagaaggctttgaagaaggtgatatttgagaactgaatattagaaaagccggggaggtgaatttcaggtggggagcaagcacaaaaaacttgattaggctgcggattgctgaccatgataagagttcaagaaagaaataattgaaagtccagaagaatgttcattgagagcactatatgaaccctccctcccattgtgtggatttggtcactgactggatgtcatgcaaagggtaggaggagagaaaaccttacacattcccattctgccctgtgtgaggtctcaaaagtagttagtataagttataaaggaattatctgcctgtactttgtattgataagctactttttaatttaatttaatttaagtgatactttgttagaaattgtcaatgaacttgataacatcaaaaaatgcaagctgatattttggatcactaaggctgcaatatatgcagaaatcttaaaatttttactcaaagtgattatgattttgttttgcctattaggtgattttatatctaatgttaatacattctagaactttcatatggggataaaatactaataatactaataattattcacacacagtatttcaaaagtaattttaagtacaatttgattttaggttagttgatttatttttgcttatgtaaaaaatcacataagattcactgttgtaaccattgtaaagagtacagttcatagacttttagtccttagtgcattccttccttccttcctcttgcttttttttttttgagacagtgtctcactaggtcacccaggctgaagtgcagtgctgtgatcccggctcactgcaacctctgcctcctaggctgaaacgattctcgtgcctcggtctccagaggaggtgggaccacaggtgcgtgccaccacgcctggctaatttctgtatttttagtagagacgggttttgccatgttggccaggctggtctcaaactcctgacttcatgtgatctgcccaccttgacttccccaagtgctgggattacaggcgtgagccagtgtgcccggccacttagtacatttctggaactttttcatcactctcaaagagaaacccgatatccattagcagtagtcccccctcctttcccagcaacctctggcagccagcaatgtattttctgtctttgtgggttggcctattctggagacttcgtagcaatggaatcctgcaatatgtggcctctctgcctccctgtttccctagctatgttttcaaggttcatccacgctgccccatgaaatcttttttacggctgaatatcctattgtaagtatatgccatatttcgttcatttattcatcatttgatggacagttgggttgtttatactttttggatattatgtataatgctgctgtgaacatttgtgttcacgttttacatgagtgcccaggaatagaattgaataattctatgtttaactttttgaggaacccacacttggcctaagtagctttcccacaattgctgtatgaggtttcccgtttcttcatcttcaccaacgtctgctgtttttctttttgtttttattatagtcattctagtggatttgtcttaagttcacgtctatggaatctttaacaagtacatatattttaacttcctatttgtcacgtagtacattgtgtttcatatgtaagggagagcattttttttttaggcaaattcataaatataagcttgaagtgggaagaaatgtattatagttttattaatgtgcacattttcctaatgtaaatacaggaacaaagtagagacaagcgactgagttgttttcattatctcatattttggattcttgttatttatgttaaaaagtttgtttttgggctgggcgcagtggcttatgcctgtaatcccagtgttctgggaggccgaggcaggcggatcacttgaggtcaggagttcaagaccagcctggccaacatggtgaaaccccatctctattaaaaatacaacattacctggtcttggtggcacgtgcctgtagtcccagctacttaggaggctgagtcaggagtatcacttgagcccgggaggcagaggttgcagtgagctgagagtgcaccactgcactccagcctggacaacagattgagactgtctcaaaaacaaacaaaaaacaacaacaaaaaactttgttcgtttcacagttacttggctatgtgttctaagtaccttttgctcagtgcagagtgaaagaccatctctagggaacgaagccttactggcaagactaggggctgctgcagccagatgtccttcatggcctaggaaagtcatgcgttttttcattgagtatgtaaagtcttcatgaagtacgctgaataagtgcagccataagcatacatcacatgggattttgcagtaatgaagttaacaatttttacaacagtgcaactttggatcaaataaaatacagtacaatttacacgggcttggtttctgaggcaaatgtgcccttatttttatgctctgaattcattcttagtctttaatcacaggttcattatggatgtgatttaaacattacatgtcagtgaacataaattataacttcaaactgatactcaaaatgggtctagtgtgggtctagatggacaactgtcttacatgttcatttaagaggtatttggagactgaagctgtttgtaaaagggaaaagtctctctaagcaaatgttatttattgattttttttttaattcgccaagttgaaagacccttggtcgagaaattctgtatcaaatttaggggagataatcaaaatatagaaaaataagaaatcttttctcaaatctttaaactgtagatggtgggattttaaagaaactcttctgtttctcctgcagaaagtgagctgtttccggatgctatgttgtgtcttttaggacgacactggcatgctgtatatccttgcagcagccctctgcagacccacggacacccccttctcttgtttaaacatcttccagatgtgtttctttgtatcacactgacaagcaattccaccgtcttctgagtttactgttgtccatgtaattttgtttatgatgtttttgtgctggtggtttttattgtgctctgcattctgactcaggaagcccatctcctttttctatttacggtaattactagagagcattttattttggcctctggggcgtgtctgctgtgtttctttgtgtgggcatgtatgttaaaattggaaagtgttttctttgaggtcagggcttttgtaaggtgttctaagaagtttgtcaaaccccaactagctttaaaaaattttttgtttgtgtaatataacctgtttactatttctgcttataagcgtttctatcatcaactttaatgttagtaggaagaaaaactttctcatcttcatatattgactttaattagtgattagtttctggtgatgagatatattgaatcaaagatggtctggtttttccaatatctcctttctgctattattaaataaatgaagaatcacaacagagtttcccgatactggtactaacacactgtttttgtgttgttggtggattaggactgaattacctctgactcagagattcagggttaatgagattttcatcattgagttggggcaaccgaagctttgaatggatgatagcagattgattctgtttcttgaagccagtaggtgctcgttttatgtttcagtgaatgaaaacttgtgtccactgtaacctttttgctttttctgagaatagtgaattctcattttcagagaattactgtcaagaaaaacatgtatcaagccattccgtgtgctctgtttaaacagttacctggtttccttagttacaaaggtttcccttctttctctctacagttagttactaagcttttaacgcgtaccagtcttgatgttaaggagttgtcagaatatagattttttcatgccaggaggctgatttgggagatggcgggactgaattctagagcagccattctgagtttataagatctctggcacaggccataccccaaccagttaagtcaatgtgagggtgaggaagtcattaagtggtttccagggcggccatgcctgaccactagtattctaggagagtgctcccagtgagtgctgcagaagcttgaacacaaaccaccagcagtggtgataagaagacttgttagaaaggtaggaatgtagctttctaggaaatgcagtgaagaatgttttagggagaatctttgcttcaggagctcaaggattatggaagaagaaattcaaaccacagtgtgtaggtatagcagcatggtgtgactcgcaggttggtaaataaaaacttttctgagtgggaatgattttctgcagtctccctgcaagtcgtagggtttactcctttggatgttgcgctgctgtatactttactgtcccaacagcttttctgacggtatgtcctgcccctgatgtggcatccagaggttgctcttctggattcttcctggattcattgactggagagaaagttcatttcactgccacacacatatttttgatttgcggccgcctgaaacctgaatagtcttggtgttgctcagagagtatctcatgactatatttttagctacccgcgtgggcaggccctaggcagtgtcacttcactcactcggcccctcatttttcttatttgcattgaaagcctaagtataaataaggctatctgtgggtagcggtggggggtgtgtgttagagagaggtgggtagggttgattataacctcagcgggtattagaatttccccaccagcagtgacagatggatttctttttccttttttttttttatttgagatggagtctcccaggctggattgcagtggcacaatctctgcctcctgggttcgagcaattctcctgtctcggcgtcctgagtagctgggaccacaggcacccgccaccatgccttgctaatttttgtgttcttagtagagatggcatttcactgtcctggtcaggttggtcttgaacccctgacctcaggtgatctatcttcctcggccttccaaagttttgggattacaggcgtgagccaccacgtctggccgactgatgaatttctaagtcctccactgttacattagcaaaaccaaaacctcatctcttatgagttagggcttgtgatgtcaaatgtagattttcagagaatggctcttgagtaatttctctttctatccaagactcttctgtgttagtcattctttatattttatttatttctattttattcctttataatatttaattaattaattttttttgagactgagtctcactgtgtagcccaggctgaagtgcagtggcatgatctcagttcacggcaatgcctcctgggtcctggttcaagcagttttcttgcctcagcctcccaaatagctggaattacaggcatgtgccaccatgcccagctaatttttgtattttttgtagagacggagtttcaccgtgttggcctggctggtcttcaactcctgacctcgtgatctgcccgcctcggcctccgaaagtcctgggattacaggagtgagccactgtgcccggcctatttatcttatttttatgagacagggtcacactcagttgcccaaactggagtatagtggctcaatcatagctcactgtaacctcagaatgcctgtgttcaagcgatcttctcacctcagcctcttgagtagcttggaccacaggagtgtgccgtcatgcctaattttaagtttttaactaattttaaatttttgttgttgtagagatgagggtctcttgctatattggccagggctgtcttggactcctgggctcaagcaatcctcctaccttagcctcccagtgtgtgagaattacagacatgagccactgcgcccaacctagtctttcttttttaaagcattgttttcccaaaggctctgaaaaccttgttagccaaaaaaaggcacagcaaggtccgccaaccttgacttgacttcactcctgacttttaaatcaatacataaaggcttttgtttattttttgttattttgctcttcagtaaattagggcacctaaatttatattctgagtttcgattaaaaccacccaactacattcatgtctctggactgaactttggtattttctctaaggtctgtaacaggtaacagcacattgaaaaattcagtggaggtgactccatttactgagttgaaaacctttggatgtattcgactcccttttttcacacacgccacatctagtctgtcagccttctcttggcccagtgttgtaaatgttccagaatttaaccagttgtcagtctttggcaccaccctggtcctcatctcttgtacaggtaactgcctcagcctcccttgtttttccacaccactgtcccccatgatttaccctcaacactgcagtcagtgctcaaagtctgctacttctttgctccgaagtctccagtggtttcccatttagagcaaatttcttatctcccccacttcctcctctgtcctttcacacacatcaccgaagtgtaaatggtaaatttctacatacatccactttgcttataacacaccttttgtttcttgtatgattgcaaactgtaaggataggaagaatcgtaactttgcttcttgatagccatatttgctttccctagcagctttaacttaaaatgaagttgtatgtatgccataccacctttttttttggcgggagggtggggtcagtcctcatggctttgggtaagtgtgaatttcttcattaaacccccaactgccacattattccagcgtcatagagctaaacaactgcaagaaacctcattctgcataaaggaagaaatgttggaactggctgggatgcacggaccaaagaagaggttcagttttgtttaggtagctgaaacaatggtgattgttgtaaagtattgttagaggtagagttaaatcttgtctttggattgggagccccctttttttttttttttttttttccctgagatggagtcttgatctcccaggctggagtgcagtggtgtgatctcagctcactgcaaactctgccttctgggttcaagtgattctcatgtcttagcctccagagtaggtgggactacacatgtaccagcatgccccactagtttttgtatttttagtgggttccgccatgttggtcaggctggtcttgaactcttgacctcaggtgatctgcgccccccccgcctcccaaagtgctggaattacagacatgagctgccccaccaggcctggaagaggagtcatttaatttgtcgaaaatatatcagtttaagtgttattgaggtcttctctcagggttacataggatcatgcattctttgcaatacagaacgaacagccagccttaggtcagtaagtgaaacagacatagctggtaaattaagactacttgtttatttctaggtgccaacacattggtatgaaaaagaattgagaatggactttttattcttgtctcttgagaaaggcaactctatttaccgtagcattactgttgaagtcatgatcagtatgcagttagtaaacactggcatttgtttggacacggggtctgacgatgagagcttttgcccctatgagatgctcataccttatcaattaggggtgttggtagttgtgtagaaattaaagcctgtaagggaagttaggctgatgataggtctttatgggctctgcaaggaaatttggagttttcttctgagattctggggagccatggaaaggcttcagtaggggaagtggtgacatggatggtgtcaaattgcagcgtggctgtgtttgtagagaaagaacgtggggtagatggttggaattgggattagttggtggtagagacattttaggagatttcttgtctttggaaagagatgagatttctggtttaaataggtatccaaggaattgagagacagacaggattacctggattttgaaagcaaatgtcaacaatgagaaaaaaagtgccaagtccagtttcggtttctagaccagagtagccaggaaggtggtgtggagagggttgtggtggggagggaggagattgtcaagaagatgatttagtagttatcagtatttagattatgattggagataaggggacggcagaagaatcaaacttgaaggtggtggaggtgatgaaacagcagaaaaggtattttagtgtggcaggaaaaccaggggagagtccagttgccgataaaaagtttgcgttaaatttggcaattagagtgtttctcatggcagtgagaacagttttcctggaagactaggatgaaagttgaataggctgcatgtctgctgttcaaacaccagcacttctcacgtgtaatccctgaaccagcagcattagcatcacctgagagaatctcagcgaaaggaggctgtgcacagtgtgtgttcacaagccctgggagtgttcctgatgtctgctcaagtttgccaccattgccttagataattatttgttttacacatgagccactgtaagattcacagaattccagaattggaatccaggcttctttgtacctctcactctttccacctgccacctgtttccctgtgttgtgtcttggaatggccttcaagtgcctgctacgtgctggactcattgctatgtctcaggaacataaaaggcgagtaagacacagactagtcagaatgtgatctgtactacttcacacctctgaacctcagtttcagcatttaaaaatgtttgtgtgataagtatgctagttgaaaaatgtggaagagaatatgtacaggaaatgtgtgtgccctgtcgcttggtggacacacgttattagtgggaaatgctttttggagggaaaatgtgcatcagaatggtttctggaggcccatacctgtaatgaaagggtgccaatcccagggtggttattaattattgggagggctggaggacacaggaaggggttaaggcatatgagacaactttatctgtttctggaaaaaataaggcaatatgtcagtttatgttaagtccaaggacagagtttatttgtagactttctgttagtgtggaaatttgcatgagatagacaaaaataaactggtggtttgtaatataacatgaccagagataaccagtcttgtgacaatatacgtatacttctgtttatttccttgctggggttcgggtggggtagttattgttcaaccaaaaaagccagcgagtcagtcaggcaggcattgattgatctcataaaatgatcccccagcagtgtcctgggtcctggtggaagaaacagcagcactaactcctttccatcacccacagggccgtaattctaaccagccctgtcagtaaggggcaaccatgaatcaaatcaagcctgttttggccaccctgtgggtacttggagactggctggtggataggactggtttttgtctggcctcaatcccggaggctttattttgtagtgatttccttagaaaaggatttgaaggtgtaggaaagcagtgtgtcttcaaggctttgcagacagactttacttcatcttcaggatgtttcctgcaagaggggtttcctgcaaaacccctagaggccagatgtgccccacaggactggaaccacttccaacctggagagttgtatgagtggatgtctgcactttgaatagttcttgcctgctttagactctaattttcttgtaaaagatttcttatctcccacagttttcttggtaaatggagtaacacataaggcacataagactctcagggacgtagtaaaatgcactatcacgtaacacgcaatgtcaattgaaaccctatccaatttaatgcagatatgtcagtgctgtccaaaagaacttcttgtgatgacagaaccgttctgtagctgtgttgtccattgacaggtggtcggattgtggccattgagtaactgaaatgtgaccagcatgactcaaggaccttaattttaaattttaattgagttaattataagtacttacatgtgactagtggctactgtattagacggtgcagattagaatgtggcatttggggattttttgggggtatatcataatgaacataaaaaggcattagtgattaaaagatccaaatattagaatttctttgtaaataaattaacataaattcccaaggaaattctagtaacataaattcccaaagtgaagtcatatatagttgcacactggcattggtgatattgaactatttatttgatttgatttttgaagacactggccaataatttatttgtaatttgatttcctcgccaccactccatcagtgaaggtacattgacaatccaggtgtctgttagatgctggaagataatcctgctgtagatcttgggtcttttttgattacattgaaaaagcgaaccgtcagatccagcactgcaggaggttttaatgccgtgttgcgtggttctggctgctctgttccctgactgcaccctttaaccatgagcgtgcggacgtcttgctgccatgctgctgccttgacgacggcggatgtctgacatgctcagacgcaaaagagctgacttggcagctgcccagcagatttttataaaggctcagttggtggccggagattcagcctgtcagagttgtgttatgcaataaatcgttttcagcagaagttcttaatccaatttcagctgcagctttttttttttttaaataggcagtaatcaaagataagtacacattatttaatgggagtttggaagaagtaaaactctccttgcagaagcattttcaggccgtttaccctaacctgggaagcatgtctgtctgaagaaatttgctgctttgaagtgcttttaatttaaaccctaggcaagggaacatcattcacaagttcagtaagtaagtttcttctctcaagatgtttcctggccccttatttccagttgtgaatgttactcaggcttcactttatttgaatattgacagactactttttttttttggaattaaatcaattggaaattattagtactactgttactttgttaaaagggaagaaaaggttattttagacaaagttgaagttgtacctttctcattttccttcatcacccccaaccccatttttgtttacacttaatctgtgggaagaatcaacattccctcccaattttttatttggtgctttcgtttttctctcaaagtgttgctggaacaggtttggcatatcaggcagccacaagttgtttcaagtagggtgatttaacagcaggtatatgagaaacacgttctgaaaataaaaggcattcatgtacaggattccagtcatttatccttgggaggaggaaatagcaatcaatcctttccttgtccatgggcctagttttttagaatgttttttttcatttgctattcagctctgtacggctgttgttcagatccaccatccttaatcccatgatatgacattgcatgttggtcctttgggcattggagtcaggaaaagcacttctttttctttttgaaagtagccacatccctccacctgtagagctctagcgatctctatatgtgggtggggggcggggggggcggggggggtggggggtggggttggcaactccaattgccatgtcttagcatttctgtgaattttaataaagaggctctgtgttaggagatcttcctgcctgtgatcctgagtgctcctttccttggtctcctatggccccatcaattcgaaggcgatttctgcatttcagttggttttaggtactaggggttgtgaagagcctttgatgtcctgtgcccctgcccagtggaagcaggattgtttttttgcagcaccttccgtaagtgcacctaggttgccaccttctgcctctttatcaccaggttgttatttaaaacattggtggggggtctgaattccaactttagaacagatgtgtgtcacacttacaatcctgctatgtctatgttatatttgttttataatatttattgtagtggctttatttctttttggagatatggttaaaaaaaaagtctttgtgtcattgtaggctttttttggtttgtttttaattgattcagatttcctggaaggggcctggtagagttggttgacccatgacccagtttccacgaggtatttccctgtcgttactaccagtgcccttgatttgggtaataaatgacttgaccactctacctgtgaagcatgagtgtctaaggtagtttgcctgcaagtgataggaaattaactgtcttccatttttaaatagatgtaattgtcagaaaattgatttttaattgatcagaaatgtgttttcctttaacccatgctttttcatctttgtttccttctcccaaatcaagatggcctgaatttgaaaccataataaaaaccaaggtatgaacaaattgcataacgatggtttgccaattgtaggctagtaatagaaaattccttcccctactcccacttctatccccactactaataatagttttttttcatatattgtttacatgaagcctctgcaaaccaataattttaattttgcttttacctaggagtcagtgtgagttacatatttaacatctctggctactaacacatttctgagttttgaaattttacttcctgatctgatatctgccatggactgactaccaatgccacatttgcgtcaagactctggaattcatctctagaaataactaaaagtttcacgattacttcgtttcccccatacctttgactctaaagggagaaagcagtggtgtggaccttatactaaaggaaggctgagcagagaaatcatgattattaaatgcaggtggtgctgagctcactgcccaactcctgcttccccaggagaggtttgctgttagtacaatcatgatggagttttcaagtctttccagtcgactccaagtatcatcctctgggtggcacccattctgcgagctttactgacctggatgtctctgttttcttgcactaatgtacttgagtccttttcagagatttttgagggcccatattattgaagagttggctgtcactgcagaacaccatcctgtaaaggctttttcttggtgggtgatccaaccaaccttgagacaaattataagaactcttggtgtagttagaaactatatcaaaacaatctggtttttaaaagtgtggatcatgtacctttttgtcttgtaaagcagttcattaacctggtctgaatacaacttggttatattatgcacacatagctttctgtcagtggcctgtacaaggttttaattttgatgttttttgtttttttgtctttaaaatgagtagaggagagcatcacaggaaaataaaattgtatcactgggagctgtgcttttggttggattggatccttcatttggttcttgtttcatggtgatgcaatacttttacttacttcctccccatccctgcaaagaaacagtcaccatggaggatatagttaactgcaaactcatgagatcctgcagtgtcatgagactgtgcatggaaatagaattatcttcttgtatgtgttggatctgttctggaggattattcacatgtaatttgaatgtatatttaattctggttgttgggttttaaagagaagtcatcccaagttgagtaaccaaaagagaagggtttgagagaccgtgtcacgtaaggaatgattaaaggaactagcattacttagtgccatacctttttgggtgttttccgctgtgctctttgatcactgaagaggagtcaaaggaagatttctcagggtatatttatatagacatctgaattctgacagtaatactggccgcatgggatggatgtttgaagcattcgtcttggaggtttcatcttttctttctgatgtatataggcacaggatggagtcctattttgcagagcagagcttctgaaacttgaccgtgtaccagaatcatctgggcatcagtgcagattctgagcccctagatctggatgggacccaggattctgcttttctaacaggctgccgagtggttaaggtacaggtggtctgtcttggagttgcaacactatggaaggatatgttgaatctctagcccggaccgtcagctgtggagagttgttacatggtgttgtctgataaaaggcatgtgatgttatcatgtgcttactttctgagctctggtattttatgtgtgtattatagaacttggaacagtgagtggttctgttctcctttttgtcttttagtaaaaagactcacagtccgggttagagataacttgcaatgccaagttgtggcccacagaccacctgtaccttaaccacttggcacagtgttttttactaattttagtaaattttgtaaaaaaaattatgaccatatacaagtttgattcctgaccaattgctctttttgataagaaattctattattttcaaaagtggcagtaatcctgcagtttaaaaggagccatcacttctcctctaaagggcgtattcctgtgtcctctatattaagctgaccagtaaaccagaatgcatggggtgcttggttttgtgggccattccagagtgggccaagaagaggtctgcactgtcaaaccctgactgattctaccaaggggcctgaagtggtttacagaggacaaaggggataatttggattttcagacagtgaggtgctaatgggctattagttgacttgaacatatgattgagaatgaattattggatctagagggtcgggcaggagcatcatgagagattgctggaaatacaggagaaagagtctgaacagatgtaagtggggtaggggaagagtagctggaatcattggtcaacatttagcaaatgggagtgtgacagagttgttacatgtgtaagaccatgtggacatctggactggcactttttcttacagagaacactgcaaagtggctgaggaacgagtggtagcagccactgtggaggaaggatgtctcccctaggacaccagcctctgctgagaatcagaggtgtggctgagccccttgggattagtctctgtggggagtgttttatgaggatagcagtgtgacttctggcactggatgttagacactggcagggcgagtaggggtaaataaatgtcagtgggaacagtgagactgagcttcgttgagtttgtaattgattccagaagtatttattcagctcttgctatatcaggcatgttttaggagctgggatacagtggtgaacaagagtagtgatttccttgccccgtggttaaatgcctaattaaataagacagctattgagaaaatggaaaggaaggtctgtattgggtgtatgtattttgagtttgcttgacctctaatgatagagttgtatctgggctgtttttttttttttttttttttaaagacttgctctgtcacccaggctgtagtgtgcagtggcacgatctctgcacacgatcactgcaagctctgcctcccaggttcatgccattctcctgcctcagcctccagagtagctggtactacaggcgcccgccaccacgcccggctaatattttgtattttcttttagtagagacagggtttcaccgtgttagccaggatggtctcgatctcctgaccttgtgatctgcctgcctcggtctcccaaagtgctgggattacaggtgtgagccaccgcgcccggccatatctgggctgttttttagagcgttcagtactggttgatcctgaatgaagaatgatatagccacagcagagttagcattaaactggaaggatatttcttctggccttcctctcccccatcttggataggttgagtgcaggcacacctttgctgtctgcatctgggattctgctagaggattataaggtaaggatgattcaccatgaccctacagttgagaaaggcagcttaattgggactatttggaattattacctactggtctatctcttgtgaacagcactgagtcaactcatctactagatttgtgtcttgcatcagcattgagggagcaggtgacaagtctcaaccagcactgtagattacaaaacacttgtgtgttgtgtgtgttttaagtttgaattttaatgtgtagcatttgaaaccccataatctgggtcatggatttgcttctcctgtatttaaagtacttcataggtgtaatgaagctgcttgtgtcagtaactgaaccttaaatgcgcttcctttcttgtagttttcatctcacatggtttatgttttaattagacattagttgtaggggaataattctctcaactggagcctgaagtcaggatgaaggcaccagcctgcacaggatgcaataaatcgtcatgggaattttacattgaaagctattttggggccttataatttataaactgtgtacatgtaggaaataatagtttataatctcacgtcattgtttgttgtggagattcgaacagtgagaataggaacctggtggtgatgaagagaattctgtctgacagcctttatgaatagactgaggctgctgaagaggtggatttcagcctaataagcattaactcctcctgcagttaacactatcattcagttgcagctagtatattaggagagctttcttgcaaacccaggggagttgctgtaaagattaattcagctatatcatgcttttcatgtgttgtggtgtcaagtcagttgcattttactcaggttggtatttgggttcctccatttttctggtttttaatcatttgattgggaaggtctccagtgacctacacgcagtagcaggttagaaattgtgtttctcttgttaggttggggcaaggtttgctggcttctcttagccttcatgtccgaaccctgaccccgtaccgtggtctgtggatgttttggctgtcttgggagagcggacaggaagactggatgtacctccttcttctagaggcactgcccagcagtcggaaatctcagcctggcaggcttctgtgagtgaaggatgtgaaggagaaggtggaaatcctagttctctcaggactttcttcctcttgctgtagaagatggagaattactctcattctaggaaatctgtgaagcttaacgaaagtgcagcttaagttatttagggcttagagtctctatgatgttggatttctaaaatgaagtttgtatttatgcagagtataggaacgtaagtgctggaggagacgtcagatcatctagacttctcattgagtcccatggaagttttctgtgatccttcagtgttagggaggaaaaaccaattcttttgtataaaccagtaaaacagcaccagactgcccatgagattttctgccttctccttgaacaaagggaacctgaatatccaaaataccccaaatcatgattttacctgggatattaatgttattattattattatttttagacagagttttgctctgtctcccaggtgggagtgcagtggcgtgatcttggctcactgcaacctccgcctccccaggttcaagtgattctcatgcctcagcctccccagtagctgggactacaggcgtgcaccaccacgctcagctaatttttgtagttttttagtagagacagggtttcaacatgttggccaggttggtctcaatcccttgtgatccgtccgccttgtcctctcaaagtgctgggattacaggcatgagccactgcgccaagccgttcttcttattcttttaaggcccaaagtatctgtatgcttccatttcttatttatttatttatttttttttttgagactgagtctcactctgtctcccaggctggagtgaagtggcacgatctcagctcactgccacctttccctctaggttcaagcaattctcgtgcctcagcctcctgaatagctgggattacagtcgcgtgccaccacgcctggctagtttttgtatttttagtagagatgggatttcaccatgttattcaggctagtcttgaactcctgacctcgtgatctgcccatcttggcccccaaaagtgctgggattacaggcgtgaggcaccatgccaggcctgcttccatttctaaaatgaacttttataaaatgcttaattaagtctgatgtaggtgtgtgaacataagtccttcttagattaacagctacagaagagaacctctcaatatccttggccatgtgaatcatcatctattaataaaaactatagtgacttaatcttgctggttctttaaacatgtatctcttcctatttaccttgctttagtgactgttgtcaaccatgtctgtcttcccacctcttgctctgtctcaagtctctgtataattttttcttccctctttagtgcttttaaaatttgagtctttctttatatctttatgactggaattgctggaatagtctctgggctggctgtttgtttttggtcatctctgcattcattttgttaattcttaagaacttgtattcgttctggagcaacagacatgaggttgccagtttgaaatgagaccttcaagatccatcattaatgtgtacattaaaacaaaaatcatgccagttgtatgccgccaagatcagttgcctccttctgcagtactctctccttttatttgtgattcttttacttaagtggccaatgcggatccaattccatgtcttctgactggattgtaaattccttgaatgcacagcacccatatctgctgtatcctttgagctcccaagggaggcagcaacatttttaagagctccgtacatatttctgttgcagtgtacattctggcattgctcactttataaaactcaagtaaaatgatccattatccttctggttgtgggtataacaacacctttttctgaactttgtcaggaatataaaactattactagttgatgaacgtatttgattttggggcgtataaagaagtgagatggttgtgtgttgctttcattctttttaacagcctgtggattcacttttctttgaggcctgttcagaaaggtcattgcccctttaccttatgggtgtaattctgacattgagaactgggtcgtggtcacacagtacgtgttcggaaattcctttaaaataaagtttattttgactctgaatattgccttgctttctattcagtaactcctctcttttcttatgtttcttcaggatgacagtgatgggattccgtggtcagaagaacgggtggtacgtaaagtcctttatttgtctctgaaggagttcaagaattcccagaagaggcagcatgcggaaggcattgctgggagcctgaaaactgtgaatggtgagttgactcttggaatatctcgttggaatgtacaatatctctgggcgtggacttgttcctgaattggatgtattctggcagcttgtgcttcctggtctaggcacctaaaggcagtctgtaggctaggtgaatctgcactgcagacatcctgttgggtttatagggttgtttttgtgttcctttatgtaccgcgttatatagtggacaaaatacattagtctgttctgtaggtcctgtcttgctggtttttctatatgtatgtctttccacactggtatgtgagcagaactctttgatgatcttgctgaaatgtggagtctttagttcttgtccccgggttgtataggaaatagcctaaatctttctgtctactgcttttcctgctctctggctcagcggctttctcatctctccttccttccttgctgggcaggttcctgcagtgggacagctttgcatacctctagaagtgtgcttcttcctggatgattatcacttggctccttgatgcctggaaagaaacttgttcctatatgagtttgttctcatgtctgttttgaacagggttcatatggtgcagatgaagtcatccaacagaaagtatctgaggacaaacatttgcttgtagtttactattttatttcaggggaatgcagtgacattctataatcccctgtgtacttatcaggattacagttaaagtgaatgaattgaccatgtttttgtttatgcttccttggggcaaggagatgagaaagagcaggttctgttcttttttgagagctatggctctggtcttaggagagtcaccacatatggggtacttgacagtttgttagggtgccaaaggacaggttcaccatggcttccaatttgtttcccaccaccttagttgtatggtgagttgtctggcagcctcctgttggaactagtgttcacaggcactagtgcacagcagtacctgttgctgctctgtttctatggggcaatggcagagtttcctgagatgacctctctgaacttcaccattcaccctagttgtgctgtctccttccactgttgcgtgacttgaaagaagagcctctgtccaccctcccgggttttctttcttatgggtgacttgcctttggaggtcaaccattaaggccatagtggctcagtcatgtgtgcgtctctcaacaaatctcagccaacatgtatgggaaaggcccattttgagtcttaacatttgcagaaaacaaaataagttgtggaatctattgccatagaatccaatttagaccctcatagctgctttcctaaaaggcactctgccttgttctgtgggtctccagcagagagggaccctagccattcgttgcttgtaatacagtaaactaaaaaccttgtgtgtagttggagaacatttgatgtgatatagatcgtgtttattgtcattgattcacgttgaacgtagcatcttgcttgattaaatgtggggggttgggtatgaaggagaatatcacttaatcctagagtttagagtggagcagtgactgctgtactgttagattgtatggttgtgatgctctcactgtactgttcaggaatggtgtaatgccttagtgtttcttggcattgccaacagtggaaacaaaaacacccatattttcttaactgggaaacaccagcttttagaacaagaagttagccagatgttcaggatttaataaaggtagaatttgagtaaatgaacaaaaactaaagtttgtcattccagaagcaaccagtgctgtcagccagttggccaaatgtaggtttagctctggcagagtcaagggattgatgatactgaggagaaaaatctcagttggcaaagatgcccacattgggatcactgaagtctttttatttattctggcactaccttcataagggaaggttagtttttgtcatggtagtttgcttttcatccagataaagacttttaagtcttttaaaaaatacagagacacctcggcttctctttgggttgtgaaattgctgtgaatatgccattttctagtttgtgttggtttttatgaaggcagcgttccaaggttacctttttgttattctgtatgtgggatttctatagcagttctgagtaaacagatctccttgtttcaggacttgagtgtgctttaagaatcattattttgcttggtgcggtggttcatgcctgtaatcccagcaccttgaaaggccgaggagggaggattgctggagcccaggagttcgagaccagcttgggcaacaaactacaaccctgtctttccaaataatagtaataataataaattagccaggcatggtggcacatgcctctggtcccagctagtcaagaggctgagacaggaggatcacttgaacccaggaggtcaaggctgcattgagctatgttcacaccactgtattccagcttgggcaacagagcgagactctctctttaaaaaatcattattttcaaggcagctaccatcttaaacaaagtgtactttcttattttggggagctacttggaatcactggaaaacagaattggtatcatgggaagagctcctcttctgtaggtgttttcggagcatgatccagagaaagctcacacagtagggagcaaccaagactttagggctggtgaggctaggagtaggggttgttgtaactgcaagctgtgttgtgcatatatatgtggacgtgtctgtgtgtctttgtgtatatatgcgtgtatgtatatgcatgctttgctgaaaaatccctttagtttgagtggatactttatagtcagccatcactcatgtcctatctcatagaaacacttcctaaatgtcaaatgaaatcagaagataggttagtgggagtggaagcagggtgtattagtttgttttcatactgctgataaaggcatattggagactgggaagaaaaagaggtttaattggacttacagttcctcatgcctggggaggcctcagagtcatggagggaggtgaaaagcacctgttatatggcagtggcaagagaaaatgagatttcgtgagacttactcactatcacaagaatagcacgggaaaggccagcccccatgattcaattacctcctcctgggtccctcccacaacatgtgggaatgctgggagatacaattcaagttgagatttgggtggggacacagccaaaccatatcacagcggattgactataatggtggtggttttttgtgagcctgtcacccaggctggagtgtaatggcatgatcttggctcactgcaacccccacctcccgggttcaagcgattatcctgtctcagcctcccaagtagctgcgattacaggcatgcaccaccacacctgggcaacaaattgagaccctgtctttacaaattatagtaataataataaattagccaggcatggtggcactttttttttttatctttagtagggatggggtttcaccatgttggccatgctggtctgaaactcctgacgttgtgatctacctgcttcggcctcccaaagtgctgggattatgggtgtgagccacctgtcccgagccaggatggataagtccatgcaagatgtatgtttttttttcaattttttttcttcttcttttttttttttctttgagatggagtttccctctgttgcctggctggagtacagtggcgctatctctgctcactgcagcctctgcctccgggttcaagtgattgtcctgcctcagcccccagagtagctgggattacagacacgcgccaccacacccagctaatttttttgtgtatttttagtagaggcggggtttcaccatgttgaccaggaaggtctccatcccttgaccttgtgatccgcccacctcagcctcccaaagtgctgggattacaggggtgagccaccccacccggccctcaatttttaattttttttttttttttggttagttcccaacccaaaagattccttttcaaatgtcaaaatgtttccactggttcattaatttttaattgtcacagaaatttgtctggtggtagagttgtaagattgtccagtccagagccattgctaggaggtgacatatgctgtgcaagcaaggatgagaacatgtgccttaaccccagagaagggtgggtggtggtggagcttctgcctctgtgtcctctttcatgccttcgaggttggggacagtgacatgcctctgagagccctggcactcagagactctcagagatctgtaaactgaaagacccatctaactatggggcctttatgactgttagatgtggtagtgactttcttaaagtcaaacaggtatttaattcacagtagcagaattggaattgcagctcaagtcctgtaactttgaatccagtacttttttgcaagacagaatgcatgaaaactacattggatctttgcaataggaatattgaaaagaagatgttttgttttttcccatttccagcgttgtttctggatctttgattattggaaaatataaatggatgattggaggctttcctgggaaaaatcatttgtttttaccataatatttaaaaataacagcagaatggattttacagaatttttatctaatttgaaaataaaatacatgtgacatctcctgaatcattggcatcctggtgtgatgaacaagcagccctttgcccttcatctgtgtgaagggggtcgggtatctgatgcctgggaacagtgtgtggacactgcagcttgtatctgagcagtgagctcagctgccctggttctgtaggtctgtgagtagtaataacctaagcagacataagatagtggagacacgtcgtttttcatgtcataaaatccatgtttgctatcagtcttgtttttgtggttttacagtgacaaggaatgaatttttttttttttggccctactattggtaggatatgtgagttttgaacagcctcatgagttgtctgtgtagcaactgatgccatcgttacagcttgttggttattgctgggcttaagcgtgaagtggtaagatttgctgattgtgagccttctgtctactttttgttgtagataatgccacttttcatggatgtaataaattgacaaaagctttggaaaggactggcagaggctgagaccttggccactctttgagggcccttggcctgctgaggctaaaattagggacatttaaataataacatgctacacaaataatgagtacacagaattacacagtcagagagggaagctattaactgtatttgaatttcatttgcttcctataaatgtcatcttagatcaagtcctttggccagcaaaacactcttgatgagatttaagggaccctggattcatttccttaaacttaccccgggcagtagttgtgatggctagcctaccttgagttctcactatttgccagttattgttctagtactttagctgtatttaactcatttaatcttcagaacaagcaattttataggtgaggaaactatatactaagagtggattagcaatttgcctacccagctattaagtggaagcatgaggatataagaccaggccttttggatcagacctcccatgctttctggattagagctcccaagcttgtagccaccacttagataaggagaggtaattttggagcctttcataaagatagcattccaaaaataagaatttgtaggaagactttactttttttaagtaggtatttatttggaaggaggtaagtggattttttttttttttggtcgggggccgggggtgaggggatggagtcttgcttgctctgttgcccaggctggagtgtaatggcgcaatctctgcccactgcaacctcagcctcctgggttcaagtgattctcccacctcagtctcccgagtagctgggattacaggcatgtgccaccatgcctggctaacttttatattttagtagagagagggtttcaccatgttggccaggctggtctcaaactcctgacctgaggtgatctgcccacgtcggcttccccaagtgctgagattacaagcgtgagccaccgtgcctggccgtcagtaagtgaattttttattgggaaaaagaaccttggaaggcatggtaagtatttattgactgtgtttctgggctttatttatgatttgtaattgaattgatagagggtatcaaaaatgtagactgtgaattggtttcctcctctcttcagtcagacacacagatgcatccgttagtttccatttcctcacttagagttttgtgtttttaatgctgttgtcgttctggctggctggaactcactggacggatggtgcatggatgttttggcaacagctgccaatttgtagccaaggaccagtattggaagcgcagatgtgggacattctgtagccaacaccccccaagccccctttaagaaatataattttgaactcctttcagaatctttcagtcatttccaaagattcttgatgtgtgtggaatgaaatgtgggcccgactgtgaattcattgttaacaaaatatgttcacacaagtcataaaaacgtatttgtgaatcaaaataaaaaaatgtcaggtcacatggtctgatttacgtaagtttatttgtgggccatatttgaaatgaatgtctggggtataaagtgaccttccctctacgaaggggaacacctgtcccttctgtttttgctggaaactttcaggtctagctgtactagagatggtgcctactttatcattatcatttattattatttattattattattttcttctgaagacagtggcttatgggccgggcgcggtggctcacgcctgtaatcccagcactttggggggccgaggcgggtggatcacgaggtcaggagattgagaccatcctggctaacatggtgaaaccctgtctctactaaaaatacaaaaaaaaaaaattagccgggcgtggtggcgggtgcctgtaggctgaggcaggagaatggcgtgaacctgggatgcggagcttgcagtgagccagatcgtgccactgcaatccagctggggcgacagagggagactcctgtctcaaaaaaaaaaaaaaaaaaaaaagtggcttatgcttcagctttaccgaagtgttgatgtctgtgtgctagtctcctcctctgcaagctgtagggagaccagttgcagcttgagttttctctaacactcctgtgtcctggcctccagacttttttctttccctctcctgtttcccctgatgtgaggacacactctgcatgaaagaaagctgggtgaaatgaagggcttcaatgttgttgaaaacaacttattttttgtttacaaaggaagctacatttgttgtggaaaggcgagaaggcttgggctctttgtctttcagctgcttttttgatgtagtgatgtaggtggggcatttctcagattttcattttgtaagtgttggagtttttattatgtgggaggcattgtgggtataaaaactgagatcaagttgcttactttggtcaagtcctaataccttatttcatcccttctaagatgtcattgagtgatgcaccattatgttatgtatcagtaagcaagaacaaaacagtgcttccaatgatgaatgtgggacagcttaattatgagatgcatgttttaacatgagaaaaatagatgcaacttaaaatctgtgaagcaggataaaatactgtaggataaatgctttaacaaccaaatggggctgggtactgtggctcacgcctgtaatcccagcactttgggaggccgaggcgggcggatcatgagcctggccaacatagtgaaaccccgtctccactaaaaatacaaaaattagccagtcatggtggcgcacgcctgtactcccagctactcaggaggttgaagcaggagaattgctggaacccaggaggcagaggttgtggtgagccaagatcgcaccactgcactccagcctaggcaacagagtgagactttctcaaaaaacagaaccaaaaaccccaaacaagtgtatgggtgagtgcaggaggctagcagggaggcagatgatgtcagagacccagtcctaagatacaggaaacgttgtatatccatgagccttgcaaaggggtcttgaaagatgcgagagatttctgagcaagaccttggggtggcaggggtcagcaaatatttgactggtctgttggtgtcataatctagtgggacaaatggctgcaatggccggtttccgtggccaagtcacttgtactggtctgatgccaaaggagtggtgtgcaaaattaaggactgctagagcaggaagagtctttttagaggtatataggtcaaactcatcattttacagatgaggaattttgagccttgatgagaaacttaactggaaggaatggatcatgctgaagcctgattggaaccagaaatccaatttaagtgacagtgaggcgccacgcttcctagtaggcatggctgcttgcacgcatttcctggagcgttaagaatggaggtgcctgaggaggttaatgtgctcctctttcgggtcactttgtgcttgacacccactgcccctctctttctctctgcccgcctcctttgtcagttctgtgagctgggctctgtttccctgattacatcatcattcccatccaatcctggacgactttaggagggacacagcactcaggtagtgtcacctgggtagtggagtctgtatgtgtagggctatagggcggaggaggtggtctgtgtagggagacagaagggagggagagcagtctgagctctagttgggcctgtttgctacagcctatttgcttttgccagtttttataggagttcagtttcaaagaagtggggaaggcaaatggatggaaatttgttgtagtctagaatttttttttttttctttgaaacagggtcttgcatgttgcccaggctggcctcaaacccctgggcttaagcagtcttcccacctcaccttctgagacactgggactactggcatgtatcatcatgcccaggttgggatttttttttttttttaagctgaagctctttctataagggtctctctagtttctttgcggatgaaattaataactccccctccatgacatcacactggaaattatccctccttcatcatttacctctctttactggttcattcccaccattgtagaaacatgttcttatttttcccataataaagtaaagcctcccttgttcttgcatctcctgcctgctgtatctttctcttagtttatagcaaaatcccccataagaaaatgtctaaaaggtttgtctccatgcccttctatttatattcatattaatatcccccagccttcctttgccattcacctttaaacccctcacgttgggccacttatcaaggtcagtaatgattgcccaagccacatttccattattctggggtgtaattgcccatttagcagcatttaccgtgattgaacatctcctgaacaccacctgcctgcttgactgctgcattttgattttattattttattttttgagatggagtttcgctcttgtccaggctggagtgcaatggcacgaccttggctcactgcaccctccgcctctcaggttcaagcaattctcctgcctcagcctcctgagtagctgggattacaggcatgcgccaagacgcccggctaattttgtatttttagtagagatggagtttctccgtgttggtcaggctggtctcgaactcctgaccccaggtaatctgcttgcctctgcctcccaaagtgctgggattataggcgtgagccaccgtgcccaacctatttttttatttttattttttagagataggattttcttctgtgggccaggcccaagtgcactgggtcgaccacagctcattgcagcctcgactctcaggctcataccttagcctcctgagtagcttggaccacaggtgggtgccaccacgcccggctaatttttaaattatttgtagagatggggtctccctgtgttgtccagggtgatcttgaactcctgggcttagctgttccttcgaaagtcaagtttaagccactgtgcctggcccactttgatttttttttttttttttggataggcctcatgaagttaagatgtcccaaagccaactatctgtgaggtctctcatctgcttctgttgtccgcttgccccttcttccctttttcaataagtggcagttcctttgttctagttttggtggccaaaaccttggagtcatctgttacttcttttttcagatttttgcatttagctttagctaacctgttttactatttatttatttatttagagacagtgtcttgctatgttgcctaggctggagtgcagtgggggctatcacatctcactgcagcctgggctccttccccatttaacatcccgccccaaccccccgaactcaagttgctgggacttcaggcatgtgccatcatgtccagcaaatagacacagtgttgcccatgctggtctcgaactgccgggcttaagtgatcctctttcctgccttggcctcccagagtgttagaattacaggtgtgagccacttcactagtccttagtgaacctgtttgaaactcacagtaccttttgattctgaacttgtactactgctcctgttccacgttgtcatactttctagcttaggttatgttgcagcctccctgtgctcgctcagcttctgcctttgtattcctcctggcagcagccagcataaacctttaaaaatgcaaatgaggctgtgctatgctctgttctgattctggcatatctgcctatgctcttaatgtgaaagcgaaatatcctcatggctggccacttgattgggcccccgtatcactctgttctcattgtctctgtccctcttcctggtattttaaatacacaaagcatactctgtttagctctagctgatccttctattgagaattctctcccttctggtatctatgtgacttgatctctctgtatgtttcaggttcccctttaagtgcccccataccctggaatgttccttgaacattctagtaaaaagggtacctgcctctgttactccttagcgctttaccttatgaagtctgtctgcacagcatttctcactgcctgacattgtagtactgtgagggagggacatgtgcgtgcgtttattctaatttatttatttatatagattttttaatagattttttaagatatagttttttatagatattattttatagatatttattatttatatagataattatctaatgtgtctagccacattagattgtaagcgctttgagaggaaaattcatttgtgttgactgctgcttttccctgtgcctgggatctccgaagtctgtgttgtgtgaatgagcatgcagacggctcagtggcccacctgcatgccacccacgtctctgccgccccctttccagcacctcttgttgccatgctgtggatgtgccactctctgttcaggggactgagagtctgccaactgggactccagatttcattttagaaatgctcacaccgtgacaccctaggcccccagatgtcagctcatcttattttccccattgccagagggaatgtgcattcataattgtgtgatatgtctcactatcatagagattcttggaatagggtcagccttgtgtcctttctttctgaaccacattcatcgcatccctgtttaggtacaaggtatgttgcttggtggtttaaattacaattgggcttttaagaaaaagtaaaaaaattatgtctcttaattctcaattgatgatttttgtacttttactaatatttttggggttaatttaatgggccttaggtgttaagcagcttgtacaaggccacctagcagagaagtggtcaaatcagggtttgagcccaggtcttctgactccagatagctatctctccctctcccccacccctctccctctccctgttcttctcccccttcctttccccctctctctccctctctctacttctgtgtgggtgtgtgtgtatgtgtgtgtttaaactaaggaaagcctgtgaaaccacatatctccagtatgtcttgttgtgacaagtgtacacatataaccaagtgagcaacactccagtgtagataaaataccttcctatcacgctgaaaaggttcctccttctcccttcagtacagttgacatgtttgtttgtttgtttgtttagagacagagtcttggtctgccacccaggctggagggcgttataacctcaagatctggcctcaggtgatcccccctcctactggcattacaggcgtgagccacttcgcctggccggttgagttctttaaatgtatttgctcattgtggagttcctcaacaccactgcctgtatttttaagagctgttatgcttatcgatgggtttatgatgtttgtccagaatgtgccgaatgtctgagagtgttggggactgaaagtgcctcaaggccagaggcccatgtgcatccccttagcagctccagaagtggcttatgtaggcacagtgttggaataagaaccctgcgattggaaagatgatgacattctcagagtcagactgtctcttaaactggcatcatggtttttgttctgaactgttgtgtaaactcagagcagatgggctttggaggaggcttcattctgactgtcttcagtgtcacctttctcgtatagcacattagccaccactgtttttaatctgtgagtattcggaatactcagcctgggtgtgtattaatgttaataattaaaaattctggagctagggtcccagacttggcttttttccccagaggcactctatagagacatctgtaggtcatgtcttttgctagtgcggtgtctttagttagactgaatcctgtgaggagcccatgatctccttgtcgcccttgaggatgccaagacagtgtgcgtgtgcctgtggtgggataggattgctaatcatattcttgcggctgtggtgaaagtctgtatattagtcagctcaggctgccataataaattaccttagactgggctgctgatataatagaaatttccatttctcacagttctggtgtctgtaagtccaagatcaaggtgcaggccagctgggttcctgttgagtgccctcttcttggctggttcctctgagtcttcctcctcatgcgaggactccagccctctcaggtcagagccctgtgcccctatgaccttatttaccctcgatcaccttctcatggaccttaggggttagagcttcaacagaagactttgtggggagtacattacagtctctgcaggccttggacatggtgacaattttattccagtctaactgtagattaaattaaactccatgttaatctgcagcatgttttctttcttgcttgtgtgatactagaacattttcctggtaagtcaggaaacccttagagctgtttgacctttgagaagcctggatggagtaactgcttttgacagggggatggcagttgtgatggtcctgggaggatgtttctgttgtcatagattatttggggaagcattgtggaattatttgaggacttctgaggtcgagggaatcctatctgtttaacagtaattcatcttatctaccttttgtgactcccagccattttttattcttgacgtgtaatagaatagaaagaccctgcagggtcaccagatagggcttcctacagccagaggtgacttgtttgtgaataggatttattgacgttctttcttatagagtgatattgttccctgctagagaaaggcttcatgtgttttctaaatcttcgaattctgtgatatgtgtatttaagtagctttaattactatcagatttattgtaatggactagggtagttttgctgtgcttgtgaatgtcttagatctgatttccctcaaatttagagggccctttacttagcttttggaaataacctgttattacttgagccactttaaatgtttagagtcctgtatggtatatctttaaaagccagaagagtgattactagatatgcttctgggaaattaccctacagttcataaatcccttaatttacaatttgatttttaagctcacctgctgccaaatctcatctatccttttagcttcctctataggctttaaaatgtttctgtagagtcccagatttagcttcttcataatttctttcccaaggatgataaaaacagtacaagtctatcgttcaaggaggtgtggggatgaggagagaaacatgagctattttataatatattataaaatatatatatataatttttctacaacaaactataatataaaatatataaatattttataatattttatattcgccagtgacatcccattcttgattataaaccggcaaggccaaacctgtaccctgccattgacatccaaggagagctgtctcttgtgtttcatggtaacttatgccccgcatgctttcagaccccgtagcttctctccctgacctgttactagtgttcttgcttcatttatgctttggagctaatggctggttcagctctttctgtgtatacacagaaaggttgtcttcctgtgtgatctgccctgcccttgtcatctgggtaatccttaactgagtccctgttttctttctgcagttaggtgggtgcctgttcatgcttggtactgccatcttggtgacggggaaggccacgtgcggaggctcccaggctagcttctggtggtctctgaagtggtagtctgcttttagctttccatggctctcaaagttatgctgccatgtgttacatgaaggcagtccaaggtctccattttgcaatcatttaactgtcttttatatttaatcaatttatttaactgtttgtttttattttttctgttgcccaggctgtagtgcagtgacacgatctcagctcactgcagcttgcgtgcaccgcccccagcaaccctcccacctcagccgcctgagtggatgggactataggcacgtgtcaccgcctggatgatttttaaatgttttggtagagatggggtgtcactgtattgcccaggctggaacactgttatttttgatagtctgcttccatcccatgtgattggggttttcaccaagggacccatgcttttgaatgcttatttgaaaaatagcatcttgcctcctttgagagtgaatttagaagaatgcatctagagtgatctgttccctaggggctcccccagcagtgtaccctccatgagatgactttgttcctagtgtcatttgaaagggccttccagtttgctcagttggaaagtgttacagagttttaaagggtgagctggaaggctctcagctggcactttctgaatccctctgaggaaaatgttggcaaactcttcactctgcctgaactctttttataaatggagaagccaggagttgggaaactaccacacaaagtgaggtcgaaccctctgtggaaacgtgtcattatcctagctaagacagtggactattttatggtaatatgatggtatggaccccctcccaccctttgatgttttgatgtttcagagagcccttcagttcatcttcctgctaccaaaaatagaagtgtgtagtgcagcaatttacagtgtatttctatttttaactggagagacttttttcctagagatgcacatggcttttagtttccttctttgacaacttaaatgaggagggcggtgcttgagtgctttattcaacaggtgtcccaccttctaaggaaagtccacttttttcaccccctgcctcctgcccttccctgtttcagagaacaagtttccacagtaaggaggaggaacttgcctttgatttattctcatatttgttgtcatctgtccacttgcatttcagtctgatgagaaacccaatgtgagtgcgccatggagctcgagaggtttccatgctcctgagctgtctgactgcagagcctatagccacttctgcctagtccccagagaagcctagatatggagaagaacccaacagtgcttgttggtgtggggttctctatccgttcatcgccgcactgccgcacactcaggtcaagcagggacgtccttcttagctctgtccacgttgtgcagcccatgcttggtgcttctagccttctggggtctccctttatggacgaattccaagggaataggttaagattgccatcaagtggctgttcttggtagtggatgttgacatccctgctggccgatttcttagcccctctgtgagaaactctgtgcaagggattgcctgtccttttgtgggggtaggcagttgttgacagagctcaggtcatctctgggaacgcaagctgggccttctcatgtgtgctctgtaaaactgaaggaagactgggttgtccttggatccatgaatacagaccatcagagatttcctggagagaatggctgggcatctaccctcctgccagctcaggtccagtaggccgcagtcctccagctctgctagtggaaattgttgaaggatcacactgtcatccctgtaagtatgtcccagggtcccaccaagggttcagaaaaccgacaaacttgataccaccatctgtttggtttgttgttttccgtctcagaaaatgggatactaattttttttcctcagaggtggtattcttacgatgaatgcagttgatttatttcaggttcttagtgcctggaagaatgtaaacatttaaaagggcgatcattattgaggttgtagatatacagtaccccgtgacttcctatttgtgctgtagctttgtcatgaagcaggacacctaagggacggttttcaagttggtttgcccccttctaggttctgaatgccaatgtcttgtaatcaggcctcaccctagggcttggcgagctgagactgctgcggccctgacaagcatggaaggaaggattgcctctctagttttccccagcaaggcatcctcagtggtgttggtgaaagctgccctgtaggcgtagtcggtgttaggtttgtataggaggggtaccccacagactattgggttctgaagtctctgaggagccctagcagagagtttcagagccagcatgtggcatgtaatggaggctagatctgtgccagctgggtcagtggggaggcctgagacagacagaggggagaaagtgactgtgggagagcatccgatgggaacaagctctaagttagggtcaacaaaagaaaattcttaaggcctatctattttaggcagctttttagaaatgataaaggctgtgttatgcaaccattcactttgcaatctgtcaaatcatattaaaccagaattcctggactgtagccatctcaagcaatattgaatgcatcaaaaatttgatatgttggaatgggcactgacattggatcgtaattcttgttctaccagtaactgggtgtctaggagcaaggcatgccttcactggcatcctccttatgtaaaacaaaacactagatctctttgtctcatttggttttgtttcagtggtgagtggctttggggtgttgaaggcatgctcctgctctcccactttggtggctctatcatgcttttgggtcagggaagcatttggatgcttttgcagaatgtggagggaagcgaatgagaagtattctggaggaaatgtgcccttcatggctactgaccctgtcctttggtgtgtgaaggcaccagtgcagtgatcccagagtgtgtgtgtgtgtgtgtgtgtgtgtgtgtgtgtgtgtgtgcgtgtctggaggtggcaaaatgtgagtccaacttggcctaggttttagtgccactttgtccagagtattagttgatgattgctgtccttcctttactgtcaagccacgttaaggtggcctaaaaccatttctaataaaaatcaccctttgggatattcgtttgtatacgaagttttccttacagtttttagttttctgaataagcctggggctctttaacagttccaatctctatttccccttctcccctcccctacaagctagactgattaccacctcgagccatctgctgctaaatttaaggtgatttgtcagcctgctgctgcatttgccccctgaaaaggattcaccttctgtccgacttgccctgtttatgggggaggtggtgaggagggggttctaagcttgtaacaggggacgacagagggatgagggactgctgcagacatgttggtcagcatggtcagcagtataggtcattgctacccattagaactgtgtgtgatgttggaaacgttctgtgtctgtgctgtcctatatagtagccactagctacctgtgatgcttgaacttttggagctttgctgttgtgattaagagactttttttttttttttttttgagtcagggtttcgctttgttgcccaggctgctggagtgtagtggtgcggtcttcgctcattgtaacctccacctcccaggttcaagtaattctcatgcctcatcctcccaggtagcgggggttacaggcgcccaccatcatgactggctaatttttgtatttttagtagagatggggtttcaccatgttggccagactggtctcgaactcctgacctcaagtgatctgccaacctctgcctcccaaagtgctgggattgtaggcgtgagccaccatgcctggccaagagactgaattttgtgtttgatttagttaatgtaaaattaaaaagccatgcgtggatagaggctatcagtgcagccatagaggcaggatacgcatgaaatggtggtgaaattcttcctgtgtatccctatgctctgttcttgcttttggcaggaagtctttctgggtattctttcagctatcctcatggtgtgttatgtagacaattctgacaaagttaaaaaaaattgatattttactcaaatgccttttagtcttttgggcaatgttagaatatgtttgcccatggtatctgtgccactataatgagaagataataaactacagcctagcaatttattgctgagttcaaaattatctttgtctacctttgtcatttaccttatgtaggttttcccttagctccacgtaaataatgttggtagctccatctcatttccatcattgagtaattctcttgtgattgactctacttctgtgctgttgacacagccagtttccctgtgataccatgtaaattttaaaattgcctttcaccatattactaaagaaagtcatctgaattgtggaaaaattcaagatttcagaaaactgtaaaagattgccactggagagaataccataaatgatgttccatatttatcgttgcagcacttgggttatttctggtcttctccatgatgtatgaagcttttaaggaaaatgccaggaagaatatacacgaaattgttaacagtgattactggtatattgggacttggatgatttcactgcgtaaataagaggaggaggattctaggtagttttgacatttatttaaatgtttagtaacagaatgaggttacgttagcaggatataaaaggcacatattttgagaaagacgcaaaactgctttagttacagaaacaaaatcagcctccaaacaaaaaaacaaaaactgtaaaattgtaattaataaaggcccaagtatctagaaaacatcgtatgtctagatttctgcttgttaaattcagtgctcgtgaaattatatttcatctgaaaatctgaagatgaggtcttctacttccgaggaatttctcattttaatcagtgagtgctgagatctcataatttattgtaaagtatatgagctatgtctagtctaataatttcaaacataaagagagttctttgacacatttgcctttcccagagaatgttgaatgttaggtgctttgtatgtagggtgggacttcccagataagagcacctcaggcttacgcagccctggattggccttgagacacagcttactctttgacagcataaatgcaatgcagcattggagggttattgagatgagcaaggcgaatgcagtggctcatgctcataatcccagcactttgtgcggctggggtgcctcgggaggatcgcttcaggcctgggcagcttggcgaaacaccatcttcacaaaaaatataaaaaattagctgggtgtggtggcgcctacctgtagtacagctacttgggaggttgaggtgggaggattggttgagcccggaaggtcgacgctgtagtgaacctagattgcgctacttgactgcagcgtgggacacagagcaagaccctgtctcaaagcaaaacaaaagatgaacaagactaaatcttcttcttgaagaaacctgacagtttggtaaatgttacctttgtatgttttgaaattgtactggaataacacctgtcaaatggaaagaggagcaggtgctctctaggcagaggagagaatagtcagaaaagggaacagcatgtgcaaaggcctcaaagctccaagggtcaagtagtggagagaatgtgtcagctgccacacatgcaggactcaacccagctaccccagcggcttcatgcagtaattcagaaccaaagcattgctaatcggtctattgcatggcccaggaaaccgacgtagaataattccttttttttttttttggaaatggacatagaatttaaaccagtcaaagaagcgacaaaataattaaaacaagctacatagaaatttttgcttctgtcattaatttgttgtattaaccaacaaactaattattagaagcaaatcgttgcttctgttattggtttgttagtattaatttctagaaattactggattacagatttgttaacctccatttccaggttgctcttttgaaagattttatcagttaatcacactagcagcatatgagagtactacttttgtcagagtcagaaattcgaaaaggtgattactcactcttcagttttgacctatcagccctttgtttcaatgcttttttggggggtggtgggggcacggagtttttgctcttgtcgcccaggctggagtgcagtggtatgatctcagctcaccgcaacctccgggagtcctgagtagttgggactacaggcgtgcaccactgtgcccggctaagtttttgtatttttagcagagatgggatttcatcgtgttagccaggatggtctcgatctcctgaccttgtgatccacctgcctcagcctctcaaagtgctgggattacaggtgtgagccaccatgcttggcctaattttgtgtttttagtagagatgggatttcttcgtgttggtcagactggtctcgaactcctgacctcaggtaatctgcccacatcggcctcccaaagtgctgtgattacaggcatgagccaccgctcccagctctgtcaccaggctggagtgcagtggcgagatctcagctcactgcagtgtttgtctcttgggtgcaagtgcttcccctgcctcagcctcccgagtagctgggactacaggtgtgcaccaccatgcctggctaatttgttgtactttagtagagacagggtttcatcatgttggccaggatggtcttaatctcctgaccttgtgacctgcccgccttggcctccctaagtgctgggattacaggcttgagccaccgcaggtggcctcagtgcttttaatatacagttttcctttcttcactattcctaagtaggtaaacagcttttttgtgattctggttcaattttactttatactattgagtaatgttttcaaaatattctgaaaaaggttgatcatgttgtttgacttggcattatttctgtgttcaccttttaaaattcattaaccggatcaccttcaaatatgttaagtacattttattatgtgtttctttttccagccaaaaagccaacaatatatattgaaccaaaatttgagtgttttattaccatgaatacatgtaggtagccctgtatgtttacagtgtagcacaaacccttttacttgtgtaattaatgcctccaacaccagtgttgtccttatttccgtttaacaggtgaggaaactgaggcagaagtcttatgatttttcttaatcattcttaatcatagctatgtgtactatgatccactaaggtttttagtgcaaggtgtttatcaaataagtcagtattttttaatttaaaaaattcatgtagaatacagtagtccgcccatatccatgggtgatacatttcaataccctccgtgtatgcctgaaactgtcgctattaccaaaccctgtatatactgtgttttttgcttatacataaatactgtacagtgcagagcattcacgtcctgggcaggatagttcaaggtttcagcatgctacacaaaatggtgtgcaatttaaaagttatgaattgtttattttggggatttttaaatttaatattctcagaccttggttgaccatggctgactgaaaccttggaaatctaaaatccggataaggagggctacagtgttgtcttttttgatagcttctgaattggaacaactactttaattgtagccttaacaacccagttagtttcacgagtttgcataccatcacccagtccgggtcaccctactatgttcttgtaattattggtattattttataattgtacagtgtggccttgttgacatgttagctatcgggccagccacatgcattacaaagttcagcactgttggtgtttcaggaattaccaagccttcttggaaagcattcaagccagactgtgtgtgtacctaattctggttggtatagtgccagtgtattaacttttatttaaataaaattccaacaggtaacatttattattactatactgctgtcacagagtgcccacactttaatgatgtttttgaaagtcaaatattagcacagtagatcccctttctgcattaatttttatcacaccctatgtgatatggtcaatactacgtaatttcatccatataacacagaaatatcattacaaatacatggctgatgctgtatgatcattacaattctgtattatgtgaaattctctggcaccataaccttgtactctcttctatcatacgacaatccacaccaccctacccctcctttgcgattagtagttttggggaaattattaatagcgtggtactgaaataccaaggcaccaactggggttggtcttggggttgaggtgataattaggtggatggcagccatgaacctgggtgtctgcatagaattactgtgaatatgagatcccatctgaaaattctgacttctcctgaattagagttagtagagttccttggtctctcttgtgacatgttatagaaggtctttaaacattttgagattccagtggtaacattactggtgcaaaatcaaaagttgacacctgctttggaaactgatttgccattcaacttgtaaatttgaacatttgcatatccaaggatatctaccacttccagtcccaaatattatctaagagaaactctagtgcatgatttccaggagacttgcagagaggaattgcaacatggttcatgatagcaataaactagaagcgccttagatgcccttggacatgagaatcatggtggaatacctaccattcatcagttgtgtagtattataaatactccattgtgtaataatgaaaatggataggcaagcgatataataagcaaggccacggatggatcttagtaacttgatgttgagttggaaaaaacccaattcccattggaacctgttttgtaaagtttataatcaaatgcggtgaaacaaaatgctatttatatatgtttatgttataatattaaaaagttagcacataggcaaggctttaggttatgtttgagtagtttggtttggcagcgggttcacagatattctttatatccttaaaaattaaagtggattgattattcagaggactttggtttaagatttatgacttgctctgatatttcactgttgaaacttagatggtggtgccttcagcctattaatgaacatggatggagcaaagaaaagttcttccccagtctttccgccctctgctctttcttgtctttaaatattgtaagttgtgttgttattcctaaattgaatccatttcttagtgttattcttggtcttccagaggatgctgtgagtctaatagggtagtttgcatgtttcttctttagtaggggaccaacatttcatgtaaacagtctaaaacttatggctatttacaacggagagttttgttaagtctccttcctggcctgacagacacaggactgactcgcatgtactgtgttttaggaaatattgcctgcatgatcaggaagtaatgacgatggtcaggcttttcttatttcttaaaatttaaatacccgtttctctttaattgactagaataggaggaagcagtggagataggaaaggggcagatagtgttttattagtgctgatgcctgtgtgcactctgagtgtttgagtgacagaactgggggtgttcaggaaaaccactaatcatacgtgattctgaaacttcatttctggccaactgtttatgtctcggcgtttctacttttcttaccaaccttgctgagaattagcataatcagaatatctgcctcaggtctcctttccaattctctgctttgggtgctgttgatcattgaagcagccaaaagacatgtcccagtagaaggaagaggaaaaaggccaaatagtcatcccccgaatgtcctttaattgactctgtatgacttacgctgtagtggggtgcattccaaacacttgttcactgttaacaggaacgtgctgcactgtagagcactaaataagggtctgctctgggggctcaccctggcagccattggagagcacctcttctccagccttctatgttctgtagggaattgtatattgaggttaccccaccccttcttccccagtgccactgggttctcggatagcctcctgtctgttgagacataggagctacctctgtgacctttgctaagagacaaacttgtttttagccacagtttcatcatctatgaagtgggggaattgtagtagagtatctctgaggccctatgtataattatgattttaaagtggtggatatcaactagacactaaggaggaccatcatctaccttcgtgatgtctgtgtgtgtgtgtgtgtttatgtacatgtatatatatatttatgtttatatatttttgatgtaagaagttgtggcatgttcatgagctttaattatttaggaaacaagagttggccattgtggagagaatacccgctagcctgggtgacttcactcctgagcaaagttgacatctaccttcagggtttttgtgaggtataaataagttactgtgtgtgaagtattagaacccagaaggtcctcgttagatggttccacaactaggaaagaagaaactgaaagtattagtaaggcatgtttccatttcctctggatgcatctgaggaaaacttccagtgccatgtggacttggccaccatcttcctcccattggaagggcatgaagagaagcatgtggtagtgttgagagcatgtgttttggacattatcattgctggttgaagttcaaagaaaggcttcaagaaaattgactttaaaaatcaaaaagctataacatatgaaaggagatgtgtactccagttgtctgaggccagggagctggccagccctcagttggactcctgcctttttcacccctcccagcagctgccagaccacagagccagttctgtgaaagatcctcaagaaacaatgagagaaaacagcttctgtttgattagattagatcaatttatgtgcctcggggaggggcctgcgcagggcagggggaggggtgcccctctgttgttggtgggggcagcggtggcccatgcggtcacttcataagtaatgaggctccgtggaagctggaatcagagtaagggggagggcgggctggaggaggagcatgtggaaagagatttctgcagtctgtctggagagctgcccaggtttcccagccaaaaaaacaaataaaaataaataaaaggcaagtgctgaatgacacagattatgatattaaaaagggatgccattgaaactgcgccctggagtccgctgtctgtgggggtggggtgtgcttggcaatggggtgggggcatctgaccggctggggacacaaaagtgtgcacaattaaactgtgaatgtccccctccccccatatgtcagaaattctatacttcggatttgtctgcattgcaggttggggaaatggcaggatgaaaagctagtgactcttttcctttttctcattttaatttatcagggtggggggagccagccggagacccctcctctttggtgttcgattccctcccttgcacataaataaccttctctcctggctgcctcccctccccctcggccccattgctgttctggccgtcctattgccgcgcggaatctgcactgccgcttgcttattacgtacaggggaggattgttgacaagtgctccggagcctgcctcactgcgctcttcctccctccctccctctgtccttcttcctctctgtctctctgcaatgatccggctctgaggatggctgctccacgggtctgtcaggtgcagtttttggtggcttatcttgaggaacctgggatagaaggtctgttcctataaataaaagacaaaccaaatagctctagatttgtttcaggctggtatggcttttgttggagaaataggcctttgtgggtttccctgctggggtcctgattaaatccattgtggatggcaaggtgctatatatatatatatatatgagagactatgtaaaaagtgttgcaatttgcttaatattaatattcttttagctttgatatcctccctaggggcaatggtggctcctgcaaaggcactgtggaaatttacaagagagaattaatgtcgctcttaaagcattaagctctgttgaccattttggccaaagctgcagtttcaatcaggcttgtatgactttagacatttctctggagactgaatgccatccagctatagctggtcccttttattttattaccaatttatctgatcatttcccagcatttaaaaataaatgtttgattaaagttaattagttcatcctcaccatagctctggtttccttcataaacagcatgtttgctttcatttccattaatcctttctttttcttcctccatcatctttccttgaaagatggaggaaactgaggcatgcaaatagatcctgagacctgaagtggttctggattgagacctttaaacttcgagtgctcttgattcttctcccgaatttcgtgcattaattcatgtctgtattactgtctgtaaacacagatgaatttcaggaaccttcaatgtttggtgcctcaaatcttagcagattccatggccacattcctatagtgctgctttctgtactgcttccattcattatatttcagtagtggaaagaatgctgctctgggaggcagtaggcctttctgaagttatttgttgtcagcagttttttttttttttttttttttactttgaatggactacttaatcctctctgaatatattcatttgaaaagtaggagggcagttgatttcttgatatgtgagtgaggtaataaggaaacaggggaactactgtccctcctagtcatgctacaaagaaaacagaacttagaacttccaagagattccttttatcctagggaatgaaggcagcccagagaggtttcagggcaaagggtgtggctgtttatttatctacaaattatggtgtcagtcaggacacaaagtttgtggagctttgcccatttatcattacagattagtacacaaaccgataactttatggcacttgtcgatcgagttaaagcagcagctttgcttatctttggagagcctggctcaaattggatacctggtttcttttggtaccttacatttgtggggtaaagatgataggaagctttagagacctaagtacatacacacttgtaattacttgaaggtagaagaatatcattagctatctgtgaacatgctgtgttcatggacatctccctttgagaagtgcaaattctgtgagatgagaaatcaaatttgggcctgttagtttatctgaacacaagactttccacatgttgggcccatttatctgtcttagaaaaaatctcaaaaaaaaatgcccttgtgtttccgtctccttcatgtgactgagttcccttgctctgcagtgatgccattgttctgccgctcatggttacacatcagcctaagcccactgtcgccttgagtcagttttcttctgtaggcggcttttgaccttggaggtggtcagttctgggccctctgtggtgtggaattcttttcatgagctgatagaagctcgagttgcatatcctaggggattccagggatttatattttggtgcgtatttataactgggttgtctggtgggtgtgtgtttgactgggttgtcagtgtaaaattaaaagggtgttgaaatgaagtgtggacccagagcagttacggcctgggatagagtagtcatgggattggacacaaaactagaactgccgattgtagagcatcgtgggtgtttataattcagtcattattattattctaggtactgtacttgttctgattgttataaaggtcatattaaggatgaagaaggagtgaagaggggaagagagtggggaggatgagcccttgccccaaagaagtaacagggagttgtgccaaaatgagcagtacatttatgttcacagtggtgatcatcagagtttaaatagcttctggtctgtttgggaaatctttcatgaagatcacggctctttgtttttgtgagaggttttgtgttgaataaagttaaactgtcagccttgttgtctatttttatttatttttgttggagcctttcagtgagcagtgttttctgtccccctgggattgttggttaggatgtacgaaggggagatcttttgtcttttggtggttcttactcatttggggtctagagagccagaatggggcccattctagtagtagcagtgttctgcttacctcttcctctgaggaaataggagatatctgctgggtttgttcctttgtagctcaaggcgtttattgccttctggggcccagggtcctatctttctcaaagagtcatttacttgtttctgaaataggaaaaaaaggatagagtcagacattttccttatctacccagtgacccaacttttccatgttaataatgaacactgtgtcaggtcttagtatctaacgctttctcaaaaaattgtgcatgcaaaagaggtgtagattgttgaaggtgtgtcgtgggggcggattctggtggtggtgagagagctcttgtgagattgttgatttacaaatcagtatttacatctgtttttgcaggggttaaatataacaaaaatatgtcccccgcgtccacctattcatcctccccattcctgcctccaaatcttgggactgttttaagtagtgatgggtgggggtgtttttggattgtcttttcttgaccggaatgggaaatctccatagctgatttgacagtagacaaaggggagccctagtcggctcaggggctggtctcataagggaaagggataattattttccataagccgaggtatgaaaccactttcatttgtgcctcgttgaccacaagtgtgccaccgacatcctgcctcatgacttggcatttgttctcagtcacaccagtgtgttgatctggtgagcaagtcagtggacaagcctgggctgtgctctgcagaccctgtgccctgctcgcccctctccctggagctctgtgctccattggaagcttcacatgctgacctgcatgtgtacagtgatgggcaaactccatgttcatattgaccatgccaagcaggcccaaagccaaatctgccctggcatcggaatgcctaccctgcttaaaaagcaattcatttttttttctctttgcaaaacttgagtgaacataacatttatttttcactatcaatggcagcaaaccatgcattctgatgacctcagagagggccctacctcagccatgggggctgcttttataatttttctatcatcttaaagtgcacacacacacacacacacacacacacacacacacacacacacacacagaaattgctgctgaaaatgaaagctgtctttggatgcttgactgtttgatatgtaatgtgataaccttgtctcacagtgacagggtgacagacggcattggctctataatacagaattaccttttgtgcatcttttctacaacaaagctaaatacattgagtcaccctaatatgctaatgactttggtgtgctccagatgttttagaagccctggaacagcctcaaagccctccttgtttttcctttctttttaacccttgttttggggcactgcttttgtggaatagagccattggcttttcctttagttttctattgtcatgtatgtgtagctaatgagagaggactggtaaaacttctttgtgtctaaaacatcataaaatgatacagactacatgctctagtccctttttttttccagatattagaaaagagttgtcttctgtccatacatttgtgttctgaaatctgtcgttctcattggttgctttagaagttccttcagctaaaggaatctttggcctaatttgtgtttcaattttcccaacgcccatcatataaggcaagagggagatagccatacactagtgtctccagttaccaagaacaacaggaattcctattccattttgatgctgctgttccagactcagaagcctgttttgttgtattgttttgtgcggtcttttcatttcttgctaatttgggagatgcggtgaaaagctcctgaatgtgcagagctgctgatggcagggttctgttgtgttcaatttctttagagttctcggctgcacaaatggacactgccttgtggctaaatggtcttggatcccagacgcacttctcccgtcagctgatggtgactagctgaggttgcaggcacagtaaccaagctgcctttactgcaatgatttacaattttcagctcatatttattgcttttgtgaaagacaatagacatggtttaatttaagttcaacctactgaatattaatagaggagaacaaatgctaatgggatagactgactctttgggccattcattcaatttcctctgtttaacctcctctccccaacaaaggtttgtgttggtcggggtgggggagggggttggaaaaataaaaacggtttgagtgtgtgaaggaggggatgccatttcattatttctcgttgactaaaaataataattttaacaattggtggcagggctttgttaggggagagaaaaggcagtacattagcttggctaatgttataataatggctctgttgccctgtggcgtcatattccatcttgctgacctggccctcctggattgggcaggctgtatgattgggcttaaaacattcaaaatgaaatgtggtagccagtacagtggagattggtcgccagcgggggggttagataaagaaaaagcccaggtttatttaaccatgtaggctgtctgactattaataaatgtaaatgttttctgggctgatatatacagaatggaagtactcacattgaaaaagttgatcacgtgcagaataaagtcagtcttgcgccttcgtaagggccagtaaaatctatggtcctggccaggcgcggtggctcacgtctgtaatcctagcactttgggaggctgagacaggtgtatcacaaggtcaagagatcaagaccgtactggccaacatggtgaaaccccgtctctactaaaattacaaaaattagctgagcgtggtagcgaacgcctatagtcccagctactcaggaggctgaggcaggagcactgcttgaacctgggaggcggaggttgcagtgagccaagattgtgccactgcgctccagcctcatgacagagcgagactctgtctcaaggtcgggggagaggggagcctatggccctttaatttgtataaaggcagttccttatgtatgggccccattttatgaatctggaacatgaatgtgattctcttctagttcaggtactcattgcaatcctcagaatggtggaaaacttggagttcttggaagatttagttagataagggcctggaacaatggagtcagtactttgatttctttttgctcagtcatgccttatcagagtagccttatctgttttgcattttgcttacataaaatcgtttaatattcctaggtatttttcatgtgtaaaatctcttcataaaattacccctaatttatacttaagcaattgatttgcagggtgagagggtggttggggagaacattacacatctctttacatttatgcttcttagacatgcacattttttccaacctgttaacttttttgtctctatttgtcacgttggctgattcttgtaactttgtgacattttgcaggcaagtgtctttttttttctgcaaaattattgataaaaggtacatgaggccatgtgcggttttcacgcctgtaattccagtgctttgggaggtcgaaatgggcgaggattacttgaacccaggagtttgagaccagcttggcaacaaagcaagaccccatgtataaaaaaaaaagaaaaaaattagtggggcatggtggtgcacacttgtagtcccagccattcgggaggctggcttgagcctaggaggactgcttgagcccaggaggctgaggctgttgtgagcatgtcaccgcactctagcatgggtgacagagcaagaccttgtccctctgcacccccaccccccaaaaaacaagtccccagagcagccaaagcagcattagtgtcacctgggaatgtgttagaacgggggacacttggggggtgattcgcatgcatgctcaagtttgagagtcacttctctttacagtcacccagattcattttgtcaggaggacagaagcaaagctgtcatcaaaaagcttaactttcttacttacttgctaaatcatttgttcattctttcatgcattcacctcttattcagctaagacttcagctgctgttatgtaccaaagggtataggaacccttcccagtcttcctgagctgctcctagtccttatttagttcgttttttataccaatatagctcttcttcctccttgtcctcttcgtccatcaccacttcgtgtttttaggcttactgcaaatcccaactttcttgttcttgttttggtattgcaagcttgccggctggctccattggctcactcattatcctctccatcacattcttttcttcacttactactgagtgatgcatatgtctgtgtttgtctgtctctcctaattttagattttgattaacctgtatccccagtgccctggcatatagtatttgttaagtaaattaatggataaattcagaattgatcccttttttgccttctgtgctttattctccattatgttattcccaccttgtgctattgaaaaaaggaaacttcaggtcaggtgcagtaactcatgcctgtaatcccagcactttgggaggctgaggtgactggatcccttgagcccaggagtttgagatcagcctgggcaacatggcgaaaccccatctctacaaaaaatacaaggattagctgggcatggtggcatgtgtctgcggtctcagctgaggcaggaggatttctccagcccaggaggtcaaggctgcaataagctatggttgcgccactgccctccagcctgggcaacagagcgagaccctatctcaaaagcaaaaagaaaaatttgaactccaccaagacgatacatatttacgatgtgcatcctctttttttccttttcagttttacatctggttctttaaccagcatttttattttcagttttctctatggtaatttatccatcttctctttttacagataagataaatattatgttccttggccaactctaatctcagttaaatgtcgtctgtatcctaattgggtgggaagagggatcccccactcgcatagtgacactactaatgtgatctgagtgctgatcagtaaagatattatttaaactacatacgtaattttagtttctgcagtcacactcaaaagaagtaggtgaaatcaatgttaatatatttgatttaatctactccaaaacatttccacaattaatacaacattgtcaatgacatgttacattctgatattaaattacaattaagtaaaattaaaatttattttcttatccacactgggcatatttcaggtgatcagtagctgcacatgactagtggctactgtaatggagaacatggcttcaatctctgaaacactggccacgcttttatccttggattcttagatttccatacagttgtcttcttttgccctcacagtgcagactcccagcattttctttgggggtttttgtatgtttctatttctgtattgtagtcacaactcttaaagcctcattagtcgaagtgaataaccgtgtgttttattttcaacctcatgttatcactcatactctgaaatgatgtaaaaataggtaactggggaaatgcaagcagaaacaagccaggtcccagggctttgttgatgtgtactatgttcattcagaatgtttatgtattttttaatcaaatacatagaacactgtgttctacatagtgtttagtacaactaacagaagtcactttctgagatacttcagtcacaaagacttaatacagagaaatgaagtgtgcataaaattggtggaaggactagaagagcaaaaatcaaggggccactccgtatttttggcttcaagatcaagcaccgtaaaactgcagatgctgtgctagcagtgctgctcctgcccagttctggttgccttcgagggttgtgactagatagtggacagcgggtctagttgctgtggacatgtcttatcagtggaagcttcttgttggcagaacctacattgatgtaagggactctgaggctttgttattcacccgtttccctatagtgtgaccttactgctggttagaatacttccatatcagttagtacacagctgctttttagagcccccaagggcctgcagcttctttccatattttggttactaaaagcacatccatgagcaccaagactcccctgcttatcatctgctatcatagagaatccttatcctttgagatgatcaaaggcaaatccggttacaatctaatcttgtagatggctatgaagaaaaacaagtggagtaggatttctagttaatatctaagatgtagctgcaaagataaggatgccttttcttgtgtggcaggtactggttcctgcaggcaattccagaaaggatttcagtatctgtagagtcaatatttacctcttcaagagtgactagtttgataacagatactcctttcttcctttcaaccctttagctgcaaaagatgtttatgtactctttaaaaacgaatcctgaagtatagtgttacagttccaaatttctgctcaaatttcttactgttgaaattgtttccctcttaggcatttcactctctttaaaggtctcatagaatgaggttttgcttttctccacccattcaaaagggatgtgtgcttttaaattctcttctatccacattcttgtctgtcttcatcagcgttgtgtagggttaactgtggtaaagtgctgcctcctgatgtgatgtatttaagtgtttgtccccttttctcacctgtagggctccttggtaatgaccagtctaagggattaggaccagcatcagaacagtcagagaatgaaaaggacgatgcatcccaagtgtcctccactagcaacgatgttagttcttcagattttgaagaagggccgtcgaggaaaaggttagtacccaaggctgaaaatattggtaccttcaaccagggactgcaaactcaggtgccagttttcaccacatgataacgtgagcccattcacccaatctcttgattttcatagaggagccagaatcatgaggtttcgtatcaaatgccctgctttctaagtattgtctaataattataattaaaaacgggaaaaaaaagtgctctggactgacagcacatgttcctgctggaacagttagccaaagagttgccagcttgtaatgcctgtcttaactgttcatttaaattgattctcagcagcagccatcttgaggaatatatatattaggtgatgttttgccatttctgaaaagagatctttctaaaaatttgaagaagtaaatgtggtgtttctgagacgttttttccttgtcaggaaagctgaaattacactgtgtatttttaatcccttgctgttttaccaagttccaagttagtagctgtggaattggtgcttaaaacttagaacagcagttatttttatgtggctttcctaaataagcttcagatagtttggtaaggaagttggctttagtagtttgataacagtttgtggtttcatggtcaaacagtggcagtgacattttataataatgattttacttgggtgtttttgaaaccctttgcctagtatctaccctacttcatacctgatatgttacttcctttttttccctgttagaatttatatttccctttgttctctttatgtttacctggaggaccagcttcctgactttttcttagaatttgttcgtttccgggattgaaggaaaagaaaaaaaaaatcccccttgtcagttcatctctgtttactcattctggagaatttactttttagaagcaatctacatgtatctatctaaagaagaacagaatagagtgaaaaattaagagaaaaggacaagattagccatgtgtagatatttaagattcctgttttcaggactgaaagttgagatgcatagctcaaagtctttattttctccatcatgagggtgtcgtcttttaaatagccttttaaatacattgaatctgtattcttctctcattttctcttcatcctcagcactttgtcttagaagatgtcataagattcgttattagtatagttaggatcttcccgtgtactgagctttgtatgtcactcctttaaaaagagtgtctcagtgatgaacctgttatattacagatattccataacaaacattcccctgttccagtttaaagcatgaattatcacaagagagtgattttaaggatgtgtaaaaaattgtgtcagtaaatatattggaatgtgtgataatattatccatgcctccaacatgggcatctggcatgcatctggcatcaactttcatctccatttggggagcagaattctctgagtctgggcacccactcctttagctatgtggctggccatcaccctcacttctggctgagagctggtcagcatccgggtgcagtgatgtgtgttgtaggcttcattcttaaggaggagggactctttgtccctaactcattgtgattctctcagaagatagtgttgctagctttctctttgtatgggaccacagtgtcatgtggcacctgagtgcaaagcagtcatttaactggaattctttaaggtagtagaaaagaggaactctttttcagagttagctgaaggaaaacttagccttggcaaatcgtttttaattattaatgtgtcaagtatcttactgaattaaggattcattacagcctactaacttggttctggtctcatcaaggttttatgtggattaaggtttgataggcttgggtagattttggggatgggctggggcactcttgattataggaggaagattttgtagccttcaaatgtgtagtgtcattagggtatgcatttctttttttgggggggttgagggagacaagagtctcgctctgtcacccgggctggagtgtggtggtgcaatctcagctcactgcaatctttgcctcttgggttcaagcgattctcatgcctcagcctcctgagtagctgggattacaggcacacaccaccatacctggctaattcttgtatttttagtagagatggggttttgccatgttggccaagctggccttgaactcccagcctcaagtgacccacccacctccgaaagtgctggggttataggcgtgagtcaccacacccagcagggcatgcatttcttggggtgttgcagggtatgtagcaagcataaaatgataacttaaagtcttaagaactcctttgttttgatccttcgtcagtatttagtgggttgggtatgaaccctgccttcaaaagcagagtaaatgacttgggacctgaatttccagagcttcggtagtatactgttgaaactgtaatatgtaacctgtcttcaacgcacatacagaatgccttttctaatagggtaatggaatgtgctgactctgaagatgagaagttgagcctaaagtaactacctataatggttaattttaaaatatctttagtggattgttaaacagatgctggtttttttacttgcgagttttaaatttctgaaacattatacatgggaagagcttgtgtttttgtttttttttttttttttttttttttttgagactgagtttcgcctttgttgcccaggctgcagtgcaatggtgcgatctcggctcaccgcaacctctgcctcccgggctcaagggattcttctgcctcagccttccgagtagctgggattacaggcatgcgccactatgcccggctaattttgtagttttagtggagacagggtttctccatgttggtcaggctggtctccctacttcaggtgacccgcccacctcggcctcccaaagtgttgggattacaggtatgagccactgtgcccggcagggaagagcttttaagactgaccatttgcattctcttttggtctttagactttgtaggagaaaatactgattcctaaaaattcatattgttgtagtttgtttcgtgttgctgtaacagaatagctgagacggggtaactttagaaatacagaaatttattggcttacatttctggaggcttggtattcaaagattgagggactgcatctggcgagagctttcttgctgcattataacttggcaagagagcacaagaaagtgctaagctcggtttttgttgtttgtttttcttttttaagtttagtttttaaagagatgggatctggctttgttacccaggctggaatgtagtggtgtgatcatgacttactgtgttctctaaagcctgggctaaagggatccttgtgcctcagactcctgagtagctgggactacagtcagtcacatgcctccacgcctgtctaagcttgcatttataacaaacccactccctagatagtgacattattccgttcacgagggcagatccctcatgatgtaatcacttcttaagatctcaccctctcagcactgttggattagggattaggtttccaacacatgaactttgggggccacattcagatcatactgcagggtcataatttatgtatgtgctttggaaagagcattttcactttattttttagaatgatacgaattgctagttagctatacttgtagatttaattactcctactctacacatccttttatgtgcatgattttagaatcatcagcaaaaaaatatgccttttgtctacagtagggtgatggggaaaggggaagactgagagggattgtatgtgcttgacttccttcttatggaaaataaaaatctatggtggagactgatgccagcctcagttccaactttatctagtctgcttttccaacctgcacgttgaagcaattacatttttctgatgatgctaataacatgttttaattcttcagttaaaacatccatgtgtttacttaagtgttgtttttctgcagaaaaccccctgagtcagattttgctgtgtgtatttactgccagtgcctttacttgacactagggatctttttagctatagaaaccagtggagtccagagttcttgagggttttggagtttcctcaaatttctaattctcttcctcagagtttttctttatggaggcaactacaacaacaacaaaactcaaaaccggtatatttttacctagccattgaaaggtcatctgagatgcctctttacaaaaggaaagccagtcccccttcagaatctgtctgctgtgttcacggaaagggcagcccaagaaaagatgagtggagattctgtgctggtgggaccctgaaggctgagtcttgtttttagttctagatgttgtttttctttttcttttgatcattgtggtgggtgagattgttttttttttaaatgatatatttacatagtttataacatatatttttttgtttgtttttatttatttttattgatcattcttgggtgtttctcacagagggggatttggcagggtcataggacaatagtggagggagggtcagcagataaacaagtgaacagaggtctctggttttcctatgcagaggaccctgcggctttccgcagtgtttgtgtccctgggtacttgagattagggagtggtgatgactcttaacgagcatgctgccttcaagcatctgtttaacaaagcacatcttgcaccacccttaatccatttaaccctgagtggacacagcacatgtttcagagagcacagggttgggggtaaggtcaccgatcaacaggatcacgaggcagaagaatttttcccagtacggaacaaaatgaaaagtctcccgtgtctacctccctctacacagacatggcaaccatccgatctctcaatcccttccccacctttcccccctttctattccacaaaaccgccattgtcatcatggcccgttcccaatgagctgccggctacacctcccagacggggcggtggccgggcagaggggctcctcacttccctgtaggggcggccgggcagaggcgcccctcacctcccagacggggcggctggccgggcggggggctgacacccccacctccctcccgcacggggcggctggccgggcagaggggctcctcacttcccagtaggggctgccgggcagaggcgcccctcacctcccgggcagaggcgcccctcacctcccggacggggctgctggccgggcggggggctgacccctccacctccctcccggtcggggcggctggccgggcggggggctgaccccccccacctccctcccggacggggtggctggccgggcggggggctgacccccccacctccttcccggacggggcggctggccaggcggaggggctcctcgcttcccagtaggggcggcctggcagaggcgcccctcacctcccagacggggcggctggccgggcggggggctgacccccccacctccctcccggacggggcggctggctgggcgggggctgacccccacctccctcccggatggggtggtgccaggcagagacgctcctcacttcccagacggggtggctgccgggcggagggtctcctcacttctcagacagggcggctgggcagagacgctcctcacctcccagacggggtcatggcccggtagaggcgctcctcacatcccagacggggcggcggggcagaggcgctccccacatctcagacgatgggcggctgggcagagactctcctcacttcctagatgggatggcggccgggaagaggcgctcctcacttcctagatgggatggcggccgggcagagacgctcctcactttccagactgggtagccaggccgaggggctcctcatgtcccagacgatgggcggccaggcagagacgcttctcacttcccagacggggtggcggccgggcagaggctgcaatctcggcactttgggaggccaaggcaggcggctgggaggtggagtttgtagcgagccgagatcacgccactgcactccagcctgggcaccattgagcactgagtgaaccagactccgtctgcaatcccggcacctcgggaggccgaggctggcggatcactcgcggttaggagctggagaccagcccggccaacacagcgaaaccccgtctccaccaaaaaaatacgaaaaccagtcaggcgtggtggcgcgcgcctgcaatggcaggcactcggcaggctgaggcaggagaatcaggcagggaggctgcagtgagccgagatggcagcagtacagtccagcttcggcttggcatcagtgggagaccgtggaaagagagggagagggagaccgtggggagagggagagggagaggggggagagggagagggagaggggctaacttatattgtttagaatggaaccattacagagactttcatcctgttctgaatgtgaaggtggccctgcctatctcctttctcattttgcccttttattccactcagttcttcttgtaaagtgtgtatttgccccatcagtctctcagtatgtgtagaaaccagaatggatggattttggtcatttgggtgtggacttgtggtcagaaactctttggaaggatggttatggaggtgaggattatttgtttgaggaatgaaacgataatgtacagttaatttggtgatggtatatttttagatgcaagtaaatacgagatctgaagtgtacgattcaaaagaggtcatctgagttggcgactaaaatagagagcaagattaactgtttatttttatctgtgggtgagtagggggaagagggtagaaaaatttcacgagaacagtggttcttaagcgggttttgtggagactgtggtgcagcataagagtatagactggggccaggctgtgtgacttctcattatatcttgaacatttacttgttgtgttatataatgcaacaggtattgtatcatacctgttgggcaggttatataatatgtctgggccttagttctctcatctgaaagatgtgaatcacagtagtaactgcctgatggtgttttgtgacctgaataaattaattcttgaagagaattttggtgtattggttgggtgcaatggctcacacctataaccccagcactttgggaggctgaggccggccggccacttgaatccaggagttggagagacctgcgtgggcaatatggcgaaactccatttctaccaaaaaatacaaaaaaaattagctgggcctgttgacatgagcctgtagtcccagttacaggagggtgagatgagaggatcgtttgagtctgggagatggaggttgcagttagctgtgatcgtgccatcacactccatcctgggggacagatccagactctgtctcaaaaaaaaactaaataagcgaataaataaataaaaaattctcatgtataaatggtactctgtatgttagatgttagtagccattgtcagtatatgtgacacatgaattgctacatgtgagtatgcacatcctttcgagacttctctgacttgtttcagagggtttttaatttacacaaatgatttatatctttcctctctgtcagccctaccacagccatctgtaggcagatggaaatgtatgggtactccctcttttgaagttattgagtcacgggaaggaccctgtggtgtatgttgtaaatttcctctgccgagcttggtgcgacctagtatttgcctgaatggagcaggcaagagtggtggggtgaggagattccatcgtggctgctcatgcattagtcattgcttcaccttagggagagacccagaaccctaatgtttagtgttgggatctcttgttaactatattcctcttttttttttttttttttggtaagacagtcttgctctgtcgccaggctggagtgcagtggcatgatctcgtctcactgcaccctccgccctcccgagttcaagccattccatgcctcagcctcctgagtagctgggactacaggtgcatgccaccacacttggctaatttttgtatttttagtagagacggtttcaccatgttggccaggatggtctctatctcctaacctcgtgatcgcccgcctcgtcctcccagagttctgggattacaggcatatgagccactgtgcccggtcaactatattctttagaagggtatattgctttttgtgtactaacagactttaaaataaaaactcttaagagtttctatttaactagtacagaagtaccgactctgtctctaaagggatgtaacttttttgttaaacaaggagctgctgtattttagttaggctttcgatccaataggacttagtttaaacactgtttgtcctattagattgaattttgaatgtaaagaatcattggaagtgtatggatttcataactcagtgtactctgagatatgacatgcctctggatatgaagacatgttgaaagtggtgagaattctctcaggcttttaacaggtatgatattcacagctacattgtctgcacgactgtgttccttattctttttggtctgagttactttgatggtataaaatacttttatttacttcgagtttgaaaggaagataagcccaaatgtatacgaatcttcttgatagcatgcatgaattgggattattcaaagtgagcatccttaataattggaattatattaaataagtgcctagtttttactcattcctgtatcaaaaataaattagtagtataatttactattaaatgcaaaaaagtgaaagcaaaacaatcagcaaaaggcttaacatttctcttaacccttgatttatatttagaagcttccactgatcaggttatttggagtttattttgttcttacaacctggagatatattttataaataagagaagtactagtttaattttcaactttagagttatcatgggtgaaatgtactctctactacagaaagtaaagaaaaattgagtaatagattatgatgtggcagttttgaacacaaaagatgtggaagtaaatataaagtaaatatgggtaaatctcgcctatcttctgtttcaagttatctacgtagttgccatttttgtttctagtatcatttgcatttgcttttgcttgaaggattttaacatttctaacattaggtctgctgttgatcattcagcttttgtatgtctgggaagatctcatttcacccacattaaaaaaatacttttatgataattgtagaattacatgcagttatacaaaatacaccttcatttcttatagatatttttgctgggtataaaattttaggttaatagtcattcaccatcagtacttcagtgacactgccccactgtcccgatgtgcatcatttctgatgagaatcctgttgttattttcatagctttgtaggagcaatcatttaccacaattttcttttgaatcccttactggttttaggcaatttgatacgatgtgccttggcagtttttatttccagagtttgagattcattgagtgtattaggtttgtagatttcatttactatggaaaaattagagccattattatttcaaatattttcgtgtgcattcgtctcccctttggggacctaattttcatatatattactctgaagttgtcccatagctcatgtgttttgttccttttttgatctgtatgttgcattttagatagtttataccctaaatctgctggtaagactattgaatatatcttttatctcagacattgttattatattttagaagttacagctgggcacgcctgtaatcctagcacttcgggaggccgaggcgggtggatcaccaggtcaggagttcaagaccttcctggccaacatggtgaaaccctgtctctactaaaaatacaaaaattagctgggcgtggtggtgcgcatctgtaatcccagctactcaggaggctgaggcaggagaattgcttgaacccaggaggcggaggttgcagtgagccaagatcacaccactgcactacagcctgggtgacagagcaagactccataaaaaaaaaaaaaagaagttagattttggtctttccataatcttcagtgtctctagtaatatgcttattctttggtgtttcttgaacatgtggagtacagttacaagagatatttgagtatatgtgctatttttgtcttccattatttacaaaacagttttgattgattaatcttcctcctcatcagtcatattttcctgcatctttgcatgtctggtagctttttattacttgacagacactaaatttttctctggctgtgggaaatgttcgtatttctctacatattcttgagcattgttctgagatctgattattagggaacagtttgatctgtttggatcttggtttcaagcatggttaggtagggccaaagcagtgtttactgtgaggcattgtttccctgctactcaggcaaaaacccttacgagtattttacttgatgtcctatggattatgtttaccatgtaggctagtaagaatgggcactattcctggtgcttttacaatttggatactgttcctgctaatcctttctggaaatactttctcttgggtagcttcctaacacaaatgtgcttgttagtactcagcggaagacatgaggagcgcctttggcagattccattgttgtctgtgtggctctggcctctgctgtgctctgccttacacattatatcaccttggcctccccttgtgtttctcaaccccggctctgcttgccctttccgtaactgctgcagcctggacattctctcagggcagtgagctggagggatcatttgttttccatccgtcagggatcacagtatgttgctatatggtggccgttgttttgtgtggatttttagttctttcagacaggcaagaggtataaatcctgtctagcttcactaaaagcggaagttctttctgttctttgaatgttgaatgagagtgtgagagagacacgtaccatcaggaaatggaactagccacggtcatagcttttcatttagttttgttagtctttaaaaaaaaaaaaaggtgaacagcgtaagtaagccctgactccaagaaaaaaaattcaaaattaataaacataagcattcggcctataataaaaatagtaaactccattccataataaagcctgtgactattagaagtccttctttgaagctatgtaatctgtctcttccgttaggaagaactgaccttagcctagataatattgtgctaaaaatttttaccttaattcttttgaaatacctgtttttaaggttttaccaccctcacttggcagctgagttaataggatttggatctaagctttcacatctataatgcctggactttgccactgtaccatgtcaccttccataagttgtagcaaatgtaggtctgaattttcaggtgtgtgcatctggacagcagttggcttggtgagctgtactgggggtgggggtgcagtttgaactggggtctggcctggtccacaactgtgctgaggggcacctcttgctgtcatgcctagtgttactcttcagctgacctcttctagtaaataatctcttctgccaagggatgtattccttcttttctgaagtacatgaaatgccttgcttcattataaactgagcgatggatagaaaggggaaaagttttagcttatcttgagcagaacctacagctcccgaaatcctctcttgggtcctccaatgttagaggtccttttgtttaaggaccctggagagaagcgcgtccaggagagggcccagctcagctgactgttgtttcaggtagctgctgcaagtagatctgtgattacttgttgattttagtgggtggttctctgtccttctggacgaatactctttttctttacttttcctgcagtgagctggagttggtaggtttggggtggctcacatcacagtgcttgcttgtgcatattcacctttcccatggaaatcttccaagtgtgggagggaagtttgtatttcacgcactgtgccttcaccttgatcagcaaggtgaacctgagttcctgggtttcagtgtctgaggttggatagcacagagctaaggaagcgttttctgagtgtgccagcaattctcgctgggctgtgcatgctctgtttcctggaggctgcacatgctgctcatcgacattcgtggtcaggttctttccctgcagcaaaaacccttggttcagacctcatttaactcacaatttctcacctctgctctaggggtacccaagatggtggctgtgtctccccacttctgcttccccatcaggaaatagagccccaccatgggtgtctacacaatagatgaagctggtcaaataaacacgaaatctgactggttttgtgtgggcttccccgctccccctccctctctcagaattttaagtgcttggcagaatactgcttatgtgactctgttttgggattataaaacaatcttttgtattgctccagtttacaggaagcagctccttttttctcattaatgacgcctgttgttgagtccatcttgtcttctcatgggttaggcctacttgactatgctatcaaggcttacaggtgtagcctagtcttttttttttttttttttttaaacatttatttgagacagggcctggctctgttgcccaggctggagtgcagtgttacgatatcggcacactgtaacctccgcgtcctgggtgcaagtgatcctcctgtctcagcctccaagtaggtgggactacaggtatgtgccaccacgtccagctaattattttcattttttgtagaagtaggttttcaccatgttgctcaggctggtctcgaactcctgggcttggttgatctgcctgactcagcctcccattgttgggattacaggtgtgagccactatgcctggcctgcatcccagtcatctgtcattggaaagaaagctgaggtccagctcgttttttgaggttggggacaggatagtggttttggcttttgggaagaattgtgcaactactaaattcagaaggattaatataggaggtagagttcaacatcacagaaggaagagtttggatggggaatgtggtttgttggtgtaacactgtggggcaagttgttcctgagtcatgggacaaagacaggctggtattttaagttcacttttatgggtcatgtgtgggtagatttgtgtggcttacgtggcaggatggactgcaggttccatttcaaattgttactacctagatcaggataattaagtctgagaggtacctctgtatgcttgacctcaccctgggctgagcacgtacgttttatccttggtatgggatatctgtttgcaggatgctggagaagcttgtcacttctcatctccactccttgctggcctctgcttcccttggggccgtgatagggaagaggtgtgaacatgtgtctggtgaccagtgttttgggttcctgcaactgtgaatacctttatggtgctgctgtgcctttgcaggtgccctgtctttgggtggagctccgtttttgttttccccaagacacctcctctcccggagggtctttttgttaacctctggtccctttctctagtggtcaggcttcatcccctcgttggtctgcgttgtttggccagtacttactactttcactgcttagacatctgagcccgcattcctaaactctttctgggaggcacacagacgtggatagacctgtatgtattcatccctggctgcctcttttttttttttttttaagagatggggtcttgctttgttgcccacattagtctcaaactcccagcctcaagtgatcctcctgcctcggcctcccaaatttctggaattacagtcatgagccactgtgcctggccattgactgtctcttgatcttcaagcccttcttggcttattttgatttggaattgatttacaccaggaggagttctccctccacaatcctccaaatgttgtggcttagtgtcaaacatgtttttctagcccagtcttataattaaccctttgattagaaattaggagaaaagagcaaaatttatgattatagattcatatagactgggcttgaatctaaagtaatactctgtccctgggggagtcagttatctgaaagaagagcaattttgcagagtggctctgttgatgttaataacagcaaacacttggccaggcgtggtggctcacgcctgtaatcccagcactttggggggctgagttgggcggatcacctgaggtcgggagttcgagaccagtgtgaccaacatggagaacccctgcctccactaaaaaaatacaaaattagcttggtgtggtggcgcatccttgtaatcccagctactcaggaggctgaggcaggagaatcgcttgaaccaaggaggcggaggttgcggtgagctgagatcgtgccattgcactccagcctgggcaacaagagcaaaactctgtctcaaacaaaacaaaacaacaacaacaacaacaaaccagcaaacacttacatagcatttatgatgtgctgtccacttccactgttttacattccttacatatgttagcccattttattctcatagcaaaatcattaagatacgttattttattatcatccccatcctaccgatgagaacactgaggcacagaagactatacttgtctgggagacaaggctcccggtatgtaatacagactcagtaaatgatgtctgctcaccttaaataagtcaatgaagagccatcataatgtactgatgacaaacagagaatagtatagttgtaccttcaaaatttttggagtggcctgagaattctggggtgtggcaaagtgattccattttaaccttcagaggattgtgacctccaaggagcacatatgcataggtgctaatttgtaaatgaaaacgcatgctaatagttttctcaggtgctgagatgcagctacatatgattgatttaagcctgttttgagccacagaaatctgcatcccagggaaagtagagaagtaaataatttttgttgcggtgtactgtggtatgaatgtgccccccaaatttcatgtgttagaaacttgttccccaatgtagaggtgttggggtcatgagggctgcaccctcttgagtggattaatacctttatcgtgggagtggattcatacctttatcatgggagtggattccttatagaaggacaagataggcccccttttgtctctcttgccatatgttgccttctactctactatgttaggtaatggcatgaaggccatcaccatatgcctgtccatcagtctttaaaatggtgagaaataaatttctgttctttatatgttacgcagtgttaagcattctgtaatagaagcctcaaatggactaagagcgcaagtgtgctgcaaaagaaagatgcgtgaagtttgtggaacacaagcagagtgactagggaaattgcggcagcttcaatatggtcatgtgtgcacttcattttcccatatctgggagatgtaataagagcgagaaaaggaggagacccttttagtattgtgcttttctgggtaagtcagtcctctttgacgtcctaatagcatgatgtgagctgccagctgtgggtttctcagccaatctaatgcagggaaacaggcctgtacctgtttctgtgaacatggtagctgggtgcagtgcagttatagtaataacatgatgagcttcttgagtactgggcagtttgccttgggaggggacagcagctacttgagacctgccactcaggaagggccagagttttcgagattgtgactcttaataatcctcgagtggggccgaggtttgacaagtgaagggttctttgtgcttcttaacaggctgcttctagaaggctttgtgtgcttcagggcattctctttaccgatggacttcacaagctggctgagagagaaggcaggattgaattataaacttttctttaccaagatggtgagctggaggcaagatggttagttgatattcaaaaggacgcacgtggatgttgggcaggctgcacattggacaggcccagctaggcagactggaaatgaccaagaacccaggtagtttgtagaattaaatgaaataacctgtctccacactatgtaggaggttactatgcttaagtgttggctcccaaatcagtctaagccaagatgtgctcagaggcactgaatcaatatttgttgaatggatgtggactgacagcactagcttccttcagttatagtagggagtggaagagctccaagagggtttcctgtcttcaccttagtaaatgaaaaacaaaccccaatcttgcttgcttgctgtttttccaacccccagaggatgaggtgacttaagcctaatagattcttggataattacaaggaggtcaggagattttaccatttgaaagccatcagtgccattttatggttttgatcaaaaggcttatttatagtatacatttacattgtttaagtgtatgtgtttgttaaagaattacataactggcctgagtaatggggggtacatcagcaccttgatatatttggagtagcactttgcaggaatgtaaaggagggctgtgtctggcaaccctttgtggctgtgtgcaatttatttttaaccttgccatttatgcttatcttcctgaaattgtgttttatgagtttgaaacctgggtcttctttctttaacaagttcctgttcctgctagacttgggtctgtctctagagaggtcttattagatactcaattcttctgcataaacctgcaccacactctgtcctaagagttcagagcatgtgagttgtagtgtgatggaaggaatcgcaaagcctggacctgccgcagaatatttgcatcctctgcaggtttagatgttggcgaacacttgttgggacttcatattcacccccattatttgcttcaggctcctggcaaacatactagcttcttccgcatttgtttattttctagaaaacaaaaaaggctggaacttcatttttattactgcagtggccatttcctttttctgttacctcggagatcagattgcagggatatcacttccaccccccatgtaaattatggtctagtatgctttgtggttgccatggaaactgctggatacaagtttctttccttcctcctctaagctcttgctaggcttttaaacagtaacatttttgtctcatccctttgccctccttgccttttcacacccccaaaggacaagtctaaacaccaccctgatctttttcagcagtttctgaccctcctgggaacatttgatcagttcctgaatcttccttagtgtgaatgtgtagacactggttcctggcatcttacgtgaaaggcactagatgctggaattgtgagggcttggagtcacctggtttgtgaaggaggtgacagccattaatgtcacttgtggttcacatgtgagtgcttatatggggttgttagacataccttttttttttttaatgcagagtgctgcttgatgttaatacctcacttgactgcctagtgcaattgcaagtagtgcacagtgctttaactaagatgagaattgaatgtttcttcttactactgtcgccgtatacttcctgttccctcactgcctccctcctattttattgtaagatgggagtctggcgggtgatgaaaggcagcaaccaaagtgacttgttttagaagaaaattgggttcatttctgcttttggaaattttaaggaggggtttttatggtaagtgggtttttttctacacaataaggtaaatatcatgcaagaatattttttcctttaggctcaatggctttaatttgcaatgatagaatcttctttttttgttagatatatatttttgttatactttaagttctagggtacatgtgcacaatgtgcaggtttgttacgtaatgtatacatgtgccatgttggtgtgctgcacccattaactcatcatttagcattaggtatgtctcctaatgctatccctccaccctcccgccaccccacaacaggccctggtgtgtgatgttgcccttcctgtgtccaagtgttctcattgttcaattcccacttatgagtgagaacatgccatatttggttttttgtccttgcggtagtttgctgagaataatggtttccagcttcatccatgtccctacaaaggacatgaactcatgcaatgatagaatcttctagtgccaggcatggtggctaatgcctgtaatcctagcactttgagaggccaagactggcgaatcacctgaggtcaagagttcgagaccagcctggccaacatggtgaaaccttgtctgtacttaaaatacaaaaattagctgggcctggtggcacacacgtgtaatcccagctacctgggaagctgaggcaggagaatcgctggaacccgggaggtagaggccgcagtgagttgagatagcaccactgcactccaacctgggggacacagcgagactctgtctcaaaaaaacaacaaaaaaaaaacaaaccccccccccaaaaaaaaaaaaaacttctagagtatagtcctcattaattgtcttgatagctccatcctcatacttaaagctattcacagaattggttgaaagcaacatcatccatatgtgattgtcttgcctgtgtttgggtggggcgaggaataggtagtctttgctttctaggctatgtccacttgagtagggatgggtccttgtttatctttgtatccccaatggtggcagagtatctgctgtggaataacaatttgcatgtttttgagtgtgtaaacaaattctaagagtagctaaaccaactattaggaaaaggaatctttttcttgttcttttttttttttgaggtagttgtggtctcactctgtcacccaggctggaatgcaatggtgtcatcataggctaactacaaccttggattcctgggctcaagcagtcatctcgcctcagcctcctgagtatctgggaccacaggcacatgccaccatgcctggcatacattttcatattttgtagaggttgggtctcagtgtgttgcctgggctggttgcgaactcctggtggcctcaattgatctttgcacttcagcctcccaaagtgctgagattacagacctgagccaccgcactccactgaaaaggaaacatttctaaaggggtcatcacatttcagaggcaaatactcctatttagaattgttctggtcttttgcacactatcatcttggagggggtgtatgcacacgtgtgtgtgtctgaagtaaaaacccattggatttgtttttttgaagtgttaggaaagaaccgagtacacgtttttggtagtgatacataccgttttgtctccggccctgcgagagagagaaatgtacacacacgtttctacattcttttccctgggtacagaaactccacatctgaccacagggaagccaaaatgtaccgtgtaaattttactccttggtacatctgattagtaataaggaagtgtgtatttctagcctcacagcaggcttgtgagtcctcagacgtcattataatattgctgaattgctagcagccctctctaattagtcatgccaagagaaggcaaaattccatcttcttgcatgaagattctctggttcttcccttggtgccaacttagggttaactccagctttctggactctttcaaatataaaaacatttaacctctgcatctatgtccatgataataaaataatgtcttataaggatgccattaaatatatctgacgttcttgctaagattttgttttttccttaggtacaagatgtacttttgcttctttatcttcctggagtttagttatcaagacaatttctgtgacattaaaataccatgtatgaccactttatagaatatttcaagtatgtacaattgacctcaatgttaattcatttcgtttactatatacaaaatgtgggaagaaggaaaacatttaaacagaaaacaagaaccatgcttgatactgagttattttcctgctgtttatatgtggttgccaattatatgttgaaatacatgaggccttttgagatgttgcttctcttatatgaaatactgttctgttgagtatataacagtataataggccaggtgctttattgaattaagtaaattgttttctaatatgatttaaaaagtgcactaagcaagcattgggtcgggtgtagtgagatgtccatctgtgaagggcttattgataatctggtgatgaaatcgcttttgtcagtgcctacttacctgggggttgtgggacttgtggggcatgctttccagtccaagcccacttaagcttctgctaactcttgggggaatgaatggtctgtaggggctgctttgagtaactgcacatgatccagaccagtcttggggtactttattattctgtcaacttggaactgtgtaggatgggattctagcagtttctaaatatatgttgttttcagagccattctttttctggaacatagttacaaatttgttcagcctgttactcagcccccaagaaatatgtttgcattcactgtgacagcctgtagactattggtaccgtgcagggctgtaatctgcttgttgttccggcaaataccattgtgtaatgtggactggcacttggcctttctggagcttgtagtttttcccctttgtagggagttgaactgcctttgccataatttctctcctgattatcatttcttatgcctcctgcaattcagcctaattgaactgtgctgggataaatagagcccttacagatcatgtgaatgtgagatcatcccattccctaaatgaggaatctatggcttagataggactgggtgctgtgagtcttcctgattaatgttttgaaatgatttaggaacccaaatgcacgctgatgttttccatcagctgcgatccgtatgtctcataaacgatgccttcctgctgtttgggttttgggaattgtttgaggccaaggagaggagggtatggctccttcagctttacccttctgaaggtcatgaggaataattctgacaaacaccttgaagacagtgacggcttgtgccttctgtgttgctgttaccactgcctccactacttttagtgtaaacaagctctttacatattattcacatttcttggttcaagcctcagaagaccaggatataattttaaattgcaattagttaattgaaattaagtttctaaagaaagtgttgaagactcttatctttttccctttcaatgaagcaatttaagcactgtaagaaatttacagatggcagtttggataatgaccccatagatttttttccagagaggttctgtctccagtgttgtccctttattcagggacattgaatcagagctgtgaagcagtctgttttgtggtttctgttgaaatcctcttaagccaagtcactaaaggtatgccactggaaaggactcttatctcttgtgaaataaatccagtaggaagcctgttctcaggaatgcctggttaggtacacaggctcactgtgctcagtagtgctcctgcacttttgctaagccactgagacccacagttcagctggtaccagtgtgttaccggtggagggtgtccaggttcttggcgttttgaacaaagaattggacaaaacacacaaagcaatgaaaaaaaaaaaacacagatttattgaaacgaaagtacactctacaggccgggtgtggtggctcccgtttgcaatcccagcactttgggaggctaaggcgggtggatctcttgaggtcagggattcaagaccagcttggccaacatggtgaaaccctgtctctactaaaaatacaaaattagtcaggcatggtggctcacgcctataatcccagctactcggtaggctgaggctgaggcatcacttcaacttaagaggcagaggtggcagtgagctgagattgcgccactgcacctcagcctgggcagacttgggactctgtcatcctccagctactctcaccttcaaaaacaacaacaacaacaacaacaacaacaacaagaaaagtacgctccacagactgggagtgggctcgaagccagtgtctcagtagcactggttgcagaattttctggggttcaaataccctctagaggtttcccattggttacttggtgtatgccccatgtgaatgaagaggatgaagtgaagtttcctgccatagctggaaagtttggaatgttacaaagttatttacttgggctagaaggttggcagtttttccgtttgatttagttctaggaagtccttaggctccttccctccagaccctgttctcctgctgcagaagcacaggtttttgaataaagttagatgtttggtttgtatctaagctgttaaaagctacttaaaagtgtctgagcctctctgtttccttgtctgataaatgcaaccattacaccttatagcattggctataacccagtatttctcacatgtaagcgtgcatcagaatcatctggaggactggttaaaacacagactggctaggtcctgccctgagggtttttgattcagttaagtctgaggtggtgcctgagaatttgcatttctagtatgctcccaagtgattcttttgttgctggttgaagaatcacactttgataagcaccactccgagggctctatgtgatttaaagcacgtattatattattacccttaaataataagcacccattctatatatagttgctgggtaagtgaacagtgattatgtctgtggttaagaatttttagggccaggtagccccatttccttatagggaccttttcctttgtgtgtccccaaatgtttccttcctcagcttgttcatctgccttgtgcagagaaagaaaagtaataatgtctttccttcccttgcggtttatttgaaattatttatagtctagttgttggctgcatgcctcctccccaacccccatgtctctctgtgtgtgtgtgtgtgtgtgtgtgtgtgtgtgtgtgtgtgtataatttcagtttaggcagtcgcttaggtggcgtgcatcctacctaagggcatgtcatccaagtgaaagtcttttcctgatgtaagcaacttattagagcaaacaatgtgatttaatcttggatttcctttgtattaggcggtcatatgctggctttaattttatattcataagatgattcccagcttcctgtgggttgcaatacatggtgcttcccttggccaggtcgatgcacccactactgcccacccacatcaattgcatcatacaggactggggatgtttttctccattcttttggggatatggggggaaaatttgacagtgctttctccctgatagttcttttctcttataattagcattaatggatgatactgtggctgacaataatgcaatatccatcatacccctgttttttaaattcttttaggccctaagagtttttccagtagccctcactctccagggtgtgtgtgtgtgtgtgtgtgtgtgtgtgtgtgtgtgtgtgtgtgtgtgtcaggagtagaatagggttgagaatatgtatgtgccagtgtactttactttccctggtttcacatgtttcagcttggcatgagacagtttatacccagtgggggaatctgcccgtaaaacacatgtacctccgtaagtctgtctccacccttcactgtgttcctaacagttttttttttatttttattttttaaacgaagttttgttgtagatcagagaatgagagatgacattaaataatactgtagctgtcccttgatgcacagaattcatgcttctgtgatggacaattccatatactcctcaatcagtgacttatcttttaaaatggaatttgttgtatttttagcctgtggggttgtttagggtggtggtatctttcagagagtgttgcacatagatagattacgaggagccagttccctagaggagctgatggggagagagattttcagaaaattcttagaagggcaaatagggtcagctgtcatctttgtttattttaaccactgtgaaatgtggaagagaatgcattggtttttcattgtcatgacaacagaggctcttcacacccctgggcacaacaggaaatgaacccattcatttatccaagtgtgagtctcagaatcccattatgtgaattccatggagtgttaattcaagtattttgatagaatgttattgtgtattctccagcagtatttaatagttgcctaatcctactcaagtcactaaatacccttcttgatctgctgtttcctcatctatcagaaggagataagattttcatctataggacagtgtttctcagctttccgtatcttgggccttaacctctgctggaagaggactttgaagttttgcagtctatataactcatgaaatttttgctttctacttctcaagtaggtttgggtttccttcaatagaaaaatggtttgttactgccaagtgagagccttaattctggctagtttatttttgatttctagaagctctgtttggttcttttcaaatgttaggttacactcaaatgttagtttcaatgtttgttcagtggtagtttcagtgttcactgtttcaggtgttagtttcctgtttttcaaacttggcttttatttgttttaacatagtctgatgattcaaattactgactgacattttcccagttggacatctgctgggttttcctcatggtgctttatttcccctgaatgtgaaaagttgtttgagggggaattcattgaggcctgagatgaaaaaactcttcttacagagggttcatgtatgtttttgctacataccttagggtatcatcagtccaacattatttaaactaaattcagggcttgagagatgatttttatattccaaatcctcgtgagggccgcttaagttttacaacttctcaggaaagatatccagcctttgggaatcctagctgaatgtaagaaagttgtctcctgttagagccccattttagggcttggagggtggtaggatgccaccttcctcccagtgccagtgctagggaaatcaagttcaggtttgtttgtgtcagaagcacaaaagtggggtcatttctccttgggtaggtctgggttctagcttttgttcttagaatttccatcagtaatttcttgtttgtttattacctcattgatggctttaatgacttgcttgaatatcttggcctgctgtattcctggaaatgactcatgatgccatgctttgctacattttatttttttaattttaaataaatacattttactaatttgaaatcgagtagattaatagtataagctgtttggcacattggagtttcagtgccttgaggatgaattccaaattttttttttttttaaactttgaacttcaggagtacagagcaaaccaatcccaaagctagcagaaaacacagaaaagctttgctgcattttatggtttctattgaaatggggaaggttttcttgtccccctctcagggcgtgcgatggaggagtggctcacttcttcagtgccccgctgctcatacctctaggggagcatacagacgggcaggttgtagggctgcaaccccacagcagtctctaggggtgaatgtttacagctgaagtcccagtgtgcatgtgttacagggtgctcctttagtttgctgtctataggcggcttgtgttagctcaattagactcccttccttgaggacagagggatttctgtaacccatgatcctacccttggtgtatcagaagaatcggatcacacgtgggcttggagaatgatcgcaaggttttattgcatagaagtacctctcagcagatgggagagccagaagggagatggttttcccctggaggcgggctgcacgctggtcgatggcttactggcctgccagtgctcttctgcggccgtgctctccacaaccagccgcttgtgtcgtcttccgctgatgtgttcctcaggacgtccagcagcttgtgtctatgtcttgctagggtcttgggtttttataggttttcataggcccaggatgggggcgtggcagatcagggtggtcttggaaaatgcaacatttgggcaagaaggcagaagtgccttcctcacttaggtcttgggagtagagccctagccaggggccacgcccttcctctacccagcttttccctccccaccttccctatcatttaaagggaccatgctcttctattcccagcactcctgtatcacttgttgcctaccacctgcgatgccctgtttgagaagcatgattagaaaaatcccagcaatcttttctgtttctagtggtgtggactcctgcttggaaggcttttcttgtgattttttttttcccccataatgtttatattctgtgttttcctattcagttataatgagttcagttcaggggagaatgaggttcaagtggactgtgcttccctgagagagcaattgagtgctctcctggtcacataggtcttgcacttctggagctctaaatggaaccctcccagcatatccaggtccttcttagagcccgactgcaggccaccctgtccttcagccgtgtgattttacggttttactgttcagcttcagcatagattctacctggaagcacaggggtgtgtggtcatcttttcttcctggaaaggtcccttttggtgaatgattgagttcccaagccaatttctgtcccagagggaggttgtttcagggactggttgggaatggcagtctccactgactccatggtgtagtctaggtcatactttatgttgtgaggctgtgactggattatgtcgcacttcatgaaacctaaggcttcctgttcagacctgaaaggcagaaactgtgtctccttcattatccattccctaaggtctgtccccttttatgtccagctgaatcacaccatgaacccttggcctcagctccttatgcactgtcctttacgcttacattgtggaagtcctcccttaacctagttagttactagggttgtctatctgcagtgctagtttgtgtaacattctctgcttttaaagttgtatgacataaaaaaatagaagaaacgtattttaaaaagaggaactttttctctaccctcttaagttcagttttggggagcctgctaattaaatggatgaaagacagattagcaacagggaaaaaaaaaacagatttagttgagttcacaaagaaatgtgactctaagaggaggttagaatttaccatcctagaatcgcttgaacccgggaggcggaggttgcagtgagctgagatcacgccactggactccagcctggcaacagagtgagactctgtctcaaaaaaaaaaagaaagaatttaccatcctaatgggatgtggggggcaaaagggcgattctgggaggacaaataaattcttagaagagggtggagaaaggccacttaagaagaacaagtgaatttttggaaaggtaagtgggcccttagcagaatagatagaagatagaatatttttgtcagtgtctgttagtattgttttccaaacccacacaggtttaatgtcttggggcctgttctgggtatgaagttactatggctgctttttgatggtattttggaaatgggttgtggggtggtgggatggggaggaaacttgaagtatccagctggaaatgttctcatttacaaattgctggaggagaagcctcagcaacccttcccaggactgatatatggctgggagtgtggagtttggcagtggattgacacagttaaagatggatgcctctttgatcaaagggagaccattagggcatgttgaggctggcggaatcggaaagttgcattataaagagggtagttatgcatcccccctcccagtgcctgtcacccacatctttatgaacatgattctgcatttgcccagttggctggcataacattctgctgaagtcagcagtgagggagatgtacgtacgtagcttttttcatctgtgaattgcagagcgtagaaggatgtagttcatttccatgattcctctgcacgtcattgtttctgaccaatgtggacaaaatgtgagtatttttctgacaattccaacttctttgttattgtggttcctcctggcagcccccgctttaaagatcctttaggcaaatgttatcctttctcttcaatggtggcttgccttcctgtggtgggggcagcatagcttgaaaagagctaggaagcagtttccctccacagtatccttctatctgctccattgaaatcccttactgtggccatgctcggtggctcacacctgtaatcccagcactttgggaggccaaagcaggcggattgcctgaggtcaggagtaagagaccaccagcctgggtaacatggtgaaaccctgcctctagtaaaaatagaaaaattagccaggcatggtgttgggtacctgtaattccagctactcaggaggctgaggcaagagaatcgcttcaacccggaagggggaggttttagtgagctgagatcacgccactgcactccagcctgggtgacagagcaagactctgtctcaaaaaaaaaaaaaaaaaggtgtggggggtgctttttctggttcaggcagtggaacaggggagaatgaggcaaacccagctacagtgcctctcataggaagcatcacaaccattaattactcctggtgcaagaggactcagtgaagctaggtttgaggttggggtaaaagataagattttggacattgctcatttaagaagtttttagctgaaaaatcttatcattggctgctttcattgttggaggtttataagcctgttgcatggatctctatcctcctcctgtacttgcacccctgctgttatgttttattaggatgtcgtgcaatttattctcccgtttctttcactcctggttatacttttgatcacccttccctctgttttgtaatgccatccagaaaaaatgaacagatagtgaggctttgtgaggaacctacgatggatatgtggctgcagccttctttggagggtttaagctgcactgaaggaggctgaccttgtggctttatcatttcctgtctacagacaaggaaaatgggcttaagcaggagggattaatgaaggacttaattgaacaggaagtctttgtcttttagcccttcagaattacacacagcttgggtgtttttatcttgagtcctgtttaagagattggacttcttttctcaggatgtttccggaaactgagtggggatcagaaattgtcatggagttaaaatgctaaagaagaggggtaacaagccagcttcattggatgaggagaagggcttgttttgatttcctcattcttcccagtctcacccctgggagtttctgctactggcttggctcaaagccttaaaaacccatagagtacttttataatgtcacagcaaatgcaagcatgttgtctctggaaaggaactctgaggcacatgtgttaaaccagcaatgctgtacctttagcagagtgttgttggttccgtgcctgaaacacagataacatacttgacatcaagaccccttgtgaatcagagagaatgactttaccttcttggaaacgttttgacttgagatgtagtcagaagatattcttgtccgaccctttgagggttcatttaagccgtacgcaattagatgaacatgtatgtcctgcagatactcactgctcatctgttgtccactgccgctgtctacatatgtgacctctttcaatttagtgcacattcttgacatcaggtggattcacagcttgcaacagcggactggtccttggctgataaaaactgggaggactttcatgttgtactgaggcgaggtgtctgaggtcatggaatggttattaagattgtaatcgaggtagaatattgtgagttggaaggtttgggctgacccctttgcatcctgcctcccagcccctcaggtccctccctttggtttgattcagtgatgccatttggtttctgttttgtggcctgaaatatggtaccatgtgcagtgttgaatgttgggaaaaatttaaggctgcttaagggatattctgggtattgttagaaaggaagttgatttgctcaccttgccctgttgcccactttccattggcacagtttctttgggttgtatttaaatttttattccactaatgtgtcttctagaactgttactacagccagtgacatagatgctcagacactgtgtctgtaatagctccggtttttaagtgggagaatgtgccgttgtttcagcatcagagagctcaaacagtcagaaggtggaggagaattagttttcctaaagttcattagctattagcagattttttaaattatgattgtgtttccttatcttaggcatttttaacaaatgttgtcagagacaatgtgtcagttatagtgaatccttttcttacagagcagacttcactccgcatttttgttggtgatagtttaagtaatgccccatactttgaaaatcacaaatgattaaggtccaggcaactaaataaatttctgtcagagccccaaaatgtgggttttctgatacttatcaaaaaaggctagatgttgtgggttttctgatactcagaaaatgtgataatcagaaaatgtaggttttctgatactcaccaaaaaaggctagatgctgtgtgttttatctctagccatgtttcttgggatctaaaatagctggattgtatattcctagatgttttccatacaagaactttggggtgtaatgagttggaggggtgagatggtattactaatagcgttgatagacctactttctgtaaatagtggctgggttcttaactggcaccagattttagtgcaggtcctaaaaattggctaatactagtgcttgtcataatttagcattcctttttttccccttaggggtgatcccacagctggagtgtaaagactcgctattgccatctattggtgcatgctggctacttcataagatttgcagtgggtggggaaattgcctgggatcccttttctatttgttaccctttaaatgaagaaaatttctgttagtgaacttactgcatgagagggaggacatgtaagatgccagagcccactctggtccttctgggacttagaggacactctgagtgccgcctttgtgctttggtctgtcgtgtgctgaatggatggttaggacctcacctaccgcacaactccatctggtatgatatttctggtgggaagtttctgcagctatcttagaagcattccactggattttctttatttatttatttttattttattttattttatttttgagatggagttttgctcttgttgcccagcctggagtgcaatggcacggtctcggctcactgcaacctccacctcctgggttcaagtgattctcctgcctcagcctcctgagtatctgggattacaggcgcctgctaccacgcccagctaatttttatatttttagtagagaccatgttagtcaggctggtctcaaactcctgacctcaggtgatcccccacgcctggcctggatttttattttttaataagctgtatagcattgtagaatacaatttcttcttatatttctcttgcattttgaaaaaaaaaaaaggaagtaaaacaggattctcgcctcacagggtcattccctttgcctttccaaacatgcccattgccaggagagttctggcaatttgcagttgggtgttgagtaatctaaaattgagagactgctagggtttttgttgaaatgatattttaaaaactaaatagggaatcccatcgagagatagtagaaaggcaaattaacattttaactcgctcttctaggcttttaaaactgaatgtacttagataatttgttcactccttgtaactacaacagcctattagaaattattttggccagatcctggctggattctgtagctacttgcatgtgttactctgactcttactgtctttatgtagtcccttctgccttaagatctatctgctttttgcttgagactgtcctgagaccagcagtctttgacgagaagagtatttgtggctcttccctcctgggcttggagttgtatccctcataacaacggggttatgccgtgtggggatggcggcgcagacagccttccataggtggtaaactataactgtgtcatttgtgactgacagaacaaaagggctttgttgccactttaattgttgattaatgatgatccctctcaaatttgacacggttgctttctagaacacaaaagaagtcaatgtcagatgtttccttgatcatgacagtcatgattttcaggcagtcttggttctctgacatttcaggatgccatagaagatttcaagaaacataattgaataattttattaattgaataaaaaactgtactgcatattacttttcatactgtttgtgcaggatgtcaccagctacctgagatttatatgcaccaagtcatgttttatttgggaaaaagttcatatcttgtagatatttagtgctattatcttcgattttttaatttttttcctcctctttcctacccccctaatccttccctggaattaaaaaaaaaaaagattcacctttctctctgatgcctgttttccactttagtattccaagggagtgaagtgtctgcgagcaagaatggtgtcttcctgatgtggtggtgatgtttggatttgcaaggcttgccttgtccttgggctggcttcttcatggatagagctgatgaatatatttttaagtagttatgtcagcgttcctaagggtgactcacagttctgaagtaagttaacgtgttgcctaaatgagttactcctcattggaagggctaagtggaaggaaatgcagattacagattgtattgctactatttaatctttaagggagtaggggagtggatttttggaattgtgatatctttctaaaatatatatgaatgaatttttcaccttcccctccaccttctaaagtgctaggtggtagtactagcactttaaaagtcagtatattttgctgttttactggcagttagaaagttggcgctagaaatctttagcaatactgacagtttggagatttagattttacttctccaaaataatcaggacttttcatctactcttacgaaatgatagatccaaaagatttattacagaaattactacattcaggtaccacttgtttttttaagaggaggtcaaagatcacagaagcttggagctagagagagccttagcttccctttttaaaatagtccttaaaaaaaccacctaagaaaaaaagacccagcttgccctaggtgacaagttaggtgaactaaactcaggttttgtgacaccactactcttttgcttgtaccactgaccaagcaaaacatcataatgtttcatcttgaggggaattcaactaacaaaagatttctttacgcaaattccggctatggcaaatgtttattctaaatagcttcctatgtaacttaattaagacaagtgctgcaaatatttaatatcctgcggttttttgcataaacaaagtgttccatcagtttatgtgtaaagcaagaaatgaggctgtggaccactagggctccatctccagaagtaccataaagcaggcattctgcgtaggataactctgcttacagagccagctgacctcccgttttgtcattgtgtgatgccctcccattctggtaaatcaaaccctgaccgtttaaaactgtgggaactgggtggaccttgcgcttagaaggatatggtctatgctagtgcctctcattacagagtttgctatgaattggtctctgctagcctctgggttcacttgaggatgtgtttattttctctttactgttcaggatgtttacaaccattctgtgtggtttgctcgcaaccgcacttgcatttgaatttggtgggcagcttgccctgggtagagggtatcccttgcccgaccccccacaacctccagtgcgcacacacacgggcacactcttgtttctttgagtggctgccaggtttgtagtgtgtgtgtctggggggcgaatggagtgggtaattattttggggatggaaacacaggaaattttttttttttttgaataggcctttcagcaagttggcaaagcttcagggccagctcccacaccggcacaaagagcgcagccatgccggtcattttgcatttgccagacacgaactgtctgatttttttttttttttttttttgaatgaacagaccctccctcccaccctttccttgccctttgtttagaattgggatgtaatctaaataattggatttaccagcttacgtttttaatattggaaaattgagttaataaaatgatgttttggcatgtacttccctcagcaagggaacagctgtgcattcactttaagccgcctggtcccccttgctcctgcttgatccagctgatttgtgtgtcacgccatgcccttcttgggtttgcaggctatcagaaatcctggacagaaataggatttaattaacctggaaattgctgttgtgccgcagtcagggctaccctagagattgagtgcacagatagcaataagctggttaactctacactgttgatgaccccagaggaaacctggagaaacagtgccacccttgtgtgaagcttctaatggcaggatgcccaggaagcttctaaatcaatcatttggggaggaaggggcacagggagggtattacaaaagaaaaaagtatttggcataggactgttagttcatccctggggtttctttacaagcatggtctcgtgatttattggttaactttccaaataatgttagtgtgtatcttgctgtgctccttcgttctcataaaggtgctatatattttattttaacaacaaacaatgaagattgattttggtaaatttttaagcggtgatacctaacagcaagtgagaggtggctgtgggaggcttagcagaaaaagaaagtcaccttccatgtagcttagggagtggatggatggggaaaggacaatagggatctttcccccttcgagctcatgcagcttgatcaggaagtacaaatactctctgatgtatgtggtggtcttgttgcatgaggtgtgtcaggagccgcctcttgggcccagcgactgtggcctgggaacagttgtgctgtgtgaggccatgtggaatacaatgaaatgccaagggttagaaaagcgccttgtgccacagggtgactgtcagccggaggcagaccttatttggcttctgcgagatgatggtgagaatgggcaagtggcatggtaaattcttaagggagggccatgtaggctggtgcctagttggtatttttttgttttcgttttcaaatatcagcctctatattcaagacacagttttattcttaacgaaactgaattcctgtctaccttcaggtagacttctgctgggatggctactaactttacctggagcacaacaataccaaggctcctcctctcctgttgctattggatctgtttcacaaacatgcaccaatctcccttttcctctgagttgccattcagtctgcccctctgctcagataccatgtgtgtactgtattctgtgattcctaaatcatgagtgatgggttgtataattctcagcaactatagcagtatagtgttcctcccctcctcctttccagcatctatggaggccttgtcctctagacttggtaaggcctgtatatagaagtggaccagaaagaggagactgcagtagagagtcttgtgtataccaacagaagggcagagcaatggctttggggttaggtggctggttatgcatgaggtactgctttaggatggtcacctctctccgaggaggtgacttctgtgcagaggcttctgtgcgggaagtggcctctattacagagtaacaggcctggattgtttgcttctcttatctggcctagaggatgagaagccgccaggcatggcaagagaaagagtattccagatggaaggagctgtttggagtaagcaagatccccttggaccattcctgcaatccctacctttgtcttaggccatttgttgccacataaaatacactctatgggatcccatacactcccatacactcccatatactctatgggatcaaatccgtaaatggtcattcattttaacaccttttattttgagacagcttaaatggtgttcactcagcggggctgattttggttatgaatgagggaccatggagctccttggcctggcaggttttagtgagggagtgcacaccagaaggctgtgctcacaaggctttgcctaacctgccacgtggaggtggcgtggcatgacagagacagctctcacatagggacccataggttcgtctgctgctcctatttgttttgccatccaagctatgtgacccagggtgggtctcacccttctcctagttactcatgtgtacagtgaaggggatcttattaagatccttgaacataacaaagtgaccagcctttcttatttccccaaacagcagctcgtatccgtcttcttctgaacttatttgaactttgtagtcttttaattcacatacacgccccagtgatgatctgatctgaaacatctattccctcacccccactgcgccaaccctatgttgtaccatattgtaaataaaatgttatcctctgaatatatcaacatacttcttcctctgctggtttacatttacttgatttgatcttttcaccttggcttgctggagggcttgatttaattggtttcattgacataaagggtacatgtggagttcctggaatgaaggtgtcttctgtaagggatctccttgaagaattaataaaaaaatacacatgaaagtaaattacaccatgattgctacttccgtggtgcgtgtgaaggacacacaccttctctggggctgtgttacccagggcaggaaggcccatcctgactacatgcaaggcccaaggcttgggagggcacgtattttatttttctctcaaacatttatgtttttacctcttcaaccccaggaaccccgtgctctctccaccccaaccccacagtgattctgaacctcttttatcccagttcttttcatttttgctgtaataatggaatggcaggtagtattctgttgaaaatgccagtcagctgatggcagggagtgaggaaataaatggtgtggtgggcgggtatgccgcctcccctggagggctgaggccccacaggctgggtgcagcctcacctttctcctcgtgcttgccaggtgacctcctcctttaccccaggcttctgctgctcctgccattagcatctctaggtgcaaatattgtgagttttcagcacatccaaatcactttcttccattttcctatatccagcattctagaaggaaactcctgtccctgaagcctgtctgtactgtttagagggcttactcaggatttggctgtgccattcaagctctttggttgtatggggctcttaatccccacgggactctgcaggttgaaaagccacactgcagacctaccctttttagacaatacaggttcttctggcctctttataaaagatattggtttgtcttgttctttagttcctggtttcatctgggtctcacaaatgtttaatcacttgggagcttggcttcttcctctaaggggtaatttattttactgccactttttaatgtgttattgccttatttttcatagcctcactgggaaagtcattaggcaccaagcaccttttatttgagcattggtaggagcagtttatctttgaggtcctgaaattgtaaaatatctcacagtgtctcgctccgttgtctgtgcttcgtctgtgtttacttgtttgtttctcattgtcgctgcacaatcttctcatcgtgtatagggtttgttttccctgacttctaaaaaagctgtaaacccttaacatcctgttaacatgcaggcaatatttctataaaattcctgcaatactcagagtgcgatttgcgtccattcaaatgaagatgtatatattatgtaattgccaattaaaaatacttttcagtagaattaaaaaccagcaatttttctaaatatggcacaacatttcctttgttttaaaacagtctgggaggttggtgggaaggaaagcctcatgggaaaagcagggcagttgtgttgggtcagtctacctggcagctggttggaatgtggaccaagggttctgtagccttccctcctctgacactgtgtgctcgagacctggccatcaccaggtgcctgtgaattgatacagaaattgagagccagccttgagaaacctctgcagtttgatggaatgattttgtgtctgttgagtcccaataaattaggcttgtgttttgtctttttaaattgctttttgcccccttgttctatttttttatgtaattaaaaaaaaaaagacatttgtaacagatggaaaatttaaaaggggaaaaacaaccaagcagaaaactgctcctcatctgtgatagatgaagctctgtgattgtcggaatatccccgtcaccctaactgccccccacttcattgtcccatgtgaagatcctgcctctgggcttctggtctgtcatgacttatatagaggcaggcagttggttgcaaaaaagctctctttgttccccatgacgtagagatagtggcattgcctgatcccaccctcccccttattttttaaaaaataacattagggaatttctgttaaacttgattcacttcctgctgttgccttgttaatgtgactgtttcatatcagttattcctgggttctaaagtgctttttgggacaggcatcatggctcatgcatgtaatcccaacactttgggaggccaaggcaggagataggcttgaggccaggagttcaagaccagcctgggcaacatggggagaccctgtctttatcaaaaaaaaaaacccagcaacagcaacaagccaaaaacagctgggtgtggtggcacataccagtagtcccagcatttagcaaggctgaggtgggaagatctcctgagcccaggaatttgaggctgtagtgagctatgatagcgtcactgcactccagcctgggtgcagtgagacccagtttcagtaaaaaggttaaaaataaaaaaaaaaagtgctctgaatgacctacattgtttgtagattttttttaaggactatagattacccactaagtagttggagtcacactttgtccgttttggtggattgtcagtttgtatcaggaatattattagacggtggtgttttcgatggtcataggggagacaagagtagacactgcttaggacatacaagggaatttaaggttaaaatgagattggaaattcctcataacattgtagtactttatatttcgggagtgtggaggatttatgaggttaaatttaaaggtattagttttgatgaagtaggcaatcattgtgtattttcttgtaggaatttgttaaatagtataatttttttttaaatgttacagcattttgagcatcaacagtttaagataaatgcttactattttatataatccactcccaaccatgtctttaagggaatacatctgctctcttttacttacttagttttttttattcgttattatttttgagacggagtttcgctcttgttgcccaggctggagtgcagtggcgtgatcttggctcactgcaatcttcacctcccgggttccagcgattctcctgcctcagcctcctgagtagctgggattacaggcacgtgtcaccacaccaggctaatttttgtatttttagtagagacggggtttcaccaccttggccaggctggtctggaactcctgacctcagatgatccacccacatcggcctcccaaagtgctaggattacagggatgaaccactgcgcccggcacttatttagttttattagttaattgtcttgagtggcattgcattatccatcctacgtagtgtttgggattctgatgaggtctatttcaatccctgtactgtgtggctgtttcttggttctttttgttgttgttttcctgccctcaaagaatgtttttcaaatacctctctgagcaggtctaggtgaacagtttaaagtagggcccagtttctcatccttgcaagtgctcactattgcgtgagtggagacctttacgattagaggaggagggactattaggcaattgacgatacatatcaagttgattgtatgtaaagcaaaaatatgttcgtgtatttattggtggagagaaagggaaatttcttattggctactgtgttaaaaaagaacaaactgggctgggtgtggtggctcacgcctgtaatcccaacactttggaaggtcaagactggggaggctaaggcgggtggatcacctgaggtcaggagttcaagactagcctggccaacatagtgaaacctcacctctacaaaaaataccaaaattagctgggcgtggtggtgcacgcctgtaatcccagctactcaggaggctgaggtaggagaatcgcttgaacctgggaggtggaggttgcagtgagctgaggtggcaacacagcaagactccatctcaaacaaacaaacaaagaaacaaacaaaacactgttccaagatctattaggatttgttttgatagaaaggaatttctacgtaagatattcaggtgaaaggaattgaaatgtactctgtagttaacaaatggtaagttagggagttagcataggattgtaatgggaaagaagcctgaagagtagattagggctattttctgttttaatgtctaccaaatagttgcaatttgaccttgttggcagagggtaacccagaatttgggattggagggggcgtagatagactagagacatacctttttttctgtagtacaaacttgaattgttgtagtgaacttttcgtggccgaatttagaagtggcgacagggacactgatggctaaataggcaaaggtgacctggatgtaatgacacagaagagatgtgggtatggatttgtgaccccgttagatggacgtataggatgtatataaatacagcaggataatgtagtgttttcttctttactgtcagtggaaataaatgaataccattaagctgatgatgtcagataccgtgtgtagtttttaaatactcaggcaaacatagtgtgtacataggcatgtatttctacacacatgtatacacatgtccatgacacacattttatatccatgtacaaaacatagtcctttaaccaaatttattgcgcttgaaagtaggcctgtggtttatgagagtgtgagagatatagaaccttaattaggaagagtttgcttgaaataggatcttttttccccttatgtgtcatgattttattgccgcacgtaggcctatatcctccagtctctgcttaatttatttttaattttcttttgcttttgcaggcccaggctgcaagcacaaaggaagtttgctcagtctcagccgaatagtcccagcacaactccagtaaagatagtggagccattgctaccccctccagctactcagatatcagacctctctaaaaggaagcctaagacagaagattttcttacctttctctgccttcgaggtaagactttgcaaccatcggcggaggtctacgtggaatctacatgtaagcctgaggtctacgtggagtaaccttagctttactctctgccatgttcatttttctgtccccaacctgggttgagggggaattgaaagtgagaaatcccaccgagagagtgtgtgctgggtgtggcttttgaaccatcagttaagttttatttcctttttaatatgactcttaacaccctacttcctggcttctcaatgcacaattatgcagtttctaactttgacttctaatttgatttctctgcaccataccaccaccttgacacacacacattgctgacttgttttgtaaggcagtttttttttgatgcaggactttggggctgtgaaggcccctttctttgtgcttcctaaggcctgtcaataagccatggtgatgagggacttacggttctctcagccctatattacgttaaggaaaacagtactggtactttcagagtctaattgacagtgcaaatactggtccatgtttcaactcggaccagttaacggaggccaggtggatttgggatctgctgaatagagttatttgtgaaagtgtttgttgcagtttccttattactaagttttctaatagctgtgaggaaagaacacagaagattgagagaataaggagtcatttctggaggaatgatagaaaatttaggaagtcctgaatgcagagagttccttgggtgaggttatttgagagaaaatgagcagaaggagagggcctttgctattggacatctgtgggaaaaccttgaggttcatagtcacttttatttgataaatattttgataatttattattacagacagattttaagttaaccttaaaaagtttccacccatcatccctcactcaatacattagtgtgtctttccttcaaataagtacattttcctataactgtcaaagttaagaagttcacagtgatacgtggcccccatgcagtcctcaaacctctgtttcacatttgttctgaaggtgctttgtaatgtccaagtttagagcaaaaggacccagttcagaattaggcgatgccattaattgtctgtagtctgcttaatctggaagagttcctcattgtttgtctttgacctcaacacttgaaaattacaggtcaattattttttagaatgtcccttaatttgggtgcctggtgtttcctcatgattacattctggtttgtgttcttggcaggaatgccacaagggaagtgattcctcctccttgttgttgggtcctctgtggggatacacagttcagtccttccctttccacactcgtgttcatgctgatcattcgactgtggtgggcctgttaggagtaaagttgcccgtctcagcctttgcagtgtataagtgttaagagaggatattctttgaaactagtacatacttctcatcatctttatcataattgtatgcgtatgggcttcctattttattcaaagggttataatctgttactcctattatgtattctgatgttcagattgtcccagatcaccgcctcatccgtggatcctcatcaggctggctttttattccatttgacatgtccctgtcatccttccagccttgcttctggcacaacaaaatgttccaggctcatggtgtactttcccgccctcagtcctggaattggccatgtcttcaaggagcactgctttcttatagggataagtgctgttgaggagccaagatctgggcactagggatgctgggaactatgggaatgtcatttctcccaggtgctcttagtagactgaggttgcatgtttataagggtctatccgaagttctgtgtatattaaaatccgtgagttagcagccatacctccaatttcaatttaacactaagggaggttcatgtgcattcatccctgaggaacttggctcctgtaatccttaatatacttacttgctctgtcttttcagtgtaatccacctcccatctctgcttctctgctgcccccacgatgggaaactcagccctgacaccccatatggttgctcctcaccccctctccttgcccaattgccctgccttactaattggctttgggactgaattgttgggggggaaattttgacattataggatagttcttggtgattcttaacacataagaaaggagagttattaatgtatttgttagaaattttgtagcccttgtcggttgttgagccttgaaaacagggagatacgaggtaggtggggttcccaccagtttatctccattagcttttttgtttgtttttggagacagggtcttgtctcatatcaaaataagaagttgtccacttctggagtgcagtggcacagtcatggctctaagcagcctcgacctcctgggctcaagccatccttctgcctcaacctctccaatagctagacctacaggcgcaggcaaccacacccagcaattttttttttttttttttggtagagaaggagtcttgctgtgttccccaggctggtcttgaagtcctgggctcatgcaattctcatgccatcttggcctcccaaagtgctgggatgacaggcatgagccaacatgccttagtttttacatagattttggctgaaagattctcctgatcttgcatgttgagtatgaagatggaaaggaagctgtgagaactaaatatgacagaatcttgtgctggattggctgtatatagagagaagaacatggccactagactgtgaggctggtagagtgtggtgtgatgatcaggaatggagaacgagtgggatgtgtactcagaaggatgtatttgccctaaaggaatctttgaaggatcagcagcaatgtgattcaggtatatctagccgcgcttggttgtgccgtctatagtccatctctgtggaggctgacacggtggaatccttgacacctggagtttgaggctgcagtgagacatgattgtgcctcagcactgccgccttggcaattaagtggcactttgtctcaaaaaaaaaaaaaaaacaatggtgatatgggactcttaatttgtgactttggtcttgcgtggcttaaaatttttttttttaaatgacaaataataattgtacatatttatgggtcacatgatgattttgtgatacatgtaagtgatcagatgagggtaatcagcatatctcatctcaaacatttataatttcttagtgttgggaacattcaacatcctccttctgggtgttgctaactgtaggcatcctacagtgggatataacactagaacttattcctcctatctaaccataatttggtatccttttctaaatatgcatggcttttaaacgtaattggagccaggtgtgttttttgagacagagtctcactctgtcgcccaggctggagtgcaacagcgcgatcttggctcactgcaacctctgcatcctgagttcaagtgattctcctgcctcagcctcccgagtagctgggattacaggcgcccaccactacgcctggctaatttttgtatttttagtagagacggggtttcaccatgttaggctgatctcgaactcctgacctcaggtgatctgcctgcctcggcctcccaaagtgctgggattacaggcatgagtcaccatgcccggcgaagccaggttctttaaagagtaactatgacttaactagtttggctacttttgggaaaggaattttgatgtctaaaattgctgtcggcattttgcttagtaaataatgaaataatagtttctgcctccaccagtccaccaatcccgtttcattaggatgtctgaagattgctctgttgattatggaatttagttatgcaggtctttactatggcgcaattgtgactgttgtgtttagttctcaaaggtagagaaggagagaaacccatcagggaatgtctcagtgattctgtgtagagaggaatatgtgtgtttgtgctacatgtacttgtgcgtgcactatcttataacattatattttctgaggttctgggaaacctggagagtcttttagttgcggaggcatgcttatttattgttcaaataaatgccatctagagaaaacattaccaagtaagtacctggctttgaagtttcaggattccagacagaagagaatcatcttttcatagataaaatttacttcttttagatgtcaaatacaaaaaaggcttaaataattaaagcctaggagatgtttaaaacaaatttaaaaaaatgctctgaacctttggaaatgaatttcatatatgagctaggcaataaaaataggctttgttatttgtttttctgttcgtatacaatattgtactgttttgctatttcttttatactttttttagatctgaggtattaaaaatgagtcatcctagctttaaaataccatttttttttcccgggaggataagtgtgtttacctgatctgactctacaaaccccaaatgacagatgatgcttattatagcttcatgaccctgaaaatctgatggatttggtggccttagatagcatcttttctatctaggatatctagatagcatcaagataggtagtttcttgagctaattaaaacctgtatttcagtgtgtacaaaggttacatagtgatccctgttgttgtggtactttaataattttatttccattttaatttaagaaaaacaggatgttaagctttttttttttttttttttttttacaatcataaaagtagttcctgttcatcttgggaatattgacagaagaaaggtaaagaagtaggcaaaagaatgcattcaaaatagcatctccaccatctcccagagacgaccgctgttaattaccttgtttgtgactattttactgagcattctgtgtgcatgtataatacatatttttcctgaaatgatattgcattatactttcgtttttgcagtctgattttcctacttaacactgtcacaaaaatgcctgtcatttcattttaatagcttatgttccatttggtgaatgtctcataatttatctaattcctgatgcacatttagagagatttccacctttttgatatccactgctaatgacgcatatccttagttaaatcttcaccttgttgaagccctttcaggcaaagttgacagttgggaatgcgattaaccttcttacacctgcatcctaattctgttcttttttcgtgctgattccaaagcaaacatagcttgtcacatccccaagcctctagtgttcaccataaagagctcagtcagcccatcacccttgggtgacagcgagcactgtgaggggtaaagaaggcagtctttaatatgctcattatttatagggaagaaagtctggctgcagaaataatgaaggaagcaaatcaaacacctggaagtgatgtttgttgctaaggatccaggtcttttttttttttttttttcccttctccagtcctcaattattacctttaatattctcggcacttctttgggatttggaagagaataaatcgtgaggccaagggaaagacagcgagtggagttctttaaaccttgtttgttatctgttaatgacagtgagaaatctttgagatggggaggaaaaaccctatactattaatactgggattagtatagatatgtaaacacccagctagtcattctgaggttaaaagctttagaaatctaaaacaaatttgttttaagacactaccagctaagtctgcaaggctctttcatttcctatttaatattgtgacctaaaatttctacaggaaaggaggatgggatgaatagtgcagccggcccgaggtatttgcccgcagtgtatttatctttaaatagctgctttgaaggggtccacatgtctcttgccagaggcataattagtatctttcactggcacacgcggggaagagggttttgcgcttgctgcatgcagtgattcgtaccatcgccgtattccctgtcaccactctggttattcttaatgagttctgtcgtctcctctttgttctgactatgattattaacagattaaaaagagcttaatgtagcagagcactggcaggttaaatgattctcttatttacattttcctctttacggggcactgcaaacaaggggattcccaaaggggactcctgaagcatgcaaacctacatacacagttcattcctatgaccgtgggcatcacagttcagcgtcacggctcggcacagtgaagagagtgttattatggggagttcctcgtaaatatccttactgtcagccgttgtgaagcaatgctgtcttgttttggaactgcctgccttttgtttcttctgtcttacagaatctttagtgatcagctgtcattcagttgctaattaattcagcaaacctttattaaactctttttgtatgctagacacctagaaaacagattagacacaggaaagcagtattggtggtgggtgaaattgaggatataacaataaatgcgtgaaaatgctgggatagaagtgtgtacccattaaagcaggaagggagaggccctgggatggctgcaaaggaatgctgacatttgctgcgggtctccgcgttacagtgcattaggaatctttgcagaaagaggatagtgctgggaaggggttctgcagaagcaactgccaaggcatggattgatgttggaggtcctggagttaaagcaagaaagttaggataagcctcagattctgcatgccctgggctagttactggagtatcccttggcgttcttcaagtcaggggtgacatcataatacacctatgaggttaggaagatgttactggcagctctgcagaaaatcgattgaggctgcagggagttctttctaggggcattggcagaaggctggcatgtcttgggcagatgatttaaatatttctcagcctgagcttcctcatctgcgaaatggatattctagagtctatagcacatagttgttgcagagctaatgggtatgaaatagcccagaattgatacctgaggcgatcatccacatataggcatcctttgataactcagaggactgatttatggacctccttttgataccaaaattcatggatactcaagtccattatgtaacatggcacatggtatttgcatgtatgcacatcctcctgtatactttaaatcatctcttgattacttataatacctaatacaatgtaaatgctgtgtaaatttgttagataatattgtttagagaataattacaaggaaaaaaagagtctgtatgtgttcagtagagatggcaaccgtccctttttttacctgaatgtttttgatcgacagttggttgattccatgggtgcagaagtgtctgatacagaggtccaactgtacatttatttaccattttttccagtgaattgaggcagaggtagtggagaggaagattattagattttggatttaggtggaactgtctaaaagaccagctgaatcggccacaggtaatagaagagacagccaacctgtggtgttttttctaaagagcgttgctggcctcattggcaaggaacacatattttgatgtggtcctagccttgagtattgaggactaggatttctaagtagggcaaatgcaaaagcctggggtgatttagaggtcacagaatgaaaggggattaacctgccagaaagcaattaagtaatcccccaattgcaaggaacactatggtgctaataatgagcttccttgagcaaaatgggaatactttacattatgtaaactctttggggaggaaatcacactgtctccagtggtacacaactttttttgagggtctccgggagttgttgcatcttagtttttgagagcagcagtagtgaaagtgtatgtttgagaacggtgtcatcactgcctaggggctttcagtggccttaacgttctgcatatgcttggttttctcctagagtcagttacctgtttcatttgttgggatagtttatcagttaataatgaagaaatctgaaaccctgaaatttttgaggtctgaggaggggaaggatggatcacttttattggccctgtgacgttgatcagatgttattaataagactgtaggtcattttgctgtgaggattctccctgctacaggccagctggcctctgaccatgttgtgccctccctgaagataaggcaggcttcctttttgctgccagtgagtactggcacagattcagtagtacttctcagagtcatctctggccttctccttactttctagagagtccttgagtctttctgaaatccacttagagaacatggaaataagactttaagtatggcagtgctgttttgttggccaagcaccttgctgactgaaggggtttcatttatagcactaaagtccctggtgtctgtgtcccgcagggaagttgagtattcagcttctctattgggaactgaggaaggcctcacatgattcgcacaaagactgttgtctgtagtggctgttagaatgctcattttgttgttgttgttgttgttgttgttttgttttttgagacgaagtctcccaccctgtgtcacccaggctggagtgcagtggcgtgatctcggctcactgcaacctccgcctcccatgttcaaggtattctcctgtctcagcatcctgagtagttgggaatacagacgtgccccaccacacccagctaatttttgtatttttagtagagacggggtttcaccatgttgaccagactggtcttgaactcctgacctcagggtatctgcccaccttggcctcccaaagtgctgggattacaggcgtgagccactgcacccagccagaatgttcactttcttactggtttcttcttctccacttgagataataccgtgatggcttgagcaccatcatggctgctgctatgtggtatgatttctatattcagtgagatgaagcgaaccatagatagaccttgtggcatttgactgggtgtgtatttgaatgtgttttaaattgccagtgcagacaacaatgtaggaagggttgtaaggggaacgttacagttttcaatgacaaagatgctagattagcgtgggaataggagattgggagggaaggtggtatgataaccattgtattctccttgtgaagtcccacatgttaattgcacttgcagatagaatactaccctaatgtcgggaatttcctatttgtgggattagataggcacacctgggtgcttgtttgcactagttcttgagagctgtaatccaggaggaggagggagggttgctgaaggaaagactggccatgcatctaggaggtcattgcgtcatccctccttgttccttaacaaagaccaaaggttcagcttattctaaccattgagttcattttgcattttcatcccctgtctcccagattctggtcaccaaccaatctagttactttcctatttgggaaagaagatatgctgtcacctatggaaagaatgacagtatgattttatacctatgagcataataatatcaccttactgtgagtcactcagcttgcttttgcctatgtttggagccataaaaatgtttcgactgaagacattatgctctgtatacagttgagtaacctcgagtctcatggcaagtaagcatctcccagagccatggcctcatcctggagtcttggatcccatgtagagtcccttcagtgatggtatctttttttttttttggaaatacctatttaaaaagaagtacattcccaagatgagcatgattggataggcacctccgtattcagtaaggaatagggattccctttgtgttttgctcatgctattgagggctgcttccctatctctgctacacaaatccctcttcataccagaaaggacattaagtgaacgttttacattcattttaattttaaccattacctttcctttagggcaattgatagtaattttgtcttgatacaatggagataaattatttaagacatgaatgcaagtcaccttacagataataatagcacatggagcatctggatctggcaaatacttttaggatggtaggcaaatgaatgcgaattgggaaattctgttttaatttcttccctaataagttgtaaagtcagaccaggaatgggcagagattggcactggacatgttatatttgtcccaaagtcttttagggaagtttgtgtttacatgttgtgcatgcatgaacatgtgagatgaatgtagacagctgccctgtttgagtctctggtgctttgaacagtgctgatacatacatacgtagattgatgcactagggtatttgggtgcaactgctttcttctgtgacttctttcatcttctatccgttgcccaagtccctgccagctcactttgaagttttgtttcttaatttgatagtcggggttgattacttttcattctgtttatgtatcccgaagatgaaacacaaactcagtgggccagccccatggtaattgggtcaagcaatagaatttgactctgcagctaaatgacagtgcacagggaatccctctagggtctttccaaaatacagccaagcgatgtttcgctgcttaagatcaagaactgatcgagggagggaagataatgggcaggagggcttgtctgtgtacatgattcatagagaagaatccaattttatagaaaccacagcctaaattagagaaagcaagcttttggattaaaatgatctctgttgttgttgtaacataccacagtttgatttttgtccagatgaaaacatttggtttgcacttcagtaaatattgtggagacattgccagctaattctgaaaagtaatgaaatacggctttggcaaagagcagatgcattccgtactctgattgctcttatctgatccaagttcagattttttttacatttgctaatgcacttgaataatcgggagagaaaatctgcctgtaattttaataggaaactgtctatattgactatacttttataatgaccacccataaagtcttcccctgctccccctgaaaaaaatcccacacaattcccaaacctctaaaacatacagcttttgttggttacttttctaaaatgagagtttgtaaaggagtgatatgatgtggtgttccatgtgaggagtcagcctctctcacttgctaaataatgtgaacagagcttgtgtttttgccatgcagagtccacccctgagaacgcaaggtcatgtggggttgtggagccctttccttttttttttttttttttttcgaggtggagttgccctcttgttgcccaagctggagggcaatggcacagtttcagctcattgcaacctctgcctgctgggttcaagtgattctcctgcttcagcctccctagtagctgggattacaggcatctgtcaccatgcccagctaatttttatattttttagtagagatggagtttcgccacgtgggcctggctagtctcgaactcctgacctcaggtgatccttctgccttgacctcccaaagtgctgggattacaggtgtgagccaccctgcccagcctgttctgttttcaaatacgtctgctagatacgaagtttctaccgactcagcacaatataattacgtaatgcatccattcacccatttcatactgagaaatatgcaatagttttctccagtgataaacaccctgggctgctatctgacttgaggggtttgaaatatcctttctttcatcctgtttgtattgagcagattcttcctcctctgcatttatttctaaatgagataatcaagctggtatgtaggtaaagaggaaataaatgctctttatataaatgtcttaattaattttagtttcttagatgctttgtgtcttatgcatttgaggttgttatttagctattttctagatattagtccttttctatcgctgtgaccatttttactttggcatgaaataagagatgatcttactgcatttgtctcgaggagaaaaaaagaacctactttggcttcatttttaccaattctgtggcttctctgggtctggaatgccagtttgacccctctgtgattttacaagtggacattccagcagaattcttagagggatttacagcaatcacgtggtgacagagcaatggcatgtgcagcgttagactctgttggctttattcttttgtacctacttctgtttgtctatgacgttgatgagatggacaggtatgagggtgcccgaccaaattctggaggtctgttccttctaggggagatgccagttgttcatgagtgctccccctggtggatgggtgatggattggccgtggcccttggaggatgatgccaaggaggacagtcaggccatatccaggcttggggagacagtgttgtccttgtggggtaccccccagtgagaagaaggggtacaagcttaacctctgaactaagggtactctggtggtggttaactgacctcctcccctggagttcatttttattctgcttcaatccctttcctacactttcccttttcccagtcttccttccattcaacatattacctcctgattccccatctgatttacgaatccttcattacccatttttctttgttgattctttacctttagatccagaccaacatgccaattacctgaatagaagcagaatcatcttctaggttgaaaacaatccttttttcctgtgtccccatgtgtagaagaaattgtgttctttctcacctctgacttcagggccagttccatcagagggacttactactattataaggttttactttgagagcaagttcctcagaattgcccttattcctcactggtcttctatttctaatctttcttccattttagcccctcactttctttcccagcactcagcaggtcacatcacatattcgtatttgccgaggagccattaaaacaaatccattcataatgttggttgttttctgcttttgttaaaaaattatcgtctatgggccgggcatggtggctcactcctgtaatcccagtgctatgggagatcaggtgggaagatcacttgaggtcaggagtttgagacaagcctcggcaatgtagcgagatcctgttcctacaaaaaatgaaaaaattatctgggtttggtggtgtgcacctgtagtcccagctacaggaggctgaggtgggaggatcacttgtggccaggaggtcgaggctgtagtgagtcatgatcacaccactgcattccagcctgggcgacagagtgatttcttgtctcaaacaatatcttatcctttgtagatatcaacaaagtctggatgctgaactgagcgtctagatattttctccattttagttctttgcaacataaactcaatcctcaccctaacataaactcaatcctcaccctttctctcaacatcttgagtgcaaggaatgtgatatttgcttcatgctgcttctctaatgtttgagtttttaaaaaaatcctcaacagatcctgttaagtggaagttaattccttatttctaatgtgcttcacatggatttttacctgattctctttgaatcttagaatatttttattggatcttactgctgtattttttttgttgctgtttgtttgtttgtttgtttgtttttttttttgagacggagtcttgttctgtcgcccagcctggagtgcagtggcatgatctcggctcactgcaaccttcgcctcccgggttcaagtgattctcctgtctcagcctcccgagtagctgggattacagacatgcatcaccatgcccagctagtttttgtatttttagtagagacggggtttcaccatattggccaggctggtctcgaactcctgacctcaggtgcaccacccgccttggcttcccaaagtgctgggattacaggcgtgagccaccacgcccagccttattgctgtatttttatattgctctcacatggcctcatttgtggagtttatttcctttgcaacagaggggagagaggaaggctggaggggtgatggccctcctcttgaaatacatgcctgtaacagctttccctcctgcttctcctgtttccttctgaaaaatggttgaattggctgcagaagtttctattagaaagatctacacaagaacctgctgtttttataccaatccatcgtttggatttcagctgctagtcattgcctccaagatacagtataggaaggttgttctttaaaagaaattaagcatggatatttttatctgggaggaactatttaacctatcccatctccttttagaagagggaaatttaatggcagagtctaaaacttacaagttctctcctaatggtatgactgacagcatgtgttagatcgatagtaaaataatttgaatattttttgagtgctgtagttactcttgttttttcataaatacttataaaggtagatttagggaagagggatcaacaacattgttgtatttgattagataacctgtctgtacccatgaatggtgatactgtactgaaaactatgctaattagcctcctgttttccttgtcagtcttgtaccaattgtaaaaccatttagattgagtatatattttggtccagtggaaatgtggatagatatttttttctctttctcttttaactcctgactgtttattttactccctcttctatttgattttccccaaagtctgtgtcaggtttaagaaccttctttctgtccagaatctacttctaaatggagacaatcaaggggaggggaacaaaacatcaaaatggcttttgtaagaccaagttgaaatcttctgtctacagagggtctttttgccgactgtatccctttgcagttgcatatccactcagtaatgtggttcacataatttggggggtttttgaacattgataggtcatgaagatgcctgtaggaaaaggaaggggttgaaggtcccacatagtctttgcattttggggagatgggtgcttggtttgccatctcagctcctgatactgctcattttccatttccttgtcactgagcatatatagttccgaagctggacagaaatggttttaactgtgtgtttaaaccttgagatctttgagatctctatttaggtaggagagtgaattggtgatctatctcttcggtgatgttactggagtgtttttagctcattcataggcaggcaagagaagacatgaattttgtatttactagttcttttactattagactgaaggggattttgtttgtgttttagaagcctctggttccaaacaacgtacaaatgacttgattgtatttcctgaattgcctttgtttgataaagaggaactatattgtgcttttttttttttttttaagaatattgagcctaagggtgggcatgggggctcatgcctgcagtcccagcactttgggaggccaaggcaggaggattgcttgagtccagaaatttcagaccaacctgggcaacatagcaagactccatctccccacaaaaaattagctgggtgtggtggtgcgcacctgtagctccagctacaggattgcttggcccagtaaagggtgcagtgagctgtgatcgcgccactgcactcagcttgggcaacagagtgagaccctttctagaaaaataatgatattgagcttatttttttgttactttaaaatccggaatgagaacctttgaggatgagaggttaagatgtaaaagggtaaaggtgaggagatcggttcccccgttgggaggtttatttctttattttttatttcaaattcagcacttttacttagtgcagcgtgggaatttatttgggtgatttttgcatccagttaacctaatcaggacatcaaagtaacttccaaaactattggaatttggggaattcatatccaccataaggaatgaatattccttatgaatacaacacagtgattttatataatgaaatgttatattctgtttttacttctgtcttctctgtcttttttttttttttttttaagtctattaatttagagtaatctctcttcctcagcagtgggtaggtgtttttattttattatttttttgttccatccttggaggtgtttgttttttttctcaagagatattcagatgagattttaaaaatccttatttgttctattttgcatcttcttcctgctgggggattttgcttgaaatacgttcaaaaggcacagatgatcttgggagtatttgaaaaataaatttaaaatggcagtagagatcagttgctttgttttttctcctcggttttgtttcattgtggtgttccttctggaaagggtgagggtcaaggcctgtgtttatgagctgtttttcttattccaccaggttctcctgcgctgcccaacagcatggtgtattttggaagctctcaggatgaggaggaagtcgaggaggaagatgatgagacagaagacgtcaaaacagccaccaacaatgcttcatcttcatgccagtcgacccccaggaaaggaaaaacccacaaacatgttcacaacgggcatggtaggtccaccgttgaacttggataagaaaaaatctaaagctttgggtgagagctggaagagagcctctgctgagaagagatgagatgaaggcaaagctcgttctgggtacttctccagggccagacacttcatgggcaaagggattattagtgtagcttagtgtagtccagggtgttctaggtgagtgcagatactctgatgatgtggagatgatggtaaattctataagagctgtagataaacaggcatcagaacaggaaaagaccagatctacatggggatggtcaagaagatttggtgaaacaacatctgtgcccccctttaattactaatgtgattttagcaggtggatatggtataggaagaaaattatcattcctcctatggaattgcacatacattctgaagtggactgattttccccttgcgtgtatagtgtggaggaggaggataaaaggcaggaacaatagcttgagtatcacagcaaagaaactcatcttatgtggataagttggctatagaaagtgcctagtggtcttttctctctgtctctctgtctctctgtctctgtctctctgtctctgtctctctctctgtctctctctctctctctcctgtctctctctctctctctctctcctccccttctccccctctccccctctccccctttccccctctccccctctccgcttctccgcttttcctttctttcctttctttcttttgtgacggagtctcgctctgtcgcccaggctggagtgcagtggcgcgatctcggctcactgccagctctacctcccgggttcacgccattatcctgcctcatcctcctgagtagctgggactacaggcccccacgtattacagacatgagccaccacgcccagccgcctagtggtttttcaatagagaagtgacttaaatggagttgtgccctgaaaacatgaagccggcatcgatgatgaggacttcttaaagggaaataacttgaaggggaaatgcacagcgaggttgtaattgtaggcaattccctgaccgaaggttgtccagtagacattggaagatgtagaataggtataaaaaggagtgatttcagaggcagcacagaggtagtcctgaaccaattggaattgcactgagtgggggaatgagagtaagaaaagaggaaagaggctgggcgaggtggctcacacctgtaatcccaggactttgggaggctgaggtgggcagatcacgaggtcaagagatcaagaccatcctggccaacatggtgaaaccccgtctctactaaaaatacataaattagccgggcatggtggtgtgctgctgtagtcccagctactcgagaggctgaggcaggagaatggcgtgaacccgggaggcggaggttgcagtgagcagagatcgtgccactgcactccagcttgggcgacagagcgagactctgtctcaaaaaaaaaaaaaaaagtaggaaagaaagaggagggaagcaaagagaatgggagtcaggagatatggctgttttctgttgtcctcctatcagctactccactagacatactttacttaggacccactgagaccctgtaagataaagaagccttgtctacaaatggcggaaaatcagtgctgtctgtaagtgattgaggcaaaggagagctgctcatttttctccttggtgcctatgcactgagctaccatttgcctttctggattcaccgggaaatagaggctcaggacaagcatagcttagacatgattgaaatctctgtctagctttcattgttgttgggcatttctgctctgtccacttaataattgttcatctggcttgcctcttgcttttgattgtgtttaggtgacacatctgcatagtagagggtgcaatctctttttagggacttgtggtttaattggggagatggggtaaatacaaaatgtaactacattttaacctttcgggaaaaggttgttacctgcagctgtggtcatcggcatctgggtggttggaagagagctgcatatgtgaattggaatgcaggtattagtgtacggatgtaatttctaaggaggaagaacatcgcaaacagagcgatgcggaataatgcctgtttttgggactgttgcctgttgttccaccagtgtggaggtctactgtttggtgacctggaaagacctgggcacgagaaagaattctaataacagaataggaacctgttgatgattttagatgtgggagtaagaggaaatgcgtcaagttctgaacgattcctttggtagcagactagtctgaaataaaggaaaaaattattgtattcagagagttccatccaggcaacagctgatgtgaacctgaacttgagaagctacagtggcatagcttttcccaggggcctgcagaggcgggggtgacggtaattgaataggaattaggaatgggttgatttgtggaaaggtaataactttataatcttttgagtttgtgttgatggtgagagacaaccgaattattgagaatacaccaggaatttatcattttggagctgctgcttgaagcctcctgaataagtaaagtttttgaaatataatatggatagaaaggaaacctctggagaactttttcttgtgaaggaatttaattttctaggtttctttttggtttaatagagattgaagagtgaagaaatatgaacaaaacatggaattaccctcatctgttgtcttctgcatggctgtatgatagaaatctgtttcatcagtgtagtatcggattgggtccttttcataagttgtttttcacccttttatgctgattgggcaggtgaatttatctgacgtcttgatcagttgagttaatcccatgtatactagtgcagttgtactggggttgctaactcctttgttttccagagtgtttgagcttgatttagagacattggattcacatgctgatttttctcatggattcagtttttaatgttaagaatcatcatctgcatggatcttaggtatgtgcaggggcagtgactatctggcagcatgttacatggagcatatgaaagaaggggatggaatgagggtgaagggataggctgagctctcacctaaaggagggcataatgattctacattgaccactgtcattgccactaggagtcaaggaaagtgtaactatctatagatacatatctctgtgcatttacacagatgaacttctgagtttcaaaaatcttaggagattctactttttcattttttattgtttaaaatttaaaattttatttaaaaatttttttaattttaaaattaaaaatttaatgcctgttaattcagatatttccaggaacagtgttgggatttttttgtcccctcatgaattttgatgtctctcggtgaggggctggtaggatagtgtgaatcctggctccaggctgggaagactaggtggaatgagtggtcttgggtaagcaccgacacacccacctcctactgctgtttctgagttgtgcccttgccctccttgctgtccctcttccgccctgtctcttctgtcatcctttcttttacaatagagtcacagcatcagatagaggagctgcaggaagcatacccaaaccagctgagcttagtaaggggactaacttcactgaaatgtacaaacctttctgtgcttccttttctgagacttgtagataaccaaactgaaaggcccttctcacatccctgagcagctggcttataattttaattagattgatgtcatctgtgattaggcctgcccccaacctccaagtgtctaccattttgattatgtcgtatttgaattgtgaatgggttttctttgatttcaacccagcagagtcccagaactaccatcttgggagaagccatggggctgtgcagtctgtttgcctgcacctgaacttcaggggaagtttggtggggggattgttgcaggcccaagagacctgtatttagatctgtccagactgcagtccttcttgctgtcccattctgttgtccagagtcaccagccatttccctgttctgtctgtgttaggcctgcccgttcctgagcaggcactcacttcctgggcatgtccctctgcaatttaattcattgctcttcagcagcgtcatagggaagtttgaatcttatttagtctgaggttttctttctattgctatgcctgggcattttttagatcttaacctggtcagaaaaattccatttcctgtgcaagtcaaagagacaagcacgaaaccaactccactagaatttttcctacagaatttgtgagtttttagcaaatgtgaatacccgtaagtgttaggaaagatttcatatttacatgttcccgaaattgctgtatttgtggaggatttggagagagctcaaactcattttattgtgataagtgctgaaacataatcatagaatctttgccatgttaacagtggtgaatgatattaaccatttatggagttaccttttctctcctaaatcaaataagattaacttctgtataaatgagaaaaatgtaagcccctgtgctgacgtaagcgctctgaaagatagcacagatgaacacggcaataggatctacccacaaggagctaatgggagatgatgtctcctggcacatctgtcagaaacgtcagaagacattcaggtctttacgtgtgtttctcctgatgaaacaggtttcagtgtctcattcatctttgtcattccctgtcacttggtgatgctacctgggtgacttgtctcccttgtcttctgatgtgcgtgccccccccccccccccgctttgtgtcctgccacccacctcacacccatataccaaggtccttaagaggggggtggtgtgatcgttggggctccattaagacattttgtagtttttgtgtatatttatgggttttatgtatttgttgtccctttgtaggcatccgagtaccaagtcttttgtgaagtcatatgaaaagaaaaaatccccacaagccactacctgggatataggtctctgcagagtccttcctgctgttgccacatggcttgaatggccttggaagccaaagagtaacaatccacaggatgtcagtgcttccttatgacgccagtggagggaatggaataaagccagcttagtaatatacaggccacttggaatgctcctccgatttcaaatgacccgggggaacatggtggtttcgtgaaaccaaagtcagctttgaagaaagctaatgtcagcctcaggttcaggcagtactgtagaagaacactgagctctcagtagctggctagctgtgctgccttccccagtctatttcacatccgcttttatatcaaggcagatgacaaggaaacaaactgacgtcagtttattaaaggaaacacttgtgatattgggagtaatccctcaggcaagaggtgctaattgaacctaagagtatttctgaagttactattttcaacagtagagaaggaaattattgatcatctcatccaaaattgataaaaacctaagtgtagcagtctttcaaaattaaatattctcagctgtggaatattctcatgcccaacattgctacttcctcaaccatttctagatgattaaaattacactgtaatgccatgttgctcaatatgcatatttgttgtcatttttgtctgttcatttcttaggaatgtctttgccaccatcgaacagtcatcaggaacttagttgcatgccttttttttttttttagctactcgttagcttgtgtgttcttgggcaaggtatttacttagcttctctgattcttaatttctacttctgtgaaatcagcatgatagagtagattagcattaatttgtccagtcattgattcatttatatcccagcataaggaaacaatgaggctgtatcatgggtagcagtagagccattcagatctctaatggtggatgccagccattgttatatgttcaaggaaaatgacatttccaagatcactattcagctgggtgaaggttcccaactaaaattttgtccctgtaatccattcttctttccctgagataatagtgacttgtccagattaaaacatttatatcccaccgtgtcttcaaccccatttacattgctatctatactttgttttcttcattcttttataacccttaggaaaactggtgtactgttgcatcctccaagcaaaggctgagttgctgaaagtcagtaataatcccggttgacaccagtcgtttacacaagaatcctccaagtggtcagactgctgggatcacctagagctttgttttcatgtgtaataaatacagatcaaatgttggcaacagttcccatggcagctaaaagttctttcctgcaaaatttcactgaggtccatttctctgtaagtttagagcggaattcctagaaatttcttataatgggatttcattatgagtatccatcagtcatcaaagggagtatttatttaaatgtgacataatataaaatgaaacagatcttcctatagagggttccttgcaataaaaaggcaatcaggcaccagtgccttgcaaatctaatgaagcttggagctctgcaggtgcaggtgctgtcagaaaagaggttagcaattttctgaacctgaagaaggcctcttctgaactgcagacagaggaaagagtcctggagagcaccacatctcaggccacatcaggtgctgtggaactgccagggaggcccaggtccttgcttcgccgtgcaactagcattttctcttgcataatcgcctaccacctgttcttcaacataaacccactagccccacattgtgccatgagacaaggcacctgagccaggccgtgctgcacctgcgacctcaggaagctgtgatgctctgcccttacccctgttccctgattttggagtgccttggtgaatagaagcaaaacacgagctgtgcttttagatgaaaataagttctatggctgcatggaaagaacggtttggatatagttagttaagaaggtgagagctcagtcttccctcctcacacctcagttttactccctcattttttgaaaacattcaaatgtagaggcagatgatcttcgtgtccttttggtttctgacttgggtgaagaaggcacaggtcttaaaataggttttcttgcagggagaacctgggtgagggcatcacgattgtgtattcaagcaactgctcagaattgttaatctttcacaagcgaaaggggagagcaagctggttgttttgtgacttttccattacagggtatttctcttatcagatttgtgcttttccctattttgtatgctcgagctgttgaggcgtgtcaggaaatctagcaacatctgtatcctccccagagggatcacccctgctgaaatgtggggagataaacacacagaaaacaaaagtatggaaaactgatgctttaccactggggtgggtttggccaatattttaattaggccacatttcaaggagaacagctttatttcagcagctagctgaagaacctagaacccagactgccaggggtgtcctgtttcatcttgtttctccacaaaagagcagagtggctctggtcatggagccgggacctctggcctcatggcagaggtggcagtagaggacacacacgccatccacagtgtcctgccatcagcttccacatgggcctgagactgtacccttcttcctccgagcaggagtcctgatgccagtagtttcctgcaagagcctgctgtccccaggcagatgttttgttttgcaaacattacacaggactctaatgtgctcatttgtaatccactgaacatcctaatggaaatggatttattaaaatatataatctgaaatgatttggacagcatcacatgagcttttaaccttgggttagcactcaagggttacaataacaatgcttccagcaacttctatttcaatagcacatcagagtttccaaaatactcttccatatacagaatctcaaatgattctaaaaatggagcccttaggtaatgactatttggaaaccaaataacacaatcaaaacactgcttcatgggtatttatattacaagttgatatttgagatgcctagatttttcttaagctctcataattggttattttttccagggggtaagtgaggtagactagaggaattaataaatgcctttggaatgagtttaccttggctttttgagtgctttgaggaggagaccttggtgaaggcttgttgctaggtcagctgcatgtgtatcttttaaatgctttttataacttaaaaacggaaggaagaagagtggctgttgtttcttttgtgcatatcgttttctgaagagggatatttctcagaagactttttaaacagcatgtcattggactcccagctggaatgacttaattgcttttagattcataccgggggcatgttgtgtaagggccaaaaagcaatcatttggacgagtttatcacatttctgctctgtggttgcctttgaggggcattgagccctctctttgtctgggcggtggggtgttggggtgtcggtcatgcatcagggtcaggagcttgccatagccctgctatgttcagtggggacagacactctgtaacagacaaatgccgcctccccgcccccgagagaacatgtgatattctctttacctctttttaacctctggtagctccatttttcctgttgagacaagtgactattccaaaaagttggaatatgggatgggagtgttggtttttttttttttttttaagagctgtaatacatgtagagagaccagttatacaatgtatgtttctaaccaccccctttacgcatttggggcggtgttccttagaggccgttgggtaggatggttcagagcatcatgattacagcactgacacacttatggctgcaaccttaggatttttctgttttagttttcttatctctgaagaagagatcataggttttggcaataactaaatgaattgatacatgttacaacagttaatgttagaaactgctgtgttgcatattatcattaacataatgtgattgaaaagatctggtgcctggaacaaccttataattgctaggaaaactcaagaaagtttatgtatctcaaatgcctggggcacgatgaggactgtcaaagagtcagccattacccttgagtgttgtgacatcatcagcctcgccagaactatgttgtgggctgtttcagtgtggtagaaggtcttggtaattcctgtgtcaggattatcatcctttccctgtttcttcttgctttgctaaagtatttatttgttccactggcctcatagggccttagtgggggatataggtacacacttcgggatagttggcccatgccccatgagtttggtgttgttaccttcgtaactctttctgtgacaggcagctagaagatggtgtatctggtggtggaagagaagctcctggctctgatccctctttttagcctggtgtcagggctaaaaagattatttagcctctttaagctttagttttcctcctttgtaaaattatattactaatacctgactcgcaatgctgcttggggttgtgggggaggatatgtgagggtggggtcactactctcaggtatggatgcagaacccacagatagagagggccgactgtatttagttttttcgtgctaatgtttttactttgaaaatgaccaagttgcctataacttgtatagtcaattgtgtcaatgggatgcgttctggtctaactcgcatgtgcatatttaagggtgtttctctctcggtgtgtagtaaacagtttacaaattccttactcaaatccaaaggtgagccagaattcttatcactgacttcagatgtggttggcctgttttaaatcattatttttggaatttaggttttttgttttgttttgagatggagtctcactcttgtcacctaggctggagtgcaatggcgcgatctcggctcactgcagtctccacctcccgggttcaagcgattctcctgcctcagcctcctgagtagctgggattacaggtgcccgccaccatgcccggctaatttttctacttttagtagagatggggtttttactgtgttggccaggatgctctcccgagctcaggtgatccgcctgcctcggcttcccaaagtgttgagattacaggtgtgagccaccgtgcccggccggatttagggttttatgaaacccaaaaccgcagaaacattttattcgtgtgttctttacgagttaacgccatccttttctgagtgtaacctgcagttctgtgctcttgccttgattcttgccagtgataaagcacgagagccttgcagaccaactgcctgttgccccataaggccatttgtccagctgttcctcccttaccattaacgcaaacattttagagtgactgatgcccacacaggccgcggggctagtaatcatcaggtctgccatcctttcctcagcacttttgggggccaagagggccaagaagccatttttcaatgacaaaaaccattcatcctgatttatggtctttctgttgtcctgacctttatattctcataaaagtcttttaattttagtgtcgtatgttagcaggaatatatgtaagaaatttgtgtaaagggcagatatatccaagtctgttattttatcattgcacataatgcattcacacttggagatcatgatgagagtggcaaccaagtggtaattggtgggaaaaatattacagaatttaagttcttctatagaaaaggaagaagatgtgattggcttcaaacattctatttccagatatctgttataattgtgatcaaagtgaaagagatttcattgtgtgaaagttccagaagcgttttacaaagcctgtaaaccagtagaatttgcttatgatactggagtttcggagtacagaggcagcatcccaggttgacgtttgttccctgtgcgagtgagctgctggctggatgcaaggtgataatgggggttttgctcacctaagctgtgttcttgcagctttccctagttttacacgtggatggtggagctgttttggcccagggcaaaccgggttacagcactcacacatgctacattaaaatccatttgaactgttggcacaggttggcagacattccattgttttcagacaatagtgactcaaagttgaactggctccagggagcaagtgtggcttttgtacagtaacagggatttaatgccagccaattgacggagtctgtgtcttgcccaaggaagggatgccttgtaatgacatgaagcgtacatttaaatatctggcttgagatcagaaacttgcggtggatctcttttcccttgcttaacacatttcttctttatttacagtgattcttttttttgcccctttcgtttgttttggggtgtggacaggaagaaggtattttaatttgggggttagttcggtcccatcttcagggtcttcttttcctttgttgccttgctagcagatgtttcggctgactttctgtaatggtccttgtctggatttttctctttcaaggaggttaggccttctgaactgtattatttcaggtcatacactgcataattccaggatatcttataacttttgctggatgccaagtaaggactcctgtttcatacacatctaataatctaataatacacatcaggattccgtcttgtgtttggatgaggtgcctttattagcatgggtaattggcaagataggggcgtctggttctgggaggcgcttggagacaggtaaaagtagaaggccagctttgtcagctttctctaaaaattatatttttcacatgtggatctttgccattgcagcaagagctttcgaaaagatcattcttcttatatttgcgtaactcctttctctgaagaacgcaaagcacttatatactttattcaaaatacttcagcaagtcctggagggcggataagaggaagcagccagctggtctgtagttcagggaattgaggcccaaacggggttggtgagcagaactagacatcaaaatcaagagtctgtgcatggagtgagggtattaaaaaccttgagatcagtttttcatagggctgccttccttgagggtctcttccaggaaacttgtgtcagcatctaaatatgcgaacaaagcttttggggaacattgtttaggacaagctccctggaggtatagttgtgaattcccctaggaaagtgtatctctctgcctttcaaattgttacaggattgctattaaatatgtttctaaagtaacttcttttgcccatatctttttcatccctcattgggagcaaatcttaccttctcagggatgaggtgaccctaaatcaaaataacagcctttggatttaaagattttgcctgccgtggtgtgaaaacacttttctataggccgtttaactttcagagtatgtgtatacaaatcaatatatttgtctctgttcgttaatgtaaagctatttgtatctgagtacaatacaatttcctaatatggttcacagtgatgaatgctttttttctctccttaaagaaactagtccaattatttcttttaattggggacagtgtgtggaggacttctatacattgaactttctgtctttctctctcttatgttcacagggtttaatctttccctgtgagagtgaatattttttttcctttcctcttctctccctttctcaaatcttacaaattaagacaaaagataattacttggaggagtaaaactggcaggttcccacgacacttaaaattaatgagctgttgagtacaaaatataccttgtctttggctctgtcggtgttgcccagtcctccccctgccccctttacttcccgtttaacacatgatttgactttctggctatgtttgccatttgggtatatcgctgctctaaaacagcatgatggttacaaaaagtgggtttggttggaaaccttctctttgtttgcaaatgaaagttaatttgattcagtttttaatttccgtatgtttgaaaactcttccatttccagatatctcatcaaaatattctttagtagagtaccttgctgaagtcttcagggcagccagtttatggttcactatgttaatttcacctgcctccctctcgtctccgtttcccctttcctataatcctggtactcaccgctttgctgtccatagtattttcctgagcagtaggttttgtgacctcaaaatacaatcaaagagttgtgcatctggtttcaggtacggatactgcaatgaaggatctgtttttttcagataagaaagatactgctgactaaccacagtcacactcttcaagtgtctgtgaaagtcccagcttagcaactggccttgccctgccaagtgatttatcaccgaacaggtgactcctgtcagtttttatgcgacacatcaagcttcttgaaatcatcatgtaaggagtaatggaacagatgatctggccccagggtttcaggcattttgaattccagacccctttctacttttagaagttattgagggaccccaaaaggcttttattaatgtggattatatttattaatatcagctttaattctcatatctaccatattagaattaaaagttaagacactttaagatatttattcatttaaaaaatgacacaaaccagttacgtgttaaacacatatagcattttttaatgaaaaataatcatagtccaaaaccaaaaacttattaagagttacattatttgacctttttgttaatcccgttaatgtcttactaagtaggatacagccatattatgattgcttctgtattcatctcttgagtgttgcagtacatagtttggttgatgtatatgaagaaaatcagctttggataaatatgtatgtacatgggaaacggtctttgtagatgatttcagtacttgataggatagtaggctctactggtagtttcctacaggtcagttgctctgggaacctgtacctgtatcagtgaacttttcatactgttacattaatatccattggtttgtctttttctttgaatggacctttaacccatgcactgttttgtagcatcctatgttgttcatttgaaaataatggttcagtgagttcttgttagcacctttggtaatgaacaagggtacatcatcaaagaatttctgtcgaactcatgatggcagatactggttttctgaaattctaatttttgcctgaaagcatgaattctgtcattggcagcaacgactattagttactttccttgaatagacaggcttgctttgttcatttttgaaaaaaatcgagtaactaagtaaaaactacaaataactaagtccgaagaactatagtgtgttggtccttcttgaaataaaaacaacatcctatgaaaaaggggctagcccaaaacttgcacaatcacacaagtgcttttccctagagatgatcattgtatttctgtatatagcagaagtgctttatgtgtaatagcatcttgtcacacaaagtatgtgtgctcaggggccatgattcagtcatactcactgtttgtatgactttatcaaggtcattcttaagtgaaactggctgtttttttttttttaactgctactaatccatggtagggatgaaatgcatattagactagtgtatagtagtttggtgccattgcctttgtttatgctaaagtacccgtgatttcacccatattttaaaaatatattttgttgagataaaattcacacattatagaatatacccattaaatgtactgtagcatgtatcaatacttgatttcctttttatggctaatacttcattgtatggatataccactttatctaaataaatatcagttggatcttcggtgatttcccccaatttttaacgattagtaataattctgctgtgaatatttgtgtgcaagtttttatgtggacatattttttatttcccttgtgtacattcctggaaatggaattggtgggtcatatgggaactcctacgtttctccttttgaggagctatctgaaaaggagaaaccattttgcatttccgccagtagtgtgtgagggttacagtttctccacatccttgcaatcagtcatcattatccatctttatgatatgactttacatcctagtcgatgtaaagtggtgtatctcattatggttttgatttgcatttcccttatagttaacctaccatttttcgtgccatcagtgcagatgtctatccattgtaaaggcaaataatgtctttgtattattatgaaatagtttcgaccctagcacatctcctgcaagggtttctaggtccttgaagggtctgtaaatctcctttgagatccactgatctgaccatacgtcgctagtggaaaattgggatgtgttttcagtgttgtgtatttctttttgctcaggcaggtgattagctactcctctttttcccatgaaagtgatactggcaagtgttaggaggcacctggctctgctggactttgtccacagactctcagtcatggtctggcatgagtaggagacgtaacaggcatggtcagtgtggacaaattaatgacccagaggagtaggaggttgtattgggtcttgctgagaccagtgtttgtctgcattgaagcccttctttatactctgtctgcagggagggatatgaggcaaaaagagatttgcccacaatctgattgtacagtaacctgagatggcccttttaaacatgcagtgatagtgtctcccaaatactgtgtacctactgaaccccagacattgtggtagatgttctacctaccggaacatctgctattccccagtctatagatgggaaaactgatgattaaataacttgcccagctgcaaacaacagagctgggaatgagctgcagataatgttttgaagggcgggaaacccatatagtaatattttgttaagtgaataaagagaagtaattatagaactggtgcttctttgtagcaggcctcaccatgagacatgtcttaatggcaggaaaaagcacagagaagtttggaggagtattggagattaaaaaaaaagcaactacttcctatgttttaataagctgtgttcactgctttagaaaattggtgaacagtcaagaattgcctagattcatgttcccttggcttgatttttaatcacattgaagtatgacttcttacggatgttgcttttaatttgtcttgaaagctagcacagatactgccagcttgggcatgattgatggtttctgacaatgggtagttacttagaataaatgccagccatttgaaactctccattttctgtgttaactgagagtatccagtagaatcttgtgcaacgtcggattgtatcccatattttgacgtggcctggtctttccttcagtattttaaaatctattaatcactggtgttggaaggaactttgagataaaggctcacaaccgataatccagatggggataatggagatctccatcttataccatgacaattggactaaagaattaaatccaagcagtttaattagaaaacaattagaaggaaacttagaagattattttaccgtttgaaagcatgggtggtggaatggagaaatgttgatgaaagggtgcatgcaaagttggtttgaagggagagagaaaatctggagatctactggacagccttgtgactagtcactaataatgtagtgtatactcaagttgcttatcttacatattcttagcacaaaagtatataaggggattgggtgtggtaattagcttgattaatcactttatacatgtattaaaacatgtcatactgtaaacgtaccattttaattgttatactttcataaaactgggagaagatatacggaagggtacgttaagcacgaaagcaagaaacaaagaaatttgttagcagatttggcaccacagcaaatgaaaaagtaaacggcaaaagaggacagtatttgcaatttataagacattaatataatttaaaggactcttaaaattccatgtgagattgaatgttggggaaaagggagttttcagaaaggacagacaggtaagatgtttagaggaggaaagatttgatttccccttctgcaagccaataggaagagatttacaactcaaaggaggaataattttcactttcatctgctgctgtgggggtgagggaattctacctgaagttctgccagtcctggttggggtggggatggcctggagctgctcaagtgccagatgcatgagtggacacagtaaccttttgaaaactccctctggcaggatgatggctaaaagatcactatagcttccccttgctgatctgcctaaaggcaacccaggaacagggtgtgcttcctccttccctgaagaaacaggccctgtttggactgtttgtggggagacaaggcctgtgggttccagagaaatggatgtgaaagtctcgtttattccatggggagggactgtaaagcagaaggataaacccataacgttggtgtttctggttttctgtagaaaccccaagcatccctgttctcttttgaagtctctgcctcatgggtaggaagcaccatgctcactggaaattctcacttgtagccacctggggtttggggtggatggggtgggcttgggaggcaggctgacttcatgtgccagggataggtggcatggcctgtgccaggcacgtaccccctccatctgtaagtgtcctgtccagtagggttgttctgaggattcagaggctcaatgtacttcaggactttagcatagttcccctggcttataggaagcacttaagaaatactagctattagctattgctgtttttgaatttaggaacagaaaatgggtctggctcaaagttccatcatccctttcttcatctctgttgtcactgataggtcagataaagcagctgcgccccgaactcatgcatgtcagtagctctctggcctcaaaatgcatctcttttaaatctgagaatagacttttttttttttttttttgagacagagtctcgctctgacatttgatggttgattctttctgacttcagggagtagaggtgtattagtccattctcacactgctataaagatactacctgagactgggtaatttataaagaaaagaggttaagtggactcacaggtccgcatggctggggaggcctcaggaaacttacaatcattgtggaagtcgaaggggaagcaaagcacttcttatatggcagcaggaaaggtagagcgtgaggtgggaaacacttttaaaccatcagatctcatgagaacgcacttgttatcacgagaacagcataggggaaactgcctccatgatccagtcacctcccaccagttccctcgctaacacatggggattacagttggacatgagatttgggtggggacacagagccaaaccatatcagtagtttgcgtggtagtggtcaaggtagtgatttcattcttgttttctccttcctttctagttttcaatggttccagcaggtcaacacgggagaaggaacctgttcaaaaacacaaaagcaaagaggccactcccgcaaaggagaagcacagcgatcaccgggctgacagccgccgggagcaggcttcagctaaccaccccgcagcggccccctccacgggttcctcggccaaggggcttgctgccacccatcaccacccccctctgcatcggtcggctcaggacttacggaaacaggtaaagtcgagcaggggtgcctacatgtgtgccagaccccagtttcccacttcacttcaccaagctaaaaattcatcttcagagggctcaagaagcaggaggtgatgcccagaagcaagacagggacagacagagcgcacctttgcatgagctgcaggcgcctgcaccttttgtcctgcgaagatccatcagttggatttgcattcatccctgggtgccactgcattcaccaagaaagtgaactcacttttttacttaagccttctcccacccacccaccctgggctccagatgagcggtagagtggcagggaacatgtttttctcagggtaggttttgaaacacacctgcaaatgggatagttctgttaatggatgatcctggtctacttttctgttctttttgatgtgacaagttaacatttcaccacctggcctttgaagcagaatatgtgcatgctgtgtgcactgccgagcagtctgtggaactgggtgtggctgggtggcacctcttccactgaaggcatttgagtcccaggctgtagcatccacagagtgtaggtggctgccaccctgaccacctcctgcccctgcctgtcctgcgctgtccccccacccgctatcccccaacagggccacagataatgccggttctggtgaggcagttttgaagaatccctcagggcttggccattattgctgtccagatgttcccattcctggacattgatttctcacaaccctagggatgagtagtggggataagggcaggttcctgcaggcacacagctgagggcttgtccccggacaggtggcatttcactgatgcctcgtgctcctgttcccccctccattttaacatccgctaagtcatgggatcattgatgagctttcctcacagagttaaaaatagagggttaaaatcttccctagaagagactggaggctatgatccttaaaggtagcttcagaggaagttgtagaggggacggaagagatttcctggctggcagtgttgcagagtgacttacatggttattgtggtgtgaaaatactcgatttcgtcttgcggtagaggtggcctttctcattcttggtgacgttgtggatatttctctctgaacgtgaacatgtgactatagtcacacataggcagacaggtatgtatgcatgcacatgtgaacctttacctagcaaatagtatgcagttgggggggtgggcatggcaagaatcaccacatttacatttccacagtccacacacacctagcacatattaaacactggccactgttggccaaaacagacctcagttttcccagagacaacagccacggtgtggaattgggccacaccatgtgctcacctggcgtctcttaaccattgggccccggattgtcagcactggaggcacaaagcccagggaggcaccgagctttggtcctgggtctgtgattcttcactcccccgctgttcccaatgctgttggtctgatggagaattgtacagaactctccaatgtgtaaggtttttgctcatgaaagagaacagaattagaagcaacccagggagaaagacagaaagacagtgattacaccatgtgactgcatcctgtctcctttcccagaatcctagagtagggttaagttgtttttgtttatcttctattcatcccactatgcttttttgagtttttttagtttacttgtggtaaaattctcatgggccacatcagaactggaggccatatccaggtgagcttccagatcttgcctttctgccctgagaacccatccttgggatggcgaggcaggaatgaagggtggcagaggacctgagtcatgtacatgtgactgttcatgttctcatgcacggacagacacgggtgcgcacatcctcttgcacggtcacgaatagggatgcgtgggatacgcctgtcatctcagctggtcagagctcactctcagcacttggccttcattcagttcaaggttttcatttgtaaggggatgagaggaattagtacagttggacagaggaaagagctgaggaggaacagaaagtactgccttagcctgggatggccctgcctgcccccatgctccatggcgtgttcgtgtgacctgttccctgtgcaggatcttaggtgcaggaaagaggtcctggggtgcccctcacacagcaggcctctgtcctctgagttagtgcaggagtttcagctgcttccggggctcagggtagagtccttgcagggagcgccatgtgctcatgcagggcatcctgcaggtgttgacggggatcctctcctgtcaccctttccccactttctccctcttccctctcctcctccttccctgttccagtctaaccagcccagatgggttgacccatggctccagattctaatttggctctgactctgaccttcaatgagacttgagatgtgatatttaaccttcctgggccctattattcctttggagccagtctggccaactccttataccagggacattgtgagaaataaaaggaaaattttcaaaccctcagatcctattagttaagtactctgaaaataaggtcagtaaaagcaaattgtagattcccttgtgactgcttgatacaagtgattagactgtgacctttcatcttttcaactgcatgaaagatatgggcccagaggatactctgatctttcatttcaaatatgatatgtggatttttttttgttattgttcagcttaaaagcataaatgtgactgtattgaaatgtggagggatgtaatttttagggggtgctgccgagaagtgcctttgctctgcttgctataatgaactgtgtgggtgcatgcacctgtcttccaagtctaaaaccacttcccctcgtgcgaactgggcaatgccatttgatagtgtgtgcgatttatggagtccctagaacccgagagttagaacacaccagtgcgtacttcacctaagcctttttcttggtgagagggctctggccccggccgtttactctcgattataccaaatgagctgtctttgtcatggaatgcacatgcctgtataacattgcattgtcatggggctgggagtgcccctgggtaataatttggttgtatggtaagggtctcaccaaggagcaaatggtgtttttctgttgctttcctgcagtagtacttctgcttacatgcagtgacagaaagtaacaagtttaggatagtccaacagacgagctttatttctagcaagggttttgaagtattagttttccaagagagtcatgagcaggttttgtacttgtgtagaaatttgtgtggtttgtaagccaggatattgaaccagatgtggccacatgtgattctcatttcttacgctgaggctgagtgtgagaagaaaatgatcaactggctaatcccactggttttgcaggaccttccattgagctataggctactgtcactgaagaggttttcatatgaaaatgtacaagccttgcagaaaaatcctgccctagtaagattcagagagggccaaggaattgagaatattcttttaaagttctggaaaatacggctattgagaaggaaacatagaaaatcatattagtttttaaaaaagttaaaggttttcttctcatgacattattttgtcatttgaattgcacttgctggtggtggggtatttgtgactcagttacattgccttcagtgggaggagaggttataggtacatctagattgcccagtggaacccaggcatctcttttagagcacatttgccttggccttggccttggctaggaggctcctgcccatctgctgctgcggtcagtgtttgagcaggctgctcctccccttccataactcactgtctgtccagtgcatttcgcttctgtttaggctctttgtttttgattcaagttttaaagtgcaaatggactacccccagccaccaactgtttctctctctgggcctctggttctgttttgaaaggctggcagaggcctcggctcaacggctccctctcgtggagaagaagaacttgccagtgaatctgaggttgaactgaggacagcgtcataatcttgaacgactaaaacatttttgcttagttaaccaaaaacatcagagtcatttctcatcttctgctctgccttggaagtgcatgtttctccttttcatctgtcatcatactgagttgatttaaatattgtgtgtgtcggtggtggggtggagaaaaacccataaggatggaggggagagattttatattcttaaagcaagcacacagagtgtggattgggtacagtttttaagatggaatttctgttattaagaacaaagtcaggtaggaacgtttgatgtcctggactttcatatctctcaccttatatcccttctgcaagaagaatgaggtattgttgccagtactcatctggccgaacgtaacttgaaaatgctctcaaccttgcctgttaaattgaaaccattctcttatgactaggagggattgctttaatatctcatggccgtgtgcctgggatcacctgagatacaggtgacggatggctgtgggccaaggagcacacgctgcagacacctcactttctgcagagctgggttgggggctgggggcaatgggctgagaagccagaaatccacaacagagctgagagaaggagtaacttcaagcacttatgtataaagctgctcagctgaaatgtattgtcattcaatggagggtcctgctgtagcccacgtcggcgctaattcttcagtgagttcagatgacttcctgtgtgtgctcttctgtggaatccctcaggacgtgcagcggtggccttccttgtagtgcactggctgcataactggggctgtgtggttttaattgatacagaggtgggttgagggagaccttcggtagcaaggtaagacaatgccttcctccattcttctgtttccttttgtactgattaagtgttggctccttatagacaagtccaggccaggaaaaggggtgtccttttgttagattggtgggtcccaggtttccccacaatggtggtgctggctgggttgttggttctgttttatttctcccttttaggacacatggagcagcttaaggggcttcctatgttagcttttcagctcccctgtggcctctcgtggtgggcatagaacacggaccctctgggtttcgaggaggaagatggccagtgacacttgcctttttcagtcttcgtaattgattgaacttcgctggtctgtgttgtgggtgagatccatctagtctttgagcttgttatatgggcatgcgtgtgtgatatctgggtggatactgttgaagataactcctataataagaaggaaaatattgcaactcatttctctcataaagcaagttatttgaatgtataccttgccagtaattcagtatttaggttttcagaaagatgtaaacaaggtgttccttttgccattgaagatagtgatatatagaattcagctgtgttgaaaatttacttccctgtagcattgctagccatgaactcaggtgcccccgagaagccagaatggatggaaccaaaggccttacactcttatttgagatagaatatgagagacatagcactctggtatttggacagcggtgttagggaagggtagggtccacggatttgtgggaacactgagacatctgaggcttttaaacactgattccctttcttgatcctcaccaattagcacagaatctagagggaagggatttacattattttgaagctcccctaagggttttaggggtgccaggtttggaaaacactgaactaaacctcagcaagtagtggtggctgatgcctgaacctcacaggagttgggttatgtccggcaccatctggagtttgccattttgattagcgatatacgaagccgcactgtgtccgtctccttaaggagactcttgtgctgggagtagggctgaaacagattgcacccctacaggttaaaaggagattgagccaactgtagaggtgttgtcttttgctgtctgaacctgagatagagcccttccccaaggtcctggattccctgaggcccattcccccacccccacccagccccaccagcctttgttgctggaaataaagatcagccccagctggagtttactgtttgcttttgtttttctaaatgttttgtcttgttttggttttagtggaagcatttgaaagaacaattaaaactaagagatttgcattcctcactatacctcctcttgcagattaacagtacttaccacggaatatttctgtttgtccttacccctggttttataaatctgttttaaatttatcattgccaggtgctttttttcctctccaaaagggtttcgcattatttattccagaccgtctgtcagtcccactttttttatgggtgactcatggtttaagagccagagtgtgattcctgggtcttcgcttctgcctcttcatggggcctgaggtctggctctaggaatgaggcctccatgggcctggctcctaagagatgatgtcctaccaagaatttgtggctttgattggactgcacttaattggtggcatatagagaaatacaggtctcagtggcttctttcctttttgatttttataaacttcactgatacttcattcagtggttccaagcgcggtccccaggtcagcacacagcatcacctgggacttggttagaaatgcacattctcagtcccatcccagaccctctgacttggacactctgccggtagggcccagtgatgtgtttacatcagccctctaggggatgctgagagccactggtttggatgtttttggcaagtctttttttttttttttttttttttttttgagacaagagtctcgcccaggctggagtgcagtggcatgatctcggttcactgcaaactccacctcctgggttcacgccgttcttctgcctcagcctcccaagtagctgggactacaggcgcacaccgccacacccagctaattttttgtatttttagtagagacggggtttcaccgtgttagccagtatggtgtcaatctcctgaccttgtgatccacccgcctcggcctcccaaagtgctgggattacaggcgcctttgggaagtttcattccatgccccacccccacttaaggggggtcctgggccaggcctaggtttagtacaaaggtcactaagactcattacccgccatctggggaccttcgtccccatgtgacagcagcctgcacagccttgtggtggcactggtgtttcagtaccctctgggccatcactgcatgtggccagctctcctgaccaggaagtgcaggctcccccgaccctgccaccttcctctcgggctgttggggagaagagggggctagtattctgtgtttctcagtaattttgtgatttttaggcttcttcctttggagatggtggtggttataaaaccctgaagtccctgactttaacctcatatcatagacgaaaagtaatgcccaaggtgttaagtgatggggcagtggccacattgtgacgcagagaagacatcttctcgaaaccagcatgtctggcagcagcccattggggtcccttcattattcttgtttgaagcttgtgcatttctagtgtctgccattgtcgctccccattttcgctgacgtttgtgtgtcccaagattaccacggcgtccaagctgtaagactgtctctgtttgcccaggtcccatagaacctgatgggaaagtttgtccagggtggaagatacatgggacagtttgtaaacggtgggaaaatataggaagcgcgtgtgcagacgagggttggcatgtgttgcttcaccagtgaggtcggggcatccctcttccatccagcctggccctgtccagggctcgtctccacaaggaaagcagacagcagctgctgacagtttgcagccacacctctgggcctggcctgccacccggagccaaaccacatgagcactgctgttcttttgcttccatagtatttttgttttccttctttttttagccatagatttctaaatcctgtgggcaggtcatgctgctatgtggagcacagaaatagcagacatgacttttcttggaacagggatatgtgtgtgtgtctgtctccacttcccccaaggaagcaggatcttgctgtcatcaactctgagaagctcaggacaggtgattgcatggcacgtggggaggtcttcattgtgaaacaccaaatttcctggaagagcaatgggaacgtgaaaatgcacccaggaaaccccgctaggaagcgcctggggcagtttgcatacttctgtgacgaaggataggtatatagtggattctgaaagtggacatcgctgcttaattcttggatgtgtattttgcttctctttgctggtatttccacatctcttcttatcacactacaggctgctggctctgttcatccccagcatccagggtcctttctcacgggtgggccggtcattttagtggcaggtactaattctgcgtttttttccacctctgcttctgctgctccacaggtttctaaggtaaacggagtcactcgaatgtcatctctgggtgcaggtgtaaccagtgccaaaaagatgcgcgaggtcagaccttcaccatccaaaactgtgaagtacactgccacggtgacgaagggggctgtcacatacaccaaagccaagagagaactggtcaaggacaccaaacccaatcaccacaagcccagttccgctgtcaaccacacaatctcagggaaaactgaaagtagcaatgcaaaaacccgcaaacaggtgctatccctcgggggggcgtccaagtccactgggcctgccgtcaatggcctcaaggtcagtggcaggttgaacccaaagtcatgcactaaggaggtgggggggcggcagctgcgggagggcctgcagctgcgggaggggctgcggaactccaagaggagactggaagaggcacaccaggcggagaagccgcagtcgccccccaagaagatgaaaggggcggctggccccgccgaaggccctggcaagaaggccccggccgagagaggtctgctgaacggacacgtgaagaaggaagtgccggagcgcagtctggagaggaatcggccgaagcgggccacggccgggaagagcacgccaggcagacaagcacatggcaaggcggacagcgcctcctgtgaaaatcgttctacctcgcaaccggagtccgtgcacaagccgcaggactcgggcaaggccgagaagggcggcggcaaggccgggtgggcggccatggacgagatccccgtcctcaggccctccgccaaggagttccacgatccgctcatctacatcgagtcggtccgcgctcaggtggagaagttcgggatgtgcagggtgatcccccctccggactggcggcccgagtgcaagctcaacgatgagatgcggtttgtcacgcagattcagcacatccacaagctgggccggcgctggggccccaacgtgcagcggctggcctgcatcaagaagcacctcaaatctcagggcatcaccatggacgagctcccgctcataggtaggtctgggcggggggtcagggggtggtgcctgccctcctgcccccagatccctgcagttccctcacagtcttcacgttctcttcccttgcgaaagctccagttccgcttccctgtctcgggagtagtgggcttctcagctcattccccctgcagcccttcttcccaggtcctgggcgttggtggcaggataagaatggtattgagctgccgggcgcggtggctcacgcttgtaatcccagcactctgggaggctgaggcgggcagatcatgaggtcaggagatcgagatcacggtgaaaccccgtctctactaaaaatacaaaaaaattagccgggcgtggtggcgggggcctgtagtcccagctacttggagaggctgaggcaggagaatggcgtgaacccaggaggcggagcttgcagtgagccgagatcacaccactgcactccagcctgggtgacagagtgagattccgtctcaaaaaaaaaaaaaaaaagtattgagcttggatctggggtgagcccccactctgggtctgggccccttgcttcccctgggctgtcacctcctacccacaactgctggagttaaagcaggggccggggggccagtggggagcgctgcccctctggattccacactggattatagaggctggaagcccaaggtctaggggccagcagggttggtttctcccgaaaccaacaagacctccctccttggcttgtgcatggctgttttctccctgtgtcctcacagggtcctacctctatgtgtgtctgtgtcttcatctcctctccttagaaggacattggattagggcccatcctactgacctctttctaacataattacccttttgaagaccctgtctccaaattcattcatgtcctgaggtactggaggtcagggcttcaacatatgaatttggagggatcaccatgcagcccatagccctctagggtcctgtaggccattttttatcctgctcagccttgtctcttcttcctctgagcttcagtttctctggcgattttgtcaaggccacaggtcaagggatctgttgaccttttttctgagaccaggttttttctgagaccttttttctgagctctggctggggctgttggaaacttgtcacagtggatccttagtgaatgcatatctgggctgtcatgcagacccttgctcctcagggtgggttgcaggcagatcctcctcttgggttcccctgtagccctccttccctgtcatcctctcttcagtcctgccactggggacacagggtgaggatgaacttgccttgttaaggctaagtggattctgtggagtgaggtgcatccaggtaaggttgcaaccccatcagtctagacccatgggaggaaacaggccacacctccattttggagatcctcaattttcaaaggcatggagacgtgtagccatcatttaagtgtcagggatttggcagcaagataggcttccaggcaggatggaggtttcgtggttcccctcagcaggtgcctgccaggactgatgcctgagtgacagtcaccttaacttgcaagagttcttggtttgtgctctgctgttgggaatagcacgtgataggaagcagtgcagggagcaggctctgcacacgcgtgcacccacgcccgctgaccacgccccatgactacttgggacacaggatgactgagtcagtgatggaaccgcaccaagtcctcctgcctttggagacctgcagacaggagggaaacattccaagtttccctcctctgctaggtggatgatggagcctcgagagcacacttgacatcgtagtgacagcgccttttgtttagagtaggtttttctttaccctcgactcccttaccctgggacaaaagccatactgtgcctccctgtggtgtgcttatgcttgttgccgtcacccagaagtctaaggcgtctgacattctgtcccaggggtactgacctgtctgtgacccagcaaggcctcagggctggggtctgagttcagccatctgacagtggtagaaacttaataactttgaagtaatagcctaaaatccaccccagcagatgtgccttctgcctctgtgtaggttcacttccaccgcaggtcccagggagccgccgtgccgctggcgggagttgggtggggaaggggctcggccacgtagcagcctcaaggccctgagtgggagtgatcgcagcggatgaggattccatgaagaattcttgcaagcgctgtgtgattttcaggtgctcttgcgttataatctacttagagtgaaatatgaaagtgtggatttcctcccttctgtgacctgtgttctgagtcactcggacggtggaggacttgttttggttgggggactcgttttggtgcctacctctgtaagttgagacagtacccacctgccctcggaggaagaactcccgattgtcagccagagccaccgtgagtcccacctgtgactctgggagtctgtgagacctggagtttgttgtggagtctcagttcttaggtccctcctgtcgaggctggggacagttccctcatggatgttaccccaacccccctgttctccacaaccacatcagtccactgtcctgccatttagtgtgagtggaattcaggctgctgtgtccccatccctggtcttgctggtgtgctgggaactcgctctctgtgtgtgctgtgtctgccgaggtggttcagacgcttcacctagtgggtcccgtcatgcttggtatgtgcagcgaccctgcctggactggatccgtgcacactttaccttttattacttaaaaacaatatatccccacactctaaagatttaaaacgttgttaatttgtactttgtttagtattttgttgatggttattttggaaaatctcccctaccccccttcctttatttggcccgagggaggttgctttctccattcccatctagaaaagccactgggcgcgcgttaaaacctgcccaggtttgatgtgcatttgcgctgctctgtggcctgatcaggaggggcactgagcaccagcttatgcactgagaagcagcccgctgtctggatgggcgagggacgaggcatagatgtgctgccctgtgtcctcacgcaggtgttgctctttgctctggaaatccagcaggatggaaaatagacttcctttgtgtgagtgagtgggtggatgggtgaagttgagtgagtgagtgggtgggcattgggaattatagaaggggaattgggagttggtaacaagcatgtgtcaaagctattctaggtgacgctgggccgtgggtgcagccaggacccctacccactcctcaccagggagctagtcttctcatgacacctgcctccatgtgacaacacatgtaccagtacatggtacactgggatgttcctccctgtatgtctgtctggccagctcgcatccttttccagccaagccccagcttaaatgctgcctcctcagacgctccccacctaaaatggtagtccctcgttccacctgctcttcgtagcaagtggtcatgacccatcattttgtaacgcccttctctctgtggaccgggagtctactgttcaccactctcaccccagagcctgtcagagtcctggctcatagtaggagttcaagaagtacaggttgaatgaggaacatcttgttcgtgtctctttcactaactgtcccgtttttttccccttcgctgtcccagggggctgtgagctcgacctggcctgctttttccggctgattaatgagatgggcggcatgcagcaagtgactgacctcaaaaaatggaacaaactagcagacatgctgcgcatccccagaactgcccaggaccggctggccaagctgcaggaggcctactgccagtacctactctcctacgactccctgtccccagaggagcaccggcggctggagaaggaggtgctgatggagaaggagatcctggagaagcgcaaggggccgctggaaggccacacagagaacgaccaccacaagttccaccctctgccccgcttcgagcccaagaatgggctcatccacggcgtggcccccaggaacggcttccgcagcaagctcaaggaggtgggccaggcccagttgaagactggccggcggcgactcttcgctcaggaaaaagaagtggtcaaggaagaggaggaggacaaaggcgtcctcaatgacttccacaagtgcatctataaggtaggggcctccgcagagcagccactcccagctgcaggagtgcgggaggaatgagagaggaagtggagcgtgctatgcactggacggtgtgttctctgattccctggggtgatgaaggagggggcgggccactgtgctgggtgatagcgctgtattagtcctctcgtgttgctgaaatactacagactggggaattcataataaacagaaatgtactggctcctggttgtggagcctgggaagtccaatatcgaggaacctagtgagggccttgtgggtgcgttgatggggcagcaggagacccagtgagggaggggaagtccactccacgaagataccacgagtccattccgcctgcctagggcctcgggtttccttttcattaactggcttgcgtgtgcgtgttgcatgcacgtgcacacatctccatatgccagggataagtacctgggctgcatgcttcgtttcccctgcttctccagttccgtttcatcctggtgctcgacagctgcccagatccagctgaacttctcactggctggaccgtcagtggactctgtgcgcttgttttctctgttttctatccgctcacctcactgccagcccagcgttgccaggtcctctctgtggagggctttccctgataaagccatcaaaatgaatctcaccattcacacgctgtggagggaagagctggggagaaaccagcaaactgaaacatgcagcgtttccctgtctccgccaggtctcccggcagcacagtcatcctgaggagactcgcccctccaagaagcaggggaggcagagtccgtggctctcctcttggcagctctcccagctgtcctggctctgaagcaaggcttggggtttcctcccttctccagcctgccagtgggtagcggggcacccggggcccagctggccgagctcagctaagttgaagtctctgctgagtttcccggcacagacttgtcctctgtggtcccagttctggattcactggaagggaagcgttctctgctccagccctcgtgagcctggtgggagtgtgtggctagtgggtttcggcagcattgggaattggctgttggttatcactaaacaccaccataccctcaggtgcccacggctgcctgactgcaggctctggcctggccttgtagttgaggcaatgcgggcttctgattccatcacacatcttagaaatacggaggaagggttgacttgactcctggcgttgctgcttcactttaagtccaggccctgcagacccgcctcaggctgcatctcatgtccttgcacacttctctggaaagaggtacccagtttttctggcctgagaccctgagagggtttggctcccttttatctgagtctgctctcccattgcccaaggctgcctggtggggatgcggtgtgggggttgctggatgcagcctgccaagtgtgacccagagactgtaagctctgaggaactttatttggtgtttcctgaatgttttactgagaagcctttgtcaagtaaagccactcagtgaatcctgtgactgaatagccaactggtgaaatgagaaactgtcaacgtttttactttttactgaaggaggccaattctgtgagcgtatgtttgattcaaataagaggtttggatttgtttaaatccaccccgtcaagggtatttctagatttcatcacggaaatatagtggagctctgcgtggtggccatggcgaagcccccagcagccgtgtgcccacgggtagggaccgtgagcacgcaactctctgtggcaccggtgtcctggctgctgactttggtctgctggtgtcatcctcacctccactcattgcactctgccttggtgcagaattcagtccctccttttttatatttacaagaaacagactatcgggagcggcttggaatttgcatggaagtatgttcctgtagttagaaccccatctagttcctttgctgcaggagagaaaggcacaagccaatgtctccatgccgactacgactgtggacccaatggcagaaagcatctgctgctccctgttctggccctatcacttctagggggacgctgcggtgtccagtgctccgcagggaagccttccctgaccaccctcccccactctacatgacacctggcacctcctcccatcccatatttgtgtgtttgaggcctgtgtcttccccagactgaatggaagctcctcgaggttttgtgtgtttcatgcactgctctgtctccagcccctaggatttgacctagtacacaataggtgctcaggagatatttctggactcaagcaacaaatgtgcccggtcaagtaagaaagaaatagcaagggtcttagatggattccctctgaaaaacgcaccacatttcgtgtggtaggtaaaagaaggtgctgactccggattcccaaactgactcagctgttttatcaaagcaagcaaatcattctggaagttattgggaacagggcaacagaggggcatcgaagaagaggcgcagaggggacagcaggtggttctgtggagagaaggcgaccaggtcgcaacctcagtgaaggctgctgccctggcaggtgttaatatggcaaggactctcagggtgtagatgtcgcaccagtttctgtctctccagcttctctcctgtgggatccctggtcacgagttccatcaggtcatagctgctgatagcttctccgctggcccgcagcagcctttgtcagctgagggattctgcctccagcacaagctgctttttcagcagagccttggaggggccttccgcgcttctgctgtgcgtccgctcagggcctctgggcggcagcctctgttcctggcagaacaatttggccctcatggggttgatccttggtggagtcttcccactcctcttggcactgcgggttcttagagaatatatttcttccttctccgcctgtcattaactcagaatacaaggtggcccacagccgcagggacgccaaggggcagcggcccatgacaggtgtctggcctcatttgcagtagggttcagctttgcttctgaagctttactgttttttgttttgtttcagggaaggtctgtttctctaacaactttttatcgaacagcgaggaatatcatgagcatgtgtttcagcaaggagcctgccccagccgaaatcgaggtgagagaaggggcccctcacgctgcctctcatggtgtgggaacccctcggcgagctggaggacatcctgtcctgccctgacccctgcagctcggtgaacggaaaggactcagatggggctgagttcgtcctctgtgttgagcgtgcaccagggcagccaaatgttttaacttaggttgatctaaacttgttcacaagccaaaaacactataatgaaggtggggagctgccgagtgcaggggacgggttctgggcacgtcccctgctccccgtcactgtctcctcctgcttgctcacccggctgcttctcaccccatcctctgtgtgtctgttatgcaagagaatgtttggaatcccttgaaaccacagttgtgctttttcttctcttctattttttatttaatgggattggcagattgccatttttgtgcttctgccaactctcttctttgagttagtatgaggttggaaagacagtgagcacttctgtgcccagaccaattagggggagtttttgtgtgcggcgctgcaggacagagaccggatctgtttatttacctcccctcggccagtgcccagctgagtccgtgtgaacttccagctgctgacgtcggtgggctctcagcagcgcttggtcgtggaaagggaaagaaaccaaacccggactgctggttcagggcagctgccggccggggaacaggaggtatttgctgaccacagcctcatcttttagtgtgtgacaggcttttgctgtgttttttttttttttttttccccttaatgccacctgtttcaaataaaatccaaggtcggtttgccccgtgtatacatgctgaccactgggggttcaggtatcttgttttgcccaggttttagacctgtgaccttcaaacctgctcaaaccaggacagctggtcaccctccctgggtggcgtttggtgccccacctcctgatagcaattgtcagagcttaggatgtccagccctgtggcccacccctcccttcctagtgtggggaatagaggtttacctttcacgccattttcatcgtcttaggacctaggtctctgcttacgtgcaggggctgcctacactgtgtaccctgggtgcggctgttgaatgccacgcagtggcctgacacccggcctgtggtcatgattaccgtgctgcagccgccactgcctcacccaccaccagccacgatgtcagctgaaccgtggtctaggacacgtgtggcttccgcagctgcttccagagcacgcgttgcgtttgtggtagagatgtcaggcggaggacacttggctttctggggctgagcgttggacctgggaagaggcctttattgccaaacaacacgtgtcctgtgggcatctccccagaggtgcagaagtttattatccatgatgcgcaagaaaacttagctcattttacagcctcttattcaggaattaattccctctgaaagtctggattttgctctagcagttgtgtaaatatttaaacacaaaggggagatttgctagaatttaaacttcaggcctggattgcctagcttcttgtgctctgtattccaaaaaaggctggtggacagcccctggagttggccaccacctgggagcagtcccttgcttcccttcccatgtctttacaggcgcaccagacgctggttgccctcagtttcagcaaatacgcagcaggcttgggcactcagggagtctgttgagggaatccagtcatttaatgtggaattcgttcttgatttgtggagcttgactccgccaggtcggccccctctttgtggaagtcacacagcattgaggaaagtggttttggtgttgctagtagcgctttgtggagcttaactggaccctatgatgctgggggcttatgagttaggcttcttccctaaatgtggttccagctttaccaaggcttgtgagacgagggaagaggacttagtgcttctggagtgatcactgagaacaaagtggaaggtgactgcgtggggaggcttgtctcaagggagcctgggcaccgctgcttgcctgtagtcaaagcatgttctgacccattctttgcccccatatttgtttagatgggacatattaaaagtcacttcggaagctttatataattggcggttaccgtgcttagcataatgtcctccaggttcatctatgttgtagcatgtgtcagaactgacatccttttacaagttgagtaataggccatggtatggacggagtagattttgttcatccatctgtggatgggatactttggtggcttcaccttttggctgttgggaataacactgcataacatgggtgagaccctgctttctggcattctgaggatatgcctggaggtgacctgtcattgctttctgcattagcgtcctgctggagacactctgcaaagagagcgtctgttctgaggggtgtgtgcaccaggcattcgtgtcccagttttgttgggttgaactgtgctctgtggctgcagcaccttaggggtgctgaccagccctttcctgttccctgcagcaagagtactggaggctagtggaagagaaggactgccacgtggcagtgcactgcggcaaggtggacaccaacactcacggcagtggattcccagtaggaaaatcagaacccttttcgaggtaacctgggattctctcgtccaggttcttggggatgtgactgcatcctttccccgccagtttgtaacgtccctcgtcttcccctttgcaggcatggatggaacctcaccgtcctccccaataacacagggtccatcctgcgtcacctcggtgctgtgcctggtaagcctgactgtggccgcctgcctgtggcagctgtgtccatgagtcctacttgctgagaaccagggctgggaaatcccttctaagcactgccggggagggatggcgtcttcaggcttacaggacatacagtgaaaattgatttttagaaaagaaaggagtaacataatgattggtgaagtcagtagaaaaggtggaaaggtgaaccgcatggcagagtctggagctgggagaagcttaggggccaactttgaaccttgaaattgctgctttcaaagctgaagtcacaattccttaaggctactgcaggcttgaaatcatgaattctcaggatggtcagtaggctcgtaagggacggatggatgctttgcaaacttcagggaaagccaaggggtcatggaggttgtggtcaccatgaatgtgaaggcccaggccttggcgaaagtggctaggaacctgtccaggtcctggaacctgactcatttctgagctgagccaaggagccctgtgccctactcaccctgctcagaggccttaccaacaaaggggctttcttgctttctgcctctggccctgatgggggtttttgggtttggcgcctctggtcctcagccttgaggcttgggggcttcggcccgtgggcggccggttcctcggcattcctcaccaggtcaggttcctgcggccacctccctcatgaggccgacgtgctcctgatgttttgaagcggtgttcatattctcccacttctgtagagcaagcaggaaagagtaggtaccttctgctcactgtcttttgtctggctttgagtcccatttcttttccttcttgttttagcggaagaaagagatttttacttactgttcctttgagaccttgttgcctagcttttaaaaatgcccttttcactctttctgttttaggagtgactattccctggctaaatattggcatggtcttttctacctcatgctggtctcgagaccaaaatcaccttccatacattgactacttacacactggtgctgactgcatttggtgagtactggccccaggcgggaagggagggactgcagaaactactattaccacatgaagtggggcctgtgggtaacttcttgtccaggtggttccacgtgcttgagaacttgcttctctgtgttcaggcctgtcctgcgttccctgccgaagcctgggcctgggatcacctacctctgttggaagagttggggtgctggagaatgttgtaacactgtctgatgatgagcaaatcttttcatatgcttagtggccatttaagttccccttagttccttaagttcccttaagaattacctacttacgtctgtttttgttttgttttgtttcgttttgttttgttatggattagtcactttttcttgtggatttccaagagttattttcaccttagggttaaggaacagtagtaaaagtgccacacaaagctaaccagtagtagtgaccgtgtcatcagccctctagtaactgaatataaaccgtggtatttcatgattggttattttcagcctctctgtagagccagtgtttcctcatctatcggtggctgtggggagtagagttgacttgggaatctcgttcctgccatgtggagacacgcgcgttatgtaccctgtggagtctgttgcctggcgaggtgttctgggtccccgcctgtaatctgactctcactgtagccatccctgattgaggctgggtccccgcctgtaatcctgactctcactgcacccatccctgatcgaggctggactctttggtgtctttgtttacggcggcagatgggaaatgactacaaataatcagatgtcttgtcgtctgatcgtttaccggcatgctgttcatgccatgctgactgtgtttattgccctaatggggtgattaaacattctttattaaaataaacaaagtcttaggactcgtgttctccctctttggagccagcgtcggctgcagcctcctcattttggctgttctggtgagtggtgctgtggacatgagggagccctcccttcccacatgggtctgtgtgccatggacggtgatcatggtgtcctgcagtgggtccagagtgatgggcccgggaagcccaggctgttgcctgtggagcggggactgacaggagccttggggcttagccgggccaggccaccagctggggaggggacagccaggactattccgagaggtgcctttgcctccggaagaagagcgtggccatttcctgtggaggagttacactggctgtggcatggcctgtgttctggggtcatccccaggccagtgacctcaggcccgagtttcttccgtgtgggtttgcttatggcttgacgttgagtcacagatagcaaaatgtgataccctgtgtgggctttttgaagactcactcctggaacctcattgacaggagagaaagaaaaggcagggataggatcagagaacatgatggtgtgtagtttttcttaaaacatgtgatttaggttagaaaccctgtatttaaattaccaatcagtaacagaatatgttggcattgaaaataacatgagcattaaaaaaaatacttccttcactgagcaactgaaaccaggatttggcctcagagagaaatgctttcatcacagacacataggggctgcagagttgctgcccgcctggacctggggggcgggggctgtggggaggggctggcggtgttgccctgagctgctggcccacatctttgtgtttaatggtggttgatggcttcactggcttagcatcctgaagacctgtcaggcccctctccacactgatgtcctcctcttgcctggggaggagcccctcagacagcctgagacacccaggggcagggcagccatccctgcacccctgccttgcggggggcctcccctcacatccccctcattcatgctgtgagcctgacaccaggggcgtcacacgttgtgagtggaagtgtggccctggtgggctccaaggacatgggcaaaacctcctcccctccctgtgattgccgtgaggaggccgtgtaggttactttctacctgtacctcccaccttttcttacacttgaggacccctgccatggttataccctggagggtctgtgagccaccacttccccaggccaccctctgacagaggcctatgagcccttgatcctcctgtgtgtcttgctgtatgtgcctgatgccgggtaggctgggtcctaacacgtaaaactctccagtggggagcagagctgggggcccctagctatcccctgacccctacttcaccacagcatctgccaaggagttggccttgaggtggcacatgtgcatgagcctggctccttccccaactctctgtgcatttgtagagggcagggtttactgttcctgtctggagggccgagggagccacgtattccttgtgaggacattatcaggtgctgctcctgcagtggcctctgttaacagaaggagggtgcagtgctggagcctcagaagaggctcgtggaggccgcagtgtgtctggttctgatttctaggggtttgtgaacatctgtttgtggtttgaaggctttttggctcaccaggtgggtcagatctccataaaagatgagcatctcgcaacgcggatgcactgtggtttggctgtgtgctaggtggacgtggcactgctgccatgggaaatgggagccagcagtgaccaggcacccagccaggccagtgcgccatccctgccggcgtggagcagagcctctcccatgtgtgctcgggtccctgagggtgacgggggtggcccagtacatgcaggaggcccttgtcaagtctctgcttgtctcttgtgtctctcaatgacccaggtattgcattcctgctgaggaggagaacaagctggaagatgtggtccacaccctgctgcaagccaatggcaccccagggctgcagatgctggaaagcaacgtcatggtgcgtccactcagccaccgcctccagcaggagctgtaggacctcctaggcacttgaacatggtttcccatgaacccgcctttcaaaggcaatgaggacacagcaaaacaaatccccagggtgcaaagggaaaggtcctctgacacaaaagccaaactgaccttccatcagattgcacagggcgctggggttttgcacggcctttgcatctgttttggggcttgtttgtgttgtgggctgctgtgggccctgggatttcttgtgcccgccgctcctaccttctgggcatgtgagaggaatgagcacaaaggcttcttcacctgttttcaggaagtcatggggctggtgagttcctgggaagtgctgctttgagctgagttctgaccagcttctctggcctctgctgaccctgccggtcccgcctgtccatcttagagaagagatggacgggggactcctttgtaagcccagcctgtgggcctgtggcctacttggctctggagatgagcccggcagcctcctggttgtgtaaccttgtcctgtttccagccctggcattgccacgtggggacagaggggcctgtgtggtcatcatgtcctcagctgtgcatgaacctgtcatcactcttggaccagtgcagtttagaagctccttcttgtgttatgaatgacgtctttttattttccacataaaacaatcttatctccttgagagcaggcctcttagggtgcgcatacgtcacctgaagactgcaggtgtccctgcgcacagggaggggtgcctcagcctggccctgtctccccagatctccccggaggtgctgtgcaaagaggggatcaaggtgcacaggaccgtgcagcagagtggccagtttgtcgtctgcttcccgggatcctttgtgtccaaagtgtgctgtgggtacagcgtgtctgaaaccgtgcactttgctaccacccagtggacaagtatgggctttgagaccgccaaggtgagcagagccggcctcctcccgcttgctgcccccgcatccctgtgagtgccgtgcgtgagcgcacacagaagcatccctgcgtgtgcgtgtctatttgtcaatagttccttttggaatatgtctttgaaattcttaagacgtggttgaaaggtcttctaggaatgaaaagttgttagggatttgtttgtatcacaaagagttttgatcagaccgttactgacagacccctccagtattggaaaactgttgaagatgctcaaggtaattgcttagaatggacagagaacctccacccatcgtgagggagtggcagctgcctctgggtagcggcgaagtgctatgacttttcctggtatgtggtgcctttctcacagggaggcaaagttttgaagagtttttaatctaaatgcaattcaagatttagaaattcagacagcctgcctgccccctccaccaagaagaaccttgacagctgcctagtaatgaaaatccaccctaaagggatgtgactcctctttcaggaaatgaagcgtcgccatatagctaagccattctccatggagaagttactctaccagattgcacaagcagaagcaaaaaaagaaaacggtcccactctcagtaccatctcagccctcctggatgagctcaggtaacagacccccagagcccacgccagagagctggacccggctgcccttcgggggctcaccccccgagcaggcctcacttcctgacaggagggtgtgtctgcagggaggccggtgtggggtgcgtgtcccctctgctggtgagcatggcaggccgtcactaaaggtgcgggccgtctcccgtgtctggcagggatacagagctacggcagcgcaggcagctgttcgaggctggcctccactcctccgcacgctatggcagccacgatggcagcagcacggtggcggacgggaagaaaaagcctcgaaagtggctgcagttggagacgtcagagaggaggtgtcagatctgccagcacctgtgctacctgtccatggtgagcccgcctggccctgccggcgccctcgcatgtagtgcttggcctgagagctccggggttgcccccagaagagggagggcgctctctgcccaggagacctgctgtgctcccatctctggagccggctgtgggacctcggcggagcttctggccgccggaggtggctgcctcacccacagtgaccaggccacacagaggctgtccctctgttctgcccacgcgtggccctccctcggtcctgcagtgcgtccttcctccctggggagcaggtggcctccctctccgccctactttgtcactccagcccccacgcactctgctcttacccattctttctgaggcagtgaggggcgggtttccagtactgggcagcgtctgccattccctgtggcctgtgcctggtgcacctgggcccatggcctctgccctttggctctgttcttggtttcctggtcctgctcagctacatgatctgcctcagcccccgaggacttcagaatctatccttggtgaaagctgatgttcctcctgtcccatctgggatcagagatgcttttctggcacagccactccaggccacagcaggctgcattcctcttgccttctcgactgtgccctgctggcttcctcgtgcccacctgcctgcctcagctttggggttaataccaaacacctcctccccctgctcacccctgttccagcccagaggtgggctcagaaaagcccttccatggcgactggatggctgtggccctcgccatgcttcttccagtctccccttgacctctcaccagagagctgccctgacacactctgggtagggacgcccagctggcactgcagatggctccacagcactacacaccttagcctggaacagagagcatgcccgaagggcctgacctgcctccccgggcctcgtccctttccacagtgcctcacatctccagtacagaagcctagcttaggaggtgcccaccccatatgctgtgtggtgcctgtgtcccacaggtgcccccttcggctgcacactcgctgagaggccagtgcctctgcgtccctctgcttgtccatggtgggccaggactgagacccgggtcgactctccttggcctcccagtgtgactgtgtcatgccgtctcaccccgagtcctggcgtgccctgtagaagagggaggacacagcctctcccggatgagtcagatcgtcagatcgtcagatcagggctttgtaacatttgaaagagctaaaaactcggtgtgtcctcatctcctccttacctaaggacgcaaatcacattgtatcagataggcccaccctcatggcctcatttgagctgatttacctctttagaggccctacccccaactgcagtcacagctgagatcctggaggttcaacgtttgcatttgatgggggacaaatgcagtccgtgaccgccctgcctcctgtcctgtagatttccttctgtctggttttttcccccagacttctcaaaatgtattacctagagccatttggttcttaaaagaaaatgatgataagcattttcccagatcttcaaagtatcttataaacatcactgataaaagctgcatagcttggtgtgctctctctctgttcttttttttttgtttgtttgagacagtcttgctctgttgcctaggatggaatgcgtgctgtgatcctgtctcactgtagcctcaacctcctggtcatcctcccacctcagcctcctgagtagctgggacagcaggtgtaccaccacgcctggttaactttttttttttttgtggtagagatggggttttgctgttacccataggctgcctacttcagcctcccagagccccaggattataggcatgggccactgcgcccagctgtccatcctcttgctggaacacgctattcatttccatgcactgagggctgtatggtagttacacctgggggtgaagctggtctgtccctgtgaggtggcaccaggtggcctcattttcaagccatccttcagaaacttcagagttgtcacctggcatttcctgtcagcctgaaagttattttaagaagaatgtattgtgaggccgggcatggtaggccaatcccagtgcttcgggaggcaacggtgggcagatcactcgaggccaggagtgcgagaccagcctgggtgacagagggagactaatctctacaaaaaatacaaaaaattaactgggtgtggtggcgggggtatcacttgagcccagaagttcaaggctacagtgagccatgatcacaccactgtactccagcctgggtgacagagtgacaacctgtctctttaaaaaaaaaaaacaaaaacaaaaaccaggcacggtggcttatgcttgtaatcccagcactttgggaggctgaggcgggccaatcacagcctggccgacatggtgaaacaccatctctactaaaaatagaaaaaattagccgtgcatgatgttgagcgcctgtagtcccagctactcgggaggtggaggttgcagtgagccgagatcgcgccatcgcccaggtgacagtgcgagactccatctcaaaaaaaaaaaaaaaacccgttataaatccataggcaaaaattggggtttgacttatacgttgacagtttgcattgcttggattactaatacatttgtgaatttaaatttgatgtgtttcctgttcttcctgtccttggccccgtgtctctccaaggtcttgtttctgtcagtaggtggcattcccacactcctacaacgtgttctctgttccttgcttagaaacaccgcagacgaaaacaagtccttcccctcaagctttctgagaaaggcctatgactcttctcctcttgagtgttaagactgaatttttccttattttcaaactcagaattagaataggacttggagtcagcgtgaagtatgggagccctccggcagaagccaggtggctgtttcctttcatccggcccctctcaaccctagacaggcccccagtgagggtctctgtcccagcactctcctgtggcctcaggcagcagggcgtccactggcgggacagctgtgggctttgtggacagcccgcccaagggggccggggctggtgggtgaggtcatcggcgtcacagcggtcaggaatctgtgatgttgagggttttgggggagtttgcatggggtcgttggacgccgcttgctctgttgactgtgagccactcatggaccaccatgagaacctgttttgctgctggaaagtcaagggtgcgttccccgggtggccgcctaagttggagtcctccatgttccacatctattccagcactagggtggtttcaaacacaggatctcaggagccctcagaactcaagagatgagaaatacgcacccctcactgtctttagcagcctggtggtgactgaacctctcccaggaaactccagcagaaatctggaggggacttgagggccactcccaggtctaactcagaggtggtcagttactcaccttcctagttgaagaccatgttccaggtgtttggtcagttttcgttttagtccatttccagcatttccagtcctcaaagcccttggcccgggtggtgggtgctggggctactctggcgcgggcagtgggtgtggtggctgcccggccgggcgtgctcctaccttaccctcccagggcgctgtggagctgcctcctgaccttcgggtgtcctgctcttgcttgcaggtggtacaagagaacgaaaacgtcgtgttctgtctggagtgtgctctgcgccacgtggagaaacagaagtcctgccgagggctgaagttgatgtaccgctacgatgaggtcagtccctgcccgcggggtagggcagggcggcagcgtggcgccttccctgctcccggctggatgtaggcactccggcctggcagttctgtgcctggcgggtagtcagggctctgcaggcctgaggtgccctgttcttaggccctaaacccattcaggccccatgttaggatcccagggggagcggggttcctgcacgggcatttggatttgagcaatgggctcttaacagggctgaggctcttcctgcagccgcccccccggctttcccaagggctgcaccactgtggtttagacccagacccttttttgtgacctgtcccaggcacagtgggatggttggcagtggcctctccaatctgcactaacttgacaccagccccttcaggctgagagagctggaagtgtctgcggacactggggcaggacgggccccatgatgtgaaatcccggtgccttcctgcaggtgccacgctcttctggagaggggggtcataacaacacacagcctgtgcagctgggggccgctctgagtggcggaactcctggcagcagtgcctctcccctgctctgcccgccttccccacgtgtgcttcccacagactctgatgaggctggttacgaggaaggtcgccacattgtggtcattgcacatttgaggccactgagtggggtgggtgctgcgggtatgactgtgaggggcctggtgtgtctgggggcccaggcagtggggccaagtggtgggtctcactggataagccttgagctaaatgatcggagagctggaagaagaactctttgcatctgttttgtttcaaagagcatgctgggtgaaggcagtaagcacctgctgtgtccctccttcaccttagcagcaaatgtccaggcacagttgcaaataacgaagcctttgcggctgagcacgagcatggctctggcaccttgtgggggtgcaggcggcggcacggggaggcttcctctggctgcctggaaagcgctctgtgaatcatgggttgtacctctcaccagcagcctgtttctgtagtcggatgtgtgacgtgaccagatcctgggaaaagaatggcattcaggggctgtctgagacctaatggttggttttgatgaattaggagcaaaggtatttggaaactgcatactctgtagtggctgagtagttcagtaagcatgtctgtgcctctgtcccctgttgagctgtgcatttttttgtttttaagacggagtctcgctctgtcgccaggctggagtgcagtggcgtgatctcggcccactgcaagctccgcctcccaggttcacgccattctcctgcttcagtttctggagtagctgggattacaggtgcccgccactacgcacccggctaatttttctttttagtagagacagggttttaccatgttggtcaggctggtctcaaactcctgacctcaggtgatcagcttgcttcagcctcccaaagtgctgggattacaggcgtgagccaccacacctggcccattcttttaaataggaaatttctaccttgtaaacagagaccattgcaaaatcttctcaacctcccagtgtgcccagtacacaaatcacccatgtctgggcctgctgacccgggacagtctgctttaaacacccacccttgctggggtggggggtgcacctagattgcaaatccctgaattcatggcttgggttctcatggatggtgaagctctctggggagtttggagccatttgtgtctctggcccttgcaggctggctgagcagggtgttgggccgcctgccgccgagcctagtgtgagagcactggtctggggcaggtgctgcccacctgtcgagctgcacgcaggggagggaacggtgtcctcctgtaaccgcacactgccgctcctcctcacttgtccttatggtaaggtagcagtagccgcctaaatgggttttatggcagctcatccacttatcctttatcagtgtttatcatcagtacctcaagcagccatgactatggtgttattacagatacgtgtggaccgccccgccttccgaaggcacctttaacttgtgatgggagccagctgtcactttctcaccctcatcttgagggcttttcagaggactagagatcaggccctcagatgtttcattccatggctggcttcctctcctgccagggtcagcatggttcccagccacccgtggcccagagagatgctcataagatgcacgtttgctactcctccccatgttgtttttaaaaatgatatgattataggatgtactgtgtgaaagttacaaacacagtttttggtgccgacagataaatgattctcttgagtgaattacaaggatatgtataggttgagaagtgtttgtatttacttgcatggccaggttcagtggctggtagctaaagtgagtcaagtagcttgggtatttgtgtcaccatccaggatgtaacaaagcccctgggtctctttgctgagtgctccgtggtagaggcagtgctctgggctcccctgccagccctgcccttatgagcaggcaaagcatggtggaccagggtgttgatgaggatgaaacggccatgcctgctatgtggcatcaggaggagctgggaaagggagactcactgcatctgagcctctcggggttattttaaaacctgttggttggtgtggtgaaggggaccgctgccctctgccctaaacttgcccctgcatggctctcagggacagagctcttgttaatacggtatgttaactgtgtcttcctttcacccccaaacaggaacagattatcagtctggtcaatcagatctgcggcaaagtgtctggtaaaaacggcagcattgagaactgtctcagtaaacccacaccaaaaagaggtccccgcaagagagcgacagtggacgtgcccccctcccgtctgtcagcctccagttcatccaaaagtgcttcgagctcatcatgaagatgccaacgcccgtggtcgatttatatatatttttttgtaattattatattctagtttggagtacttgctgtaggattcaagctgtctttgcactagctctaaagaagattttcttctggttttagagaactaattttgttttagcattaaactgttgaacttttttttgtacttagaaaacctagatactgcagtcagattttggaaactgccgtatagtcactgttttaaaaaccccggaggggctgtattaatttgtattgccccatggctgacaaaagccttttttttttgttttgatttttttttttttgtaactgttggggggaaaaaggctttttaacccatttttgaagagggtgaagtttggagaacaaatttaaaaaccatcagtcatgtgagcagattttttagaagggataggagacacacgcgcacacacacacacacacacgaaacttgaaatggctttgctttggctgtcgtcttctgccgtgtgccagatgagcttgtgatctgggaagccggggcacccccgttttgtttctctgggcggttgtggcagctgaaggcggacgttgtttcctaaccataggtggaacgaggagacgggagcgagtgggctctccaccagcacatcactatgcatctgttccaggaaagaagaaaagcgagcgaggaagacggaaaagactgcctgccttggaggggtcacatgagggagacctgtgcctgatttcattaggaaatccattctgttattttttggtgctgttggctactttatcaaaaaacccttcaatagcatccttaagatttaaaaaaaaaaaaaaaaaaaaggaaaaaaaagtgatggaagccgtaagtgcttctttgtcatcgacgtgcaatctttctaacattccatctccatctcaccgcttcttgtttgacaccttcacaagtcagcattaatctttcttttaaaacttgtttcatttatgatcatgtagagagccactaggaggcctgcagttatttttgaatgtgaaaatgcatttgcgttcatcttgtctattttttctcttcatgttgtaacaaaaaggaaaaaagaaaaaaaaatcccatcccttttgtacatatgcctgtaaattgttttaaatacttgagcctttttctcggtggggggtggggaggggggtgagaagacaagatgaagaaaagccttacatttcagtttcttcatcggttggattggatgcttacagggtttttcttgtaacatttataagtgctgcttacatcactgaacaacaacaaaaaaataataatggagtagctgttgcccttctccggttgtgtgtacagtatgtgtggaataaaaaagggaaactgttttcacaagctgttctttgtttcataattggattcatcaatcccgtagctacccatattgcactgagcttgccagtggtgactgccaggaacgtcctatgatccactttgttggttgttgttgcagaagactgaactgttttggaatatttaacaattacagaaacagtcaagtgttttccaatgtggttgtccggtttctatggccttgctgtgtactttccctctttttgacagtaaacttctgcctatggcttacagtttgacatttaatttattagcgctgctctgcacccctcccttgggagggagacttcatgtggtttattgcgagttttttgtttacttttcaggtttgtactacaaggtttaataataaaaacaaagttttttggacatttgtctgtcttgtggaagatgactgaatggaatgagctctttcttttctcgtccacgggcagggggcagaggattccccccagccagggagcagagccaccccccacactgcagtcctgctcccacctgccactgggtccccttcagcctaacctaatggtttccatgtggcctgcggccgtccccctcatttcccatcgagctgcgcccccctgctgagcttgctttcatgatgagacgacactgggtgcattcagggtggtatggctgcagacagacagaccccctcatcccggcggggagtctgtcccctctctctcattgggctggaggagtgatggcaggaacacatctccaggggaccagtttcttttcataaagaatggaggattgctttgggcttgtttctgttcttttgggcccaggagtgtgaaaaagtaggggttggactggctggctactggactaatgatacttacttacttctgtaatgatcaacggaaaaccccaagctttgccagagtggtttggctacagtcagctcttctacaggaagtggcattttccacttgtgaaacggtaggtcattccctgcctcatgcagaactcagccctgtggagcctccaccacctggcccaggccctgcccacatgcaacctcccggggtggccctcaatgacctgcacgtcccttcactctaaggaaccctgagttacagtggccttaaggacatgtgtatttagaagcctttgtgtacaaactagctctgtgcgctctcagtttaccgtcctcacactttattgttagctgttctttaagtttctcacacattattggcaattatgtaaaaatcaagaacctctataaaacaacctggctttccaggtggaattccgcatacagccaaaactggattccagtgtggccagacaacgcccatgtcccaatttaagagtcgctgtcctcaccaccatccggagtggcctctctgtcagtgtgtgatgtggccagggcagtgtccacctgaacttcctcctcatcggactgaacaacgggggactccccaccctcactgatgtcccgggtggccgagtcggtgcaggtggaggaagaagaaggtggcttggctcttaattctgagggatttggaacctggagggtaatctcattctgacaggtactggattcaggccctgcaaaataacgtagggaagaaaaagccctgtcataaaaatattgtgaatcagaattgccgccaacagctgtggaatgtgcccgtcatgaaaggggggtgtggtttttgttccaggcacctggggcctgcagaacttgggaactgccctggaagacactgagctgagcgatgccagaggcagcctcaggccctgcggtgacccttctgtcccctaaggagtcagccacatgtgacacagatcaagtgctcctaaggctgtaatacgcgtgtaatagaggcccaaaggcaagtgctgcctatctttgaggagcagtccttgtaaccttgataatctagatttcttttttttttttttaccctttgcagtaattcagagacaccactgctgagaaagtcggaattactgaccttcagcagttctccaattttatggaactaaataggctcttcaaggaatcaaaattctatatgcaggtgtcactgtttctaaatcttcccctgactctgggtgagggttcacgctggtctccagtattctggccttctcaggatgagggcaaatgcacccaagctccttctcttccccaggatgacaccgttctgacagattgccaggagaagcgggtgagaagtttagaggaagctgaaaccgtggtaatggtagaaccttctacagatggctgaggtgctgctgggacgactgagctttgccttgacccagcccaaagaactggtctgaaatttgaaacgcaccaagcccaggtacaggtctggcacctcagcccatatttgctgcatgaatgtgaaacaaaattttgtgaagggatgaaaggaactgaagtgcaactaagtttacaacacaggccaagagctgaacacacaccatggctttgcccatggcaggcacgcccctaaatgcctgtcgcacgaagagggaagagtttcccgtgagccccgcaggagagtccgcacctccctgcaaacgccagtccttaaccacaaggagcagactcaaatggatttctgggtggtaaaggagggaaaacaaacaagaaagctctcaactcaccaaagttaccggagtggagcatgtcaaatctttgagaagaattcatgacggaaccacaccactgttgcagctgccacacagccgtgtggaaccgtggggttagggagccaggagctggctgtgagcttgggggtttatgcgtaagtgactggcagatggttctcacgtctcacctttggaggggagtggcatcgatactgccctggttcagctaatgcaagtttgtcaaccctacctaaggcgggggacagcacagtgttctcttctcctccagagttcaggaagacgtccagggcctcctggtccgatatgtccatcaggtccatctgctccagcatgtccacgttcacttccatggatgacatgctgcctatgggctctgcggatagatcaacacgagaaaggacacgctgtctttaatattactttaaaaggtgaacttccattggcattaggctaactacattgcatttcctaagcttccttcaaaatggaatttgaagcaacgtattagtagatgacatatgccagtctggcactttaaatgcatcctaaatcacccttggcaactattattaccttttacacttccttaatctgttcatccccagccctttgggacgctgaagactaatctctgcattaagtgagtcccggctgttttgagtaggacgctcagcctgtctcaaagaggccaacattcctgcagcaacagttagcgaccttcctccctgccagccacagctctgcttcctgcctacaggtgccctgaaccttcccggcaggcgcactcctctaattgcaagtggagtttccactggccttggaacatttctcgggcctaacggcagaaggggtttgacctacatctgtaagctgtaagagctccctgcagtggaagcacagactaggagaaaacaaaacccagcccaccagcagacggcgaccccatgaaacagcacatgcctagttggcctctgcccgggcactgagcacgggatgccccacaggtctttactcataggcaaacgacctctatggtccagaaaaccacaagccacgtaagttatcctagccatggggaatgcctggcagaagcaaatgcaaattatttctggaaggactctcccttaaccttggtttaaacaaagtcaatcccaacccaatctggcatttgtaacacacatgaaatgagccactccgagtgaagggcagcagaaacaaacatcatcctcgctgaagaatatgagatggctgttcatacaccacagtcacaggaaaggtgaagtcaaaaacaaggtgtcaaaaataaggacagacatttgaaagccaaataatgactaggtagaagagactgaaatctcaaactcggggcacagtcacagcccaatagaaaattaataaactagaaggcaggatgagtaaatctgccataatgcagcatagaagaacaaagaaaggaaatacaagagagcataaaaggtacgaaagatgcagaagcgtagcatctggtcacatttccccgaagccaagaaggggagataactctattcaaagaagctgatgagtttcccaaatcgatgaaagacctcaggacccagatttaaaaagcaaaacattccaagcaagatcaaagcaatcttcacctacaccaattgctttgaagttgaagaacatcaaaagacaaaggctctctaaaaggcagccagagagagagggcaggctaagaaagagaaggaaataattaggatgacaggcaactcatgaacaacaataataaaagccagaagactgcggagtaagttcaaagaggagagagaaatgtcatctctaaaatggtgtaacattaggtatcgtttaagatccaggagaaaagcagagaccaagaagaaacacgtcattatgagcctgctctcgctagaggcatagtgaaggaagggctgagtgcaagaaagcatgttaagcaaagagacgtgtgagtgtgtgagttaatgtaaaacctggaatggaacagtcataacgaggagtcaccaaggccaaattaccctcctgaacaaagacacgggggtggagaggagggtgcttagagccacagcgacgtgagattgcggcttcatctgggaggaaagtgagtctcattatcctcaggctcagaaaatcactaaagttcagcacttgaatgagaggtaagagtaattcctatttttagttggggaaaagtattatggtttagatgatcccatgcttggcggcatcaccctcgccaactgagccagcctgctctgcctcggacttggccgggggttgagcccagccgcacagggacagcagttcgctgggctggatcttcaaggctgagtggtcaggggaatttgaaggcacgctggtcaggcttgttctttttgggggcacgcttctgagggtttcctttctgacctacggaagcctttcgccaaggcctgtcttttagatcgtggcttctgacttcagttttgaaagtttgtctgtgccatcttcttgaaaagggcaggagagaaaaaactggactaagaagcataagaaaagctttcaggaaaattctgtagcaacaaataagatggtaatgggtgtgtcagtgatcacaggaaatgtcaatgagccaaacttgtcagttaagagattatacaactaaactaaaataaaatctagctaccttctgtttacaggagacaaatatggagacacagaaacatgcaaatgtttcttaaaaaatgaaaagatataatgaggaaacaaataattaagaagaaagctgatacagctgtattaatatcaaaatagattttaatgggaaacaaaagtaatattgggataaagagtagtacttaatgacttttaaatggttcaattcaccaggaagataatctaaaacttctatttttggttacgtttttaaagtaaaaatatggcagaatgacaatgaaaacataatatccataatcttgggggcatgtcactatacctatttgatgactgacatcagcagtcccaaagttagtaagagaaatcgaaatcccattctccaatcacaatgaaatttagttagaaattggtaactgctaggaaaactttcacacatctaattatttttaaaaaacatttataaacagttcacaaatcaaatatgaaatgctaatgataaaatttacccagaaattatgaatgtcaaaatttgtaggattcagctaaaatggtacccctgcaagaaatccatagctttgaatgccttactagagaggaacgctgaaaatcaagcctgaatattcaacttgggttagaaaaaaacaatagcccaaagaaagcgacactgaagagaagttaatgaaacagtagaaagaacaaagaagctggttctttaggggaaaaaagcttaaaaatggttatgttctgggtaagactcatcgtaaatagagatgaaaggaataaaaggcacatgaacaattttaaacatgcaaaagcaagcctaaccaggaacacagctaagggggagacgcacaccatggacaacgttatgctgacatatctgacaactaaagacaattccatggaaaacttgccaaaattaacgagaaatagtaaatctctataactatcagaaaaaaagaataggtaactcttcaaatagagtagtcactggtaacagcattggaggcaagttctactcaacactcaggaatgcatgagacacgtgcacttgcagaaagatccaataccactaagaggtccagtgtgtctccgtgcagaaacttactgcaattccgctcaaactgtagacaaggttcgtcaacaaacttgaaactgtaacacttataccaacggacaagaccccaagaagagtcatggcaactatgaagaaaataaatgcacacagatgtgcagagcaggtcaggaatggctccagcagactcaagcttcactagaaaacattttctcagctccagcactcctgacactttgtgccagatcgttcttggttgtggggtgtcctgggtagtgtggggtgtttaactgcatccctggcctctgcccactagatgccaatagcacacccttaccaccccaggcacgacaaccaaaatgggtctccagacattgccaaatgtccccttgggggcaaaagtgtccccagctgagaaccaacacttgatgactaagtagactacagtatggttttggctcagggacgggcggcagaagaatggagccgaaaagagaggcttgaagattcctgaatatacagaaactgccaaaggtgtcgtttcattccaacagattagcaaaaatttaaaaatctgatgctaccaagtgccggcgaagatgtaatcagaatgtgcatatgtggctgaggagactataaactggtgcaaatgttttggcaagaaatttgacagcatctagtgaaatgaaagacagccatgtcattgtgaccagtaattcctctcctagttatataccctaaagaaatggtttccaaagtgtggtcccctcagcatcacctggtaacttggttataatgcaaatcctcaggccccacctcacacctgcagtgggcccaggaatccatgtttgaacagccctccaggggactgtgggactgctcaagcctgagaacagctggtcttaaagcaactcttacgtatatgtacagagagagaaattataagaatgtccaaggccgggtgtggtggctcacgcctgtaatcccagcactctgggaggcccaggtgggaggatcactcgggccaaggagttcgagaccagcctgggccacacagtgagaccctgtctctccaaaaaaataaaaaattagcccggcatggtggtgcacacctgtcgtctcagctactcgggagtctgaggtgggagaaccacttgaacccaggagttccagactgcaatgagctatgaccacgccactgcactccagcctgggtgacagtgagactccatcctaaaacaaacaaaagtccatgccggcattgtttttattaaataagaaaactggaaacacccatcaatacatcaatgaataaattacatttattcaatggaaataaatatttaaggatggaaatcaaattagaggtgaatatatcagtatggatgattctcaaaatcatagcacttaggtgcactgttgcctgttaattctatcttttctaactttattgtaattttatcattagccccaaacctcgttctcttcccagggcactgggtccacgctggagcatcccagagctgatcaatccctctggaagcagggacacccctggctccataggattccattttgctgaactactggttcagaaacacaagagcctgacatctatgggaacacagagccagaaaacccaggcacagaccaggacatctccgaggtgatttattaataagtaactgcaggatatcctgacactcagcaataaaatcaaagcaataaaaatgcttttctaagaaaatggcagtcatgtcaggcagaagatcaaacctgggctagggccttacaaaacatctaattatatcctaacggcatggagaggcctgtggggcatgtggtggggcccaggccccctctgctgctcagccctcccggcaccgccttcagtcctcaagcctgagagcctctgtgcttggggggccacctggcctcagcaccatccaagtgggcacatatgtgccttcaccccttcctctgatgattctctggataaaactttccatggccttgtcttaattaagaaatgatgcttctgaaagtgaaattccaactgctatttctgatttagtggaatgagtccaaaacaccatgttcgctgtagagtttttaaaattttgattgattctcctaaattaatactaatccttggagatgaagattcctccctaagaaaggtgctgtggctcatcaggctgggaagtctgagccggctctgcacagacgtgcgatgagatgcccgattcccgtgtgtggctgtctctcagctctagctcaagagaaagctaaaaagcccagggccgccaattttcttcttcaaagctttcaaaaccatatattggcgacatgtgcctgatttttaccttaaaaaaatgagcccagcattttcttgaaacttaatctttgagatactcaaaaccacaaaaatttaaccacttcatatttccttgcaggtatttccagcaggtatctgctagacgcgttctctctgccagcccgctgacttgctagctgtggagcaactgcagtacgtgcccgtccctgtcaccaggggctggccatcaacagaagctgctccttccaagccggccacgcgtctactacttcatcatcctctcgggggtgcatccacggctctccctacaatgggagcttcctgagaggcactttcatttctctgtgcttcctctgggctcaccagcaagtgctaaactgaaggaagatagagttaaattgtttagcaatcagagtttctatgactgtccatcatcactgcatctcttctatgacatgagacattggtgcgatgtgtcattatgttcaaatgtgtgggtcggccagggtgtatctgtatggactgaatgtgtccccataaaatttgtatgttgaagccctaacccccaatatgaggatatttggagctggggcctttgggaggtaattaagttagatgaggtcagatggacatggcccctgtggttgagattagccctaataccaagagatagcagagagctccaccctactgttggccacgtgcacacatagggagaagggggccgtctataagcaaggaagagagccctcatcagaaaccgatcgcgccagcatgctgatcttggatctgaggcctccagaactgagggaaaataaatgtctgctgttgaagtcacccagtccatattgttttgttatggcagctggggtaagacagtgtccttctcggtttctacccttaacaggataaaaatccctggagcaaaccctctccttcctcccaaaggagccatgggaagccactctctacaatttgcagcaaacacggaagcaccagaatcctgcacgtatgctcggaggaaacgcacagaggacaaatgcagggtcgcaggatacaagaatggcaaaggctgactccagagaacgttgttaagcttcaaatctatactgtgcattggaaggtaaacaagcatcatccacacaactaactgactgcattcaccagcacactctgaagtcttcaactactgctattaatctatttttctcaacattattttctttcctcattcttggatttctttttatttatgtatttattttttgagatggagtcttgctctgtcgccaggctggagtgcagtggcgcgatctcagctcactgcaacctctgcctcccgggttcaagtgattctcctgcctcagcctcctgagtagctgggactacaggcacatgtcaccacgcccagctaatttttgtattttcagtagagacgaggtttcaccatgttggccaggatggtctccatctcttgacctcgtgatccacccacttcggcctcccaaagtgctgggattataggcgtatgccactgcgcctggcctcattctcggatttctttaacctctccttggaggggacacagaactggatgacaaggaagaaacactcctgggagatgtggttgggggcaggatagagagaa

SEQ ID NO: 411 - DNA, 5796 bp, Homo sapiens
tttcgggggaaattttccattatgagtgttttactaaagtgaatttttttttgtttgcttcgttcgtctttggctctttttttttccttcccaatttcggatttatttcaaggcgaatctggctttgggggaagaggaagaaaagtcggattacaagatcaaccaccaccaacaacaataaaaaccaccaggatatttttttgcaaatttctgacggctttaaattcatgaagcaattgtccccttttgcaatcagcatttggatctcagaatgagcaaggaaagacccaagaggaatatcattcagaagaaatacgatgacagtgatgggattccgtggtcagaagaacgggtggtacgtaaagtcctttatttgtctctgaaggagttcaagaattcccagaagaggcagcatgcggaaggcattgctgggagcctgaaaactgtgaatgggctccttggtaatgaccagtctaagggattaggaccagcatcagaacagtcagagaatgaaaaggacgatgcatcccaagtgtcctccactagcaacgatgttagttcttcagattttgaagaagggccgtcgaggaaaaggcccaggctgcaagcacaaaggaagtttgctcagtctcagccgaatagtcccagcacaactccagtaaagatagtggagccattgctaccccctccagctactcagatatcagacctctctaaaaggaagcctaagacagaagattttcttacctttctctgccttcgaggttctcctgcgctgcccaacagcatggtgtattttggaagctctcaggatgaggaggaagtcgaggaggaagatgatgagacagaagacgtcaaaacagccaccaacaatgcttcatcttcatgccagtcgacccccaggaaaggaaaaacccacaaacatgttcacaacgggcatgttttcaatggttccagcaggtcaacacgggagaaggaacctgttcaaaaacacaaaagcaaagaggccactcccgcaaaggagaagcacagcgatcaccgggctgacagccgccgggagcaggcttcagctaaccaccccgcagcggccccctccacgggttcctcggccaaggggcttgctgccacccatcaccacccccctctgcatcggtcggctcaggacttacggaaacaggtttctaaggtaaacggagtcactcgaatgtcatctctgggtgcaggtgtaaccagtgccaaaaagatgcgcgaggtcagaccttcaccatccaaaactgtgaagtacactgccacggtgacgaagggggctgtcacatacaccaaagccaagagagaactggtcaaggacaccaaacccaatcaccacaagcccagttccgctgtcaaccacacaatctcagggaaaactgaaagtagcaatgcaaaaacccgcaaacaggtgctatccctcgggggggcgtccaagtccactgggcctgccgtcaatggcctcaaggtcagtggcaggttgaacccaaagtcatgcactaaggaggtgggggggcggcagctgcgggagggcctgcagctgcgggaggggctgcggaactccaagaggagactggaagaggcacaccaggcggagaagccgcagtcgccccccaagaagatgaaaggggcggctggccccgccgaaggccctggcaagaaggccccggccgagagaggtctgctgaacggacacgtgaagaaggaagtgccggagcgcagtctggagaggaatcggccgaagcgggccacggccgggaagagcacgccaggcagacaagcacatggcaaggcggacagcgcctcctgtgaaaatcgttctacctcgcaaccggagtccgtgcacaagccgcaggactcgggcaaggccgagaagggcggcggcaaggccgggtgggcggccatggacgagatccccgtcctcaggccctccgccaaggagttccacgatccgctcatctacatcgagtcggtccgcgctcaggtggagaagttcgggatgtgcagggtgatcccccctccggactggcggcccgagtgcaagctcaacgatgagatgcggtttgtcacgcagattcagcacatccacaagctgggccggcgctggggccccaacgtgcagcggctggcctgcatcaagaagcacctcaaatctcagggcatcaccatggacgagctcccgctcatagggggctgtgagctcgacctggcctgctttttccggctgattaatgagatgggcggcatgcagcaagtgactgacctcaaaaaatggaacaaactagcagacatgctgcgcatccccagaactgcccaggaccggctggccaagctgcaggaggcctactgccagtacctactctcctacgactccctgtccccagaggagcaccggcggctggagaaggaggtgctgatggagaaggagatcctggagaagcgcaaggggccgctggaaggccacacagagaacgaccaccacaagttccaccctctgccccgcttcgagcccaagaatgggctcatccacggcgtggcccccaggaacggcttccgcagcaagctcaaggaggtgggccaggcccagttgaagactggccggcggcgactcttcgctcaggaaaaagaagtggtcaaggaagaggaggaggacaaaggcgtcctcaatgacttccacaagtgcatctataagggaaggtctgtttctctaacaactttttatcgaacagcgaggaatatcatgagcatgtgtttcagcaaggagcctgccccagccgaaatcgagcaagagtactggaggctagtggaagagaaggactgccacgtggcagtgcactgcggcaaggtggacaccaacactcacggcagtggattcccagtaggaaaatcagaacccttttcgaggcatggatggaacctcaccgtcctccccaataacacagggtccatcctgcgtcacctcggtgctgtgcctggagtgactattccctggctaaatattggcatggtcttttctacctcatgctggtctcgagaccaaaatcaccttccatacattgactacttacacactggtgctgactgcatttggtattgcattcctgctgaggaggagaacaagctggaagatgtggtccacaccctgctgcaagccaatggcaccccagggctgcagatgctggaaagcaacgtcatgatctccccggaggtgctgtgcaaagaggggatcaaggtgcacaggaccgtgcagcagagtggccagtttgtcgtctgcttcccgggatcctttgtgtccaaagtgtgctgtgggtacagcgtgtctgaaaccgtgcactttgctaccacccagtggacaagtatgggctttgagaccgccaaggaaatgaagcgtcgccatatagctaagccattctccatggagaagttactctaccagattgcacaagcagaagcaaaaaaagaaaacggtcccactctcagtaccatctcagccctcctggatgagctcagggatacagagctacggcagcgcaggcagctgttcgaggctggcctccactcctccgcacgctatggcagccacgatggcagcagcacggtggcggacgggaagaaaaagcctcgaaagtggctgcagttggagacgtcagagaggaggtgtcagatctgccagcacctgtgctacctgtccatggtggtacaagagaacgaaaacgtcgtgttctgtctggagtgtgctctgcgccacgtggagaaacagaagtcctgccgagggctgaagttgatgtaccgctacgatgaggaacagattatcagtctggtcaatcagatctgcggcaaagtgtctggtaaaaacggcagcattgagaactgtctcagtaaacccacaccaaaaagaggtccccgcaagagagcgacagtggacgtgcccccctcccgtctgtcagcctccagttcatccaaaagtgcttcgagctcatcatgaagatgccaacgcccgtggtcgatttatatatatttttttgtaattattatattctagtttggagtacttgctgtaggattcaagctgtctttgcactagctctaaagaagattttcttctggttttagagaactaattttgttttagcattaaactgttgaacttttttttgtacttagaaaacctagatactgcagtcagattttggaaactgccgtatagtcactgttttaaaaaccccggaggggctgtattaatttgtattgccccatggctgacaaaagccttttttttttgttttgatttttttttttttgtaactgttggggggaaaaaggctttttaacccatttttgaagagggtgaagtttggagaacaaatttaaaaaccatcagtcatgtgagcagattttttagaagggataggagacacacgcgcacacacacacacacacacgaaacttgaaatggctttgctttggctgtcgtcttctgccgtgtgccagatgagcttgtgatctgggaagccggggcacccccgttttgtttctctgggcggttgtggcagctgaaggcggacgttgtttcctaaccataggtggaacgaggagacgggagcgagtgggctctccaccagcacatcactatgcatctgttccaggaaagaagaaaagcgagcgaggaagacggaaaagactgcctgccttggaggggtcacatgagggagacctgtgcctgatttcattaggaaatccattctgttattttttggtgctgttggctactttatcaaaaaacccttcaatagcatccttaagatttaaaaaaaaaaaaaaaaaaaaggaaaaaaaagtgatggaagccgtaagtgcttctttgtcatcgacgtgcaatctttctaacattccatctccatctcaccgcttcttgtttgacaccttcacaagtcagcattaatctttcttttaaaacttgtttcatttatgatcatgtagagagccactaggaggcctgcagttatttttgaatgtgaaaatgcatttgcgttcatcttgtctattttttctcttcatgttgtaacaaaaaggaaaaaagaaaaaaaaatcccatcccttttgtacatatgcctgtaaattgttttaaatacttgagcctttttctcggtggggggtggggaggggggtgagaagacaagatgaagaaaagccttacatttcagtttcttcatcggttggattggatgcttacagggtttttcttgtaacatttataagtgctgcttacatcactgaacaacaacaaaaaaataataatggagtagctgttgcccttctccggttgtgtgtacagtatgtgtggaataaaaaagggaaactgttttcacaagctgttctttgtttcataattggattcatcaatcccgtagctacccatattgcactgagcttgccagtggtgactgccaggaacgtcctatgatccactttgttggttgttgttgcagaagactgaactgttttggaatatttaacaattacagaaacagtcaagtgttttccaatgtggttgtccggtttctatggccttgctgtgtactttccctctttttgacagtaaacttctgcctatggcttacagtttgacatttaatttattagcgctgctctgcacccctcccttgggagggagacttcatgtggtttattgcgagttttttgtttacttttcaggtttgtactacaaggtttaataataaaaacaaagttttttggacatttgtctgt

SEQ ID NO: 412 - protein, 1242 aa, Homo sapiens
MSKERPKRNIIQKKYDDSDGIPWSEERVVRKVLYLSLKEFKNSQKRQHAEGIAGSLKTVNGLLGNDQSKGLGPASEQSENEKDDASQVSSTSNDVSSSDFEEGPSRKRPRLQAQRKFAQSQPNSPSTTPVKIVEPLLPPPATQISDLSKRKPKTEDFLTFLCLRGSPALPNSMVYFGSSQDEEEVEEEDDETEDVKTATNNASSSCQSTPRKGKTHKHVHNGHVFNGSSRSTREKEPVQKHKSKEATPAKEKHSDHRADSRREQASANHPAAAPSTGSSAKGLAATHHHPPLHRSAQDLRKQVSKVNGVTRMSSLGAGVTSAKKMREVRPSPSKTVKYTATVTKGAVTYTKAKRELVKDTKPNHHKPSSAVNHTISGKTESSNAKTRKQVLSLGGASKSTGPAVNGLKVSGRLNPKSCTKEVGGRQLREGLQLREGLRNSKRRLEEAHQAEKPQSPPKKMKGAAGPAEGPGKKAPAERGLLNGHVKKEVPERSLERNRPKRATAGKSTPGRQAHGKADSASCENRSTSQPESVHKPQDSGKAEKGGGKAGWAAMDEIPVLRPSAKEFHDPLIYIESVRAQVEKFGMCRVIPPPDWRPECKLNDEMRFVTQIQHIHKLGRRWGPNVQRLACIKKHLKSQGITMDELPLIGGCELDLACFFRLINEMGGMQQVTDLKKWNKLADMLRIPRTAQDRLAKLQEAYCQYLLSYDSLSPEEHRRLEKEVLMEKEIKRKGPLEGHTENDHHKFHPLPRFEPKNGLIHGVAPRNGFRSKLKEVGQAQLKTGRRRLFAQEKEVVKEEEEDKGVLNDFHKCIYKGRSVSLTTFYRTARNIMSMCFSKEPAPAEIEQEYWRLVEEKDCHVAVHCGKVDTNTHGSGFPVGKSEPFSRHGWNLTVLPNNTGSILRHLGAVPGVTIPWLNIGMVFSTSCWSRDQNHLPYIDYLHTGADCIWYCIPAEEENKLEDVVHTLLQANGTPGLQMLESNVMISPEVLCKEGIKVHRTVQQSGQFVVCFPGSFVSKVCCGYSVSETVHFATTQWTSMGFETAKEMKRRHIAKPFSMEKLLYQIAQAEAKKENGPTLSTISALLDELRDTELRQRRQLFEAGLHSSARYGSHDGSSTVADGKKKPRKWLQLETSRCQICQHLCYLSMVVQENENVVFCLECALRHVEKQKSCRGLKLMYRYDEEQIISLVNQICGKVSGKNGSIENCLSKPTPKRGPRKRATVDVPPSRLSASSSSKSASSSS

SEQ ID NO: 413 - DNA, 70549 bp, Mus musculus
  misc_feature (1)...(70549): n = A,T,C or G
nnnnnnnnnnnnnnnnnnnnnnnnnnnnnnnnnnnnnnnnnnnnnnnnnnnnnnnnnnnnnnnnnnnnnnnnnnnnnnnnnnnnnnnnnnnnnnnnnnnnnnnnnnnnnnnnnnnnnnnnnnnnnnnnnnnnnnnnnnnnnnnnnnnnnnnnnnnnnnnnnnnnnnnnnnnnnnnnnnnnnnnnnnnnnnnnnnnnnnnnnnnnnnnnnnnnnnnnnnnnnacatctgtaactccagttacaggggatcagatgccctcttccaacctccacgtttactaggcgcataagtggggggaatataaatatacaagcaaaacactcgtacacacagaataaatgagccttatttatttatttatttatttatttatttatttatttatttatttaagccagcacttcactgtgctactacttatgcatgctatcatatcatctgcaaatatgagactttgatttctttctttccaacttgtatctccttaatctcctcagtcgtcttattgttctaactaaaacttcaagtattatattgagtagctatgaagagaatataaaaccttgttctgtctctggattttaatggatttctttgatttctctccatttaatttgaggttgactataggcttgctatcaattgcctttattatgtttatgtatatcctttgtatccctaatatctctagacctttatcatgaaggggtgttggattttgttaaaggtgatttttgttttttgttttttgttttggtttggtttggttcttttgcttctaatgagatgatcctgggttttttttcctttcaatttgtctatattgtagattacagtgatggatttttgtatattgaaccatccctgcattttgggatgaagaccacttgatcatggtggatgttttgatatgtttttaaacttggtttatgagtattttattgagtatttttgcatcaatgttcatgaatggaattggtctgtaattctttttctttgttgagtctttgtgtggtttcagtttcagggtaactgtggcctcataaaatttgacaatgttccattggtttctattttgtggaataatttaaggagtgttggtattagccttctttgaaagtttggtggaattctgagctaaaaccatctatcactgggatttttttttcttggttgtgagattttttaatgtcttcttctgtttccttgggagttataggtctatttaaattgtttgtctggttttgattttgataagtggtacctactgaggaaattattcatttcttttagatttttccaatttggtgcagtataggtttttaaagtatgtctttgtgcttttctgaatttcctcagtgtctgttattatatctcctttttgtttctgacataaattcacacatctatggccacctgatcttttatgaagaagccaaaaatatacagtgagaaacaagaaagcatcttcaacaagttgagctggtcaaattggttttctacatgtggaagaatgcaaatagatccatatttatcaacctgaagaaagttcaagtggatcaaagatctcagcataaaaccagacacactgaacctgataggagagaaagtgggaaagacccttgaatacattggcacaggagacaactttttgaacagaacattattagtgcacatgctaagataaacaatcaataaatggtacctcatggaactagcaagcttctgtagcaaagggcacggtcaatcagacagagcaggagcctacagagatctctaccaactccacatctggtagatattcaatatccaaaatatataatgaactcaagaaactagaaattaaaaaaccaaataatccaactttaaaaatggggtacagatctaaacagaaacttctcaatagaggaatctcaaatgcctgagaaacacttaaagaaatgttcaacatccttagccatcacggaaatacaaatcaaaatgactttaagatctcatcttacatctgtcagaatggccaagatcagtaacacaatggtagctcatgctagtggatcaagggaacactcctacattgctggtgtgtatgcacatttttacagtcactatggaaatcaatatggtggttcctcagaaaagggcatatgcccaatggatgctgcattctaccacaacacttgctgaaatatgttcattgtggctttatttataatacccagaatctggaaacaatctagatgtccctcaactgaagaatatataaagaaattgtggtacatttacacagtggagaattactttatggattaaaaaaaatgactgtttcgggaaatattaaaaaaaaaaaaaagcggcacgttcctgctcttgtgccagcaactctctgccctgtggggctggctgaccatgcactggcgggcaatggccaacctgtcgttatctcgtgaagactctctggcctggagctcctgaaatgtccccacccagctctctaggttcccactggtgggtcaataccacaccagccccatgctccaaaacgcccatgacctttgtggtgcacctcaggcaaacccatgctttgccaccacacctttctctcttgaacccggacgagccaccaggtaaagggaaatgcaacccaaacttagttcagaaataatggtaactcaattgctgggcacaacaactaaaatcctaccttgaagccttattaaatctaaactctccagtgaggaagcctgacggatccaccattgaagccaggtgacactcgttgctacatctggtcttcacgctatccccatctcaaaggaccccactctctcctgcttcctctcttcctccatccaacctggaagtcccacctactcacccagtgattggctcctttattcattagggaattggttcacaagaagtcacctgagtatgactcactccttgtccacaacccctcccaggagagtggagttagcattgacctacaaacagcaccaggcctattcataacaaatgacatcatgaaatttgcaggcaaatggatgcaattagaaaaaaaaatcatcctgagtgaggaaaaccagacccagaaagacaaatatggtatatgttcacttatatgtgaatattagctgttaagtaaatgataatcatggaacaatccacagactctgagagattaggtaaggaatgggtttgggaggaagcatggatatacctaggagagggaaatagaatagaatctaagggtggcctgtgcgggaaggtgggaataggattggaaggatcaggtgggcaggagtgatgggggtagggggtgtagggagaaatagctggaatggggtggcatttggaaagtggagtggagacctcctggaatctataaagatggccctagtgaagactcctcgtaagggaggatatggactctgaacatctttagcagccaggcaaggccttccattgatggttctaggctacatttggttgagttgttggctgaagaggtcctgtgaagacccaaaacaaccgagactgattctaggacagatagccatcctctaaaactgacagtgagtccccactgctgaggacaacatccacacagctcactgaacatagaaaggtccagttggggaggacttggagtcttctgtcactatgttctagtctctgagagctccggaaagagaaacctggacaccaacccagccgcaaaaccctccaccttcaatctgttctaactgtatgatgtcacagaaattatggaagtggccaaccaatgtttggtttaatttgaggcccagtccctgagagggaacccatgtcctatactgcctggatggcaggaggaagagactggatagctcagagacttaaggtagaagaaccaatcacaactggaaagagtcaatgaaatgattcctaatgatattctgctatactcataggtcggtgctctgtccagttgtcaagaggcctccactggcagcagatgggagtgggtaaagagactcacagccccacattatacaaagaaagtgtgtagattggaggtctccattgggtctctcccctcagagatcggggaaccatgtggaagcaggggagaaaagatggtaggagtcaaaggggatgcaggacaccaggagaacatgacccactgagtcaaccaagcagggctcacacaggctcacagaggatgaatcagcaagcatggggtatgcatgggtatacaccaggtcttctacatgaatatatgctatggctgttagcttggtgttcttgtgagtctcctcacagtgggagtgagtgtgtctttgactcttttgccagctcttgggacttttcctcctatttggttgtttatctagccttgatatgatggcttatgtcttgtattattgtatcttgttttgtcctgtctggctgtcatctcttggagacctgcttctcttttctgaagagggaacaggggaaatggatctgggttagaggggaggtggcaaggagctaggaggactggaagcagggggtggaggtggggtgggctgttactgaggttggataagcgaagcatgtattttcaatttttaaaagttcaaaaataaacttgtattggaggactgtgacagcaagtaattgtgatgagtaactgaagaatctggtacacttccggagtgctacaagagagaaacacggtaaggatggagagagacaagggaagaagcagctgctgggtcagaccttgctctctcacagatagctcacttctggcttgatcccaagccccagcctcagtactcaggaggctggaggcaggaaaactgctgggagtttgaggccctcctgggctaccacagtgagtcccaggccagcctgagctagagtgtgaccctgtctcaagacaaacaaacaataaatgggcttagagtgtagctaggtgataagaatgctggcctgcctgacttctgcacctcccagcacaacaaaggagaggagaggatggggaagaaagagtaaatggggttcagagggggctgcgatggaacatgacctttgagcagaaataaaaaagacaaagaggatatgacatacatatccaaaggaagattgaaacagcagagaaagatgggaaattgtagaacatgagaaagaaacatcttacttgtcagctgaaagtcagtaactgtaatgcaactcacaacaacaacaacaacaacaacaaaatagttctgaacaccagagagccacttaaggtcaaaatccataagacttttgagtttagctgtttcctttcttctataagcctgcactcttctttgaacctctcaagcaagattataatccacattaacagtcaaatccctttttaaaactttcttttcttttgagataggatcttgatataaagtcctgcatatcctgatacttgctatatagaccaaacagtcctgaacttgtggtaatcctcctgcctcaagcactggaattacactttctctccccctcccccttcctcctcccccccccccccgggtgtatgtgtgtgtgtgtgtgtgtgtgtgtgtacccaggatgtcctcaagctcacagaattctcctgcctcagctttctgactatataggaatgcaccatgaaacctggcttaacacatcttaatctctctgtgaccaacttggaataaaactcttttgacctttttacctgctttcatcttatcaacttgtaaagaaaagcaaaagaaggcaggaaccaaagatccaatacatgtcaagttttaccttcaggaaaaatagtaaatgtgtgtctgaaggtaaacaaagttgtgtgcacactttaagaacctgtgttcacccttagaagcaacaagaacttaagacaagcttaactctctggaagctactgactgtggcaagccagccaagccaggctgattggcagctggcaccaagttgcagcctagagaagtggtaagaagtcactggactttggacatgtttatctttctttcttttctcaggagtatttaaagaaagagtcaaaataacttactaacaaagtggacaaagaaaagcattgagagaaagagaaaaacacttagctgataaaactatgaggacaattttactttacagacttctgatttctccgacctacagaacaaaggatagagtttgttacaaatgtaacctggtaacaacttctatcccctacagaagatacattgtaacatgaagagcagtgtctcgagtctgcaacatctattgcctcctgtccccatgtttgtgctccaggttactgaagcaatgccacagacattttaagaagctgtcttcctcttaaggacttccaagcaaatccaaagcaaacgtttcaactgcaatagaattttcatgaccaatataaatctccaatatattctgacaggtttattttgcagtcagtagtttttttattagtactaggtcctcagtatgattttttttcagtcctggagagggaatccaaagcattcttccaaatgagctgcatcctcaaatgaataatatttcaaacatttcttatttttattatgtgtgtgcatgtgtgtgtgtgagtacagttgccctaagtagccagaagcatttgtatcctcctggagctggagtgacaggtggttctaagcaacctaaaatggatgactagaactgaacttgagtcttctgcaagagcagccactgctcttaaccactgagtcacttctacagcccctgaagatgcatatctctctctatttgggatttatttttaatgtgtatgagtgttttgctaacatattgtctatacacatgtgtatctgttgccccatagaggtcagaagagggccatggaacccctggaactgaaattatgatcagtagtgaactagtatgttggggcaagagtaataaattctcaaaaacaactgagccatatctccagcactcaacatgaaccttaagagcaactatttaaaataggaaaagactacggatatatattgaagagaatgcatataaaatattctaaatccttagaacagtgtgtgctgtgtacttcctctagggttctaggaaccaaggacttacctaagccaggacttcagagattactcacctgggtgtggtgacgcggctttggcccatcataaatataatgatgcatcgtcagctccctttggactcgatgaaatgccactgtctgcctggcaaacagattattagtttggctccgatgaattttcagaacaaaagacatctacataagaggctatcacaaatgttttaagagtatgtttcaagtcacacagagctgctaagaacacatgcttcccgctggtgaaggtttggatttcaatcaggtctccttaagggccaagctttgccattggtttttcccctagagtactttctaatgtaccttcgtcctttctgaagggtgtgtgtgtgtccttgtgtgtgtgtgtgtctgtgtgtgggcatgcaggtgctggtggagtccactcgtgtcagatcccctaggagaccagttatagacagctgtgagcaaccaccttgggtgatgggaagtgaaatttgctcctctgtaaaagtagcaaatcttctcacccattccctcagccccctcattctcttaatacgtctacattgcttggtggtcagagtctgatacatggaacttttactgtcagtgacaggaactctcaagttatattcagaacagctactagctgtgggaccctagagaaagatggctttctgggaaggcttgtctggcctcagtgggagaggatgtgccttatgataccagggttgggcaatgaagtgggggggggacaccctctcagaggtgaaaggaggggtcctggggaaaggaagggggaggggggaaccaggatgcagcatttggaatgtaaatacttttttttttttccgagacagggtttctctgtgtagccctggctgtcttggaactcactctgtagaccaggctagccttgaactcagaaatccccaaacccacacagcaagaggaaactgacaaaacaagttggttgtagaatatcaaccatttagctatgtctcttttgctttttaaatttcaattgtattcctttcttcctgaactagtaggattgagttagtatttatttacagttttaaagacagtttcttggaatagcaaaggctgtatgcattcttcactttaagactgttggctaaagaacccaatggatttaaatttatactttgtagaggtagaaatgaaaactgccttattttttccagcacttctattcattagttgcttgaggctttcaaggcatgtaggacactttagataacaatgaatgttcaattagaaaaaaaaaaagcaactctgtgttgtttgctaagtttttgttttttgtttttttgagacagggtttctctgtgtagacgtagctgtcctggaactcactctgtagaccaggctggcctcgaactcagaaatctgcctccctccaagtgggattaaaggcatgtgccaccactctccggctgtttgctagttcttaaagaaaaaaaaaagttgaatctctttctacccccaggtcgagcttaatccagaggtttaggccgctgaacttccttcaaggtcgttcacaaggccctcactgaaacttggagccactcggaattataaaaagacccagcttcccgagcagccacagaggggcgtcgggggaacccgaaagcactgggcgacggatctcgcaggtagctagggagcaaccccggacctctgcgcccgcacccgcggcgcgcccccggcgctgggaggaacctgggcggcgcgcgcttccggtgcgcgcttccggccagccgcggagcgcggggcggggacaccgcagtcttccaatcgcgcacaatgagacggcgctgagcgccggaagtggggctgaaggaaaacacggtgaggagccgggcccggacaggaagcggcgggggaccgcagcggcgctggtgagtgctccggggcgccgtctcgtcgcgtccctccgggactcgcctccgggctgggcccgtgggttccccccgcccccagaagcgtatctgcccggccccgaggtacgttggcgccgtccttctccggccgcctcggcccggctgtgcgcccggagccctcgggttcgagtccgcgtcttcactttgtgtcggggctccggccctggtccggggaaccccggaaccctgtcaatggccgggcgcttcctgcttcctattccccacggcggcttcgtggccagtagcgcggaaccgcctcctccttcgcctggggactccgctggtggaaactgaggcacacaggggtggggcagccgaatggggaaggaaaaggagtgtcatcctgcggaggattgtggttggtgacgaaactggacttgtctggggctggggactgagaagtcgggtaagtcagctggcgttgtcccttggtcggaagcctggacccttagagcggtaccttagtgggaagtgctgtcccttcgcccagcggtcgcgccgggttgaaaagcgaagcttagagtgggggctgatcgaaactgaaatctgctcacatagtttcggctactttgatacctaaaagtaattgccaactttaaaaaaaagaaatagatttgggagttttgtaacagtgttgacttaggatgtttactttgaagagaggtgctttcgttacatagaagttacttctttagtttctgagactatagaagtgtcttcagatttagtctttgtattaaataaggaccagtttttatgaacactgtaacttctggaatgcattaattattaggaatgtggtaacaatttaatttttaaatgggggaagataaaggcttcagggcacccgtgtgttactttgagtatttggtatgatattattttacaattttgttttgttcccccctcccccaatgccttctttcaggtacaaagtaagaaagttgaagtcaaagaccatgggagatacagcaaaaccttactttgtgaagcgcactaaagaccgtggaattattgatgatgatgatttcagaaggggccatccccaacaagattatttaataatggatgattatgctaaaggccatagcagtaaaatggaaaagggccttccaaaaaagaagatatcacccgggaactatgggaacacccccaggaaaggactgtatggggtttccagcaatccatatgcatttaaaaacccaatttacagtcagcctgcttggatgaatgataaccacaaagatcaaaataaaaaatggctatctgatgaactcgctggtaatgcagacagctggagagagttcaagcccggacctaggattcctgtcataagccgctcaaggaaggaatcctttcaggaaagtgacgatgcctacaggtggcaggaggggagaggctgcagagctgtgagaaggctgtttcagaaagacctcagcagcctagaagccatgtcagaaatggaagcaggaagtcctggtatgcctcaagtctctagactgtgtgtctgtgctattttcttcatccaaataagtgttgttcttttcagtcatgagccctttaatgtgagtgtgttagtgtttgcagtataattgcgcagcctcaacatatttcatgcattggaccatcacaagctccaaggcaggtgcagtactgtcccctaaaaactaagcagaaaagccaggctcattttactttagtaaacaccttatgggagaggaggagggtggccacttaacctcagagatcatactctaatttccatagtcggcattatttttgtgtacatgattttaattttaaaataggttcaacatgcacatgacagtataaaactgaaaatatttactgttaagacagagtataggctgtgtatattacaaagagggagggaggcaggagggatggagagaagtagtgacagggaaagaggaagttgtgggggaaaaaagaaaccaagtttccgtttaaccaaactaactggcacaggaccccgagtagttggaatacaagcttgacaacaaaatttgggaaatagaaatttagagaatcgtaatgcagagaaaagcagtgctgttccctttcagaagaatcaaaatctgctgctgcttcatgtagtcagggctagccttaactagattcacttgcttggacctcccagtgctaaaacttcatttctaatacattttttaatattgatacaaagtgattgtatttttccaaaatgtgcacatagatgttgtaataacaattatttgaaaaaaacaggaaaaagttatttctatctagtcagtatatttgctgaagtgaaataaagtcgtgagttggatggaaagcatgaaaactgtttatagtatgaaattagacttggaaaaattgcccccttttggagacagtgtctcactgtgtggtgccctggtgtggaatttgctctgtagaccagactggcttcacagtgatccttaatgctttttcttctgaattaaggtttaaaaggaccctgtctcaaaagaaaataaataaaataaaatgaaccgtagctttacaaatctttgagctcggcagactagaaaggctgttgtgtgggattctggggtgatgtggagccacatttttgtgagttgggcagctgcagtttggagaggatgcaattgtccagacttatttatgcagtgctggatgggagagtgggacagaaatcgaaactgaaattggggatgcatcctgtcaccctggccattacctcagtctgcaggacctggcatcctgacaagggaacagtgttcattggtggtttctgggctttggatttctctattacttcttaacgttttatgcagaccttaagtgtttctattatggcattcatgtaggtgtggacattgttacctatatttgtcttatggaaataaaaaattaagatatgtgtgtgttacatgcctgcaacccagaaagaactagggaggttaaggcgggagggtggaaggtttgagggcagcctagactacctagcaagtcattcaggaggtggagcaggagggtcaggagagctccctagtgagctctcagccagtctggattttgtgaataaaacaaaacaaaaattaaaaaaaagaaagggggaaggggggtactgacctaactaagtggctggggtactttaaatggtacttttaagataaggtgtaagccaggctgagaggtacaccgttagtcccagagtgcaagaggcagagaccgacagacagacttgtggatttgaggccaacctggtctacttagagatttccaggctaaccagggctacttaatgagaccttgtctaaaatcaccactactagtataataatgaattatagatcaatgttttacagctagaagtattaaaggaaccagttgtagagcaaaaacctcttctacatgttcttcctcagttttaggaatgactggaaaggtgtctcagcaggaagtacattggctctgtgtttacacttaatatttctgtatagagcagagtttcaggttgccaaatgaagaaattgatagtatcccttgaaaatcattataaaggaaaccttaagattttgtataagattgcatacaatagagaggagtttaatttgatgtgtaaatttgcagtgcgtggaaatggctctaagaaaaatcattaaagggaataaaatatcttaattttttccccttgggacagggtctcattgtgtagctctggtgggcctcaaattctgcatgtcgatgaggtcacctcacaccctgagtttcctctgcttctgcctctcttgttctgggagtaaagggtgcattaccctggcctgcgataataagtatcactcaaactgagaagatgtgataaaattatattaaagttgatttttaaagcttttaaaagacggttttgtttttctttttttcattttggcattattgtccctccctcaaccctcaaatgtccaaggttgtaggtgtaaagtcttgggggcaatgtcattaataggctggcaggaaatgtccattcaaatgtcctctgtgactggagtgatgttctatttgcaaataagatgtgaggacttggaacactcacagctgagggcatgatagcccatgtcagtagttaggggaccttcttgggctgttttgctgtccaagagctgctccagtgagcttttttcccaacttgtccctgcaggccttgacagccctgcctttccttaagtgtgccacagggggctgttcagggatttctcctcactttgcatcctggacagaacaaggctgtggtacctgccatatcttaaactgcattttacatctttattttgccttggccttgtacccttagacaagttactttgttctccgagagtggggtcaacctcagcattgatgtgggaagtgctacagggatcggaggaggtggggcacataaaagcattgcctttcttctgctatggaatcgggtggcagtgcttcctgtcacttcctgtcactcagcactttgtccagcactccctccccaaaagtcacagtgctctccatcctcttacctcattgccccagtgctgtggcaatagtgctgtactagtcacagcagttgattgctagtgtttgaagggggtttcaacaagctgaggatcggtcttagtgccagtgtgcatgatgggaacagtctgccatttagctaagttctccgtctggcaatgcagtctttatttttgtaagaatttatttacttattacctatctgtttattgtttttacgtgtacgtacatatgtacctgcatggatgcgtctgtgcaccatctgtgtgtagaagcctatggtggccagaagagaacatcaaatctcctggaactcaagtttacagatggttgtgagccttcttacctgctgagccatctctctagcccccacagtagcactctgtagaacttggagtcctgtacttccttttctacccagaattctttcctgcaattagccaatacattgcagttgctaagtcacgagtccctccgaaagctggagagagattgccttatgcaagacttcttcaaatccttaatttatggaaagccaatgaagacagtcccatttgtgtttaataagaattgttaaaatgttttactgctttgatttttgtgggcatgtgcatgtgtgggtgcctgcataacagaactcaggtcctctgcaggagctccttccactgagccatctcttcatctccttcatcagaattttagcttggaaataaatatcatttaagcccagcattacaattagcttccagtgtctttagaacccaactggagtgtcaaggctgctcaccacggtttttaaagtttagtctcaaaattgttatatgcttcatcgtttgaaacgttgttagcttgagtttattcagtcgttctgcagattgtagaactaatggggttcatgatacatttatttagggtagactctggctttaactgccagttgtgtttcctgtgctcagcctgtcactgatatgaggcaaaagctaaagtggggagctgtgtgtgctcagtaagtaaactttagcttgaagattttcctcttactgaaggaacctgaatttgtagctgaatgatttttttgaaccatataagaaaatgatcacagtttccaagttctctgggtacatacaatattgtccatttttcctgactcgggttctttaaaagaaaataaaaaattagatatgaatattttctattaaaacacaggtgtgtttacagtttggttggcagtatcatgtatgccccatatacatcaagtggcttagaagtacagttacaagtacagcctttagtgagagccttctgctgttgcatgaatgctcagcagtatagtatgggaggagataaaaatcaaatcctgtggaaaataggatcctttttaattgcagtggtttctgtggattggtgaatggagagctgtctccctctttgttcagtgttcaggtatcacttactatcattgaaataagttcacatgggcttggggtagagctcagggcctagcactcgccagcatggatgaggacctgggttcaatacctagtactatgcctaagtaaatggatgtataggaagaaagttataatacttcttactgagagcaatagttttcaacatcacccgtattgtcccctaacttaagaaaacaagaaacagcggtccagacctcgtaagccacggaggactagaacggaggacagtgagcaggatggagatctggacggtcctgtcatcgacgagtctgtcctttcaaccaaggagctgttgggcctccagcaggctgaggaacggctcaagagagactgcatcgacaggctgaaaagggtaacgtctttatggatatacttactacaccatctctaaacattactctacaccaagttagtaactgcagtatgtgcctcagggttaggctttaccatgtgtaaatccatatgccaagggataattagcatgacttaaactcaagagttactgccattgtatttaaataaaaatgactgtcaagcttggaagtaacagagaaactgattctggctgattttctctgaatgtttagagatctatctttctgtcaatcttttcaaactgtagcgaccacgaaactgcccgacagcaaagtatacctgcaaactgtgcgatgctttgattgactccattccgtttgctcataagcacatcaaggagaagaggcacaagaagaaccttaaggtgagtgggtctctggtgattgaaacaagtgaatgctttccgttaaaacacaggcatatttatggtttggttgaaaatgttatatatgtaccttatacctcaagtgtgttaggactgcagttgtgtctgccttcactgggagatttctgctgtttgcatgagtgcttagcggtgtaggtttttgtggttttccttaaatccattgtagaatgcttgtacactagtcagatgtgtttgtacacttgtgaatttccccaagtccagagttaggatgtaagaagccattggtgggaccttggtgttcttctgcagataagaaggcacctaatatctgtggttgctgtccatgttttctctgtattcctgcctgctccttagtatccatattaagtacatagagtgtgtgtgtgtatgtttgatagaatgaagaccacaatgtctaagataaagaaggctacaaagattcctgaaaattctgtagggtcctgtctcagtgagaagaacagctacacctgagtgactttaatcttaccattgatcttacaaggaaaagcaggaggaagaattgctcaccacactgcccccgccagcgccctcccagatacatgcagttggcagcgccattgacagagtggtgcaggagtttggtttacacagtgaaaacttggatcagagactagaaattaagcgtgtcatggaaagtgtgttccggcacaagctaccaggtatgttctagattcctttatctatttagcatctaaagagcctcatagttcagattgcttttacctaataagcattaacttatggcctggccacagggtgctgcctgtaaggcttatggagactgagggagaggcatccccgactgggattcctattgggaaccccaacagcaagaaccgtttttagtggaacttactgcttataataagttagagctatgtgtgcattctgacatcagaaagaaatgcttgtattagcttatggctatactgtaggttttaaacactctgtccttttcaggatacattatctgaattttaaaaattatgacagttttctacacaaaatatgagcttgatcacataggagtacttagtatgctccacagctcatggcaggagtggctggaggccagagaaaagcttaggaaatggctgtgcagtccttgtctgagtgcctgctctcagtgtgtcctgcttctgggtgggcacgcctttgacttttgagtatgccttcagtagcagtgtttacttcttatagctttggagagatttcactcctgtgactcccacctgcttacttctctccagactgttctcttaggctttatggatcctcctgtagccgactgggcttcagagactctgacgtgaacattgatgttcagtttccagctgtcgtaagtacaaaatgatctgctggacttcacactcacgaagaattctctcattgtttagcattcagacattttatatttatgtgcttgtgtgagctcatatgcccttgccccctgcccccgtgtgtatgtgtgtgtgcacgggcgtgccagatgtgtttaggtgcccgtaaaggccagcgagggtatcagatctcctggagcttgtgagccacctatgtgggtgctgagatctgaactctgggagagcaagtgctcttgactttttagcccatctttacttaagctgtttttattgagttcatgggcacatgtgtacagtttcagtcacctggcagactgcctgatcataggctatccaagcagttggtgatctggctccttatcagaaacacacagctcttagtgtccttatctattccgtccctctgaaaacggacctgatagccaccttcttagcagagtggcagaggccctcagggaggtcagggcaaggcttctagattggagaatgctcagaatttaatggctggtcagcaaacacactttaccatgttagcccctcaggatcacatggactgtgaggaagccaagcccttcgctgccgggttgtggctgtgctcctttctgagaacagcagctctgtccagctggggctgctcaatagaagcctgctgtggttcccactggcacaggcttttcaagggagtgtgcttgaggcttgtggtggctggctggtggtagcgagcggaagtctgttgaatgtgacttggaggtgaatgcattttgatagttaaagtatgacagtgacagttcttcctgagaattttcattttatgttttctgtcgtcagcttcagaattttaattttttactttataaattttcatgtttattttgctacagatcttccctacttgtaatgttggtttgctaaggatgtgaatcctgggaggattctatgtgtctatgaattcagaaagtttaaattcttttcataaaatcagccttcctataacaggaaaggaaggcaaatgttcaaatagtgtatttgtaatatttatactataatatatagtataatatttatatgttatatattatattgtatattatataatatgtaatatatttatatataaataatatatctataatgttgcaaataatatttataaatattcatgatctgtaaatctaattagctcccaagttccctttttatatcacaataataataataataataataattgatgggccagagagacagctcaggtgcttgcccccaaatctgatgacttgaattcaatccctgagtgtcacaaactgtcctctggccatatgtatgcctccccacatacacataatgaataaatgtaattaaagtaataacacttttcaaaaaaacaaccacacctaacttcaaatgatggaacacatctataagtccagtactagagagctggaggcaggaatagcagaatttcaaggctatcgtcagacaaagcacacgtcagtgaaacataaagtagggatctgtccacacaggagcaagggtgtgcgcacgcacacatacaccaggtatagaagcctacgttttggtgaaatatgattcccaacaacatagataagtcagaactttaaagccagaagaaacttagattagccctttacccactctgcttctatgctcagtttagttatttgttataagtttagattctgaggccaggcatggtagtgcatgcctctgatcctagaggtagactagtttgagaccagcctagtctatataatgaagttccaggtcagccagggctacatagtgagatcctgtctttgaaacaacaaacagattctgaggttggattccttgatgttcttgttcatagcctctccttccttcctgtgcttaattctgtagctccctggttaggtaacccacggactttactgtttcttaaagaatttaattttagagtgtgtgtatgtgtgtgtgtgttcatgtgggtatctgcacatgggtgcaggtgtgccttcagaggccagagtctccccagaagctggtatgacaagtgattgttaaatgtcccatgtgggtgctgggaactaagctcgtgtcctctgggaaacagtatgtgttcttacatttccagctccaatcttaatattattttaagtttcaaattttgatgtgatttaccagagtaaatttttagcagttattttgatctggtgtcattcatgcagcaaattttcactaagcccctgctgtatataggctctattctaggtgataaaggacaagataggcctggctctctggtggcacttataagctagtaattatattgtaagctattaactatagtgagcttctcagagaaacacagctgagtgacaagctctgagcatagacttagcttcctcaaagagggcacacacatttccacagaactctgcttaggatgtggagacctggaccagttagttgtacagattcttgaaggcaatgtcgtaagaatttgactttgtcctaacaagagtaagaattttaaggacccttgatttgggagggtgactcctacctatagtcaaagcatttgggaggcagtggtaggaggattactgtgagtttgatgccagcctcagctatagagccagaccctatatccaaaaaccaaaaggctagggggatggttcagcagttatctgtgcttgttccttttccagagcatgttagtttggctccgggctctcacagcacatggcttacaacctcctgtaactcctgttctggggttttgacaccctcttctgatctcttctgtgactcacacacacaaataaaaataaatctataaataaaacacttcaataacaaaagaaacatttaagaatccattatataattttaaagggttttggtccaatgtggaacggagttttgaaaagagagatgttgattttagaaccatgtagctttttgttgctacagtgtttcagagtgagaggaacattgttgcactagaacaccttccaaccaccattaggacagctaaggggtcactacctcaagagtaagttgtacacagttactttgtctcaagtcctttgaccgggcatgcatcctcacgtgttctttgttggccttacacaggctagtgactactgtcttcacctgtagcaatgtgcatttcttatttggaaagcaatttggggaacttcagactgtattataaccagaaaaacaaaattgcttagggattatttcatgtattcattcatttatttcctagatgtctcagccagatgtcctcttacttgttcaagaatgtttaaagaacagtggtaaggccaaattcttccacattttgcttctgattttgtcttctgtctataaattttaatatatcttactaccaaactgaaagtagaaaattcacttataaaaattacttatgggtaaaatccaaagcaaaaataaaagtaagtgcccttgaattatttactagagtccagctaacactcccaggaacaccagtcggacagctgttagtttggcagcatgtaggattaatgagccctggactgtgagtgaaaaatgcaaaatatgtgatatttattcttaggagtacattcatagtaatctgctctattgatggtttaaatcaatgttacacatgttaaataggtgggccctgccctgattaatgacctcaaagacggttgctcccgagtgggcccatcagctgtcttgtacaatacagtatcccttggggcttattgccttttctcagtagctaggcctcaaaccgctcctttccttgagttaggcagtcttagtctttctctttgggtatgagaaacacttaaacattcatcttgtttcagccaatacatatttgacactatgatttagtagcttttacatccatctgtttttagtctcctgtgcacattcctaattatgttgtccacatagcatttaaatactgcatctgcactgcagtcatttctgatcagacactaactagctctgaaaaatgaggacactgtctgtgatgattgggttcttggacacagtgttctctccttctaagtcacctgagggctgtgtgtggtaatggcctctcagacccacagcagtgcttaggctttcctaggtctgctttacagagaggttttaactaacttgtttgatcatgttttcctctttcctcagactcctttattgatgttgatgctgatttccatgcccgggtccctgtggtggtgtgcagagataagcaaaggtttctgtgtctttaagctactattttatgtgatttatttgggctttttgagataaggtctaattaaccatgataacccagaatggccttgcatttgccatgtaacccaggacgggggtcagcttgtggcagtgtgccactgctgtgctgaggtcacagggataaacaccagcttcttagattgccaaaatcacaaatactttgttaaatccctgtaagagtcttaacttacagaattataggttccttgtctgattaccacttgtacctctccctggccatttgcctatactttcattgtaagaagaaagggaaaatcaagtgctggaagtgtctgcacacatttcagctagactggaagtagccagggggaacagcagcttcccgtaagcgcttcctgtgccgttgttgtttgtaaggttgtggcacctgagatagtactggggaggccccacaggtgcagctcttttcccttggaaagctgttactaccactgagtaggagcttcgtaggctctgctgactcgtcattaagcaaatccctttgacttgggagaaaacattatacccttggtatgagcagagcagacctttgataatttttatccctgtgttctttccaaaatatttttaatatttgaaaacatacagtcctagttctgacaaacaagtctattcaaaaatagttgcctttaaaaaaaaagttcagtttcagggctggagaagagcactggctgctcttgcagaggtgctcggtttgattcccagcacccacttagtgcctcacaaccacccgggcctccagttccagggatcaggtagcctcttctgaccttctaggggtctatgcatgcacatggtacacagcatactaacattcaggcgaaacagtcacacacaaaataagtaaatcttgtttaaaatccgacatcttaggtgaagctactcgtgaacttaaggtctttccgtctaggttttattattgaaatgaactttctgatgtagaagactgatccctaactaacatgttttctttctttccctcccatcctccccttccccactagcggccttctttgtaaagtaagtgcaggaaacgaaaacgcttggctgaccacaaagcacctaacagctcttggaaaactagagccaaggctggttcctctggtgattgcattcagatactgggcaaaggtaaggttggggcgggggtggtgctgctgcttctgcttctccttttccttctctctccccttccctctcccccagcctccccctccccacccccttcctcttcctcctcctccttgttcttgatttgtgtttgtttgtatttttgttgggtttgttttgctttggcagtgctggctggcctggaactcactacatagatcaggctccagctatcttctgtttttgcctcctgtttgctgagattacagatgtgtgccaccatgccttgaaccagatgtgtatttataggcataaatagagtagatgtcagactattggattagaaactaataaacacagaaaggaaggtcagagtttctatttagtgtaacattattattcagaagataaaatgaactataatgtttattaaaaatcaagtttggactgggcaatgctgttgcatgcctttaatcccagcacttgggaggcagaggcaggtgaatttctgagttccgaggccagcctggtctacaaagtgagttccaggacagccagggctacacagagaaaccctgtcttgaaaacaaaaagaaaaaaagtcaagtttgggtcgaatcttatggaatatgacctaagaagttgtttttgagggtctttgtgggacatggtaatatttgagataagtcttcttataccattttcagtgacaaaggcagagacttcagaaagacaaaaggtattgtcattgtctcacagttccctagtgttctacatacgttgttgttttgcagtgttagagtcccaaatgaagatgatttcacggtgatgcaattgacagctggccaggtattagcacacatccccagcactgaggaggctgagacaagaagctctcaagctccaggacagcctgagttagtgcatagcaagatcctgtctcaaacatagccacagcacggaagcatcagttcaaaacagggcttcctagctaacgctcatactgattcaggcaaagctgtgctagaaggttccagtgctagggtctgggatgaacaggattccctggttttaacctgatgaatcagaaaaaccgtacagaagccagggatatggctcagtggcagagagttttctaggacattgaggttatagttttagtacctagcaaccccctaactaatatcattaatgtgcttttgtttttttgtttttgttttttgttttttgtagctttgtagtattgatcgccccgaagaaggaggcctgccaccatatgtgtttgctctgatggctgttttcttccttcagcaaagaaaagaacctctcttgccagtttatctaggatcatgggtatgacaatttctagttgtatctgatagttactttattaaattccttatgcaaatatctaaacacttaaccaaacctgaagtatttagttattctaccatactttcattactgaaatattagtgtttgattacaatgttatcctatacatggataataatatttttaaagattttacttattttatgaatatgaatgcactgtcactctcttcagagtgacaccggaagagtgcatcagattgcattacagatggttgtgagccaccatgtgactgagttacactgtcgcccatgctgtctcaaacacctgggttgagcacaccatcttgtctgaggcttcagagtttctaggacgacagcattttttatctctggcctcctctatagcctataaaaccaaaagaaacagaatctgatcatagcctgaatcgtgatgtgcagagcatccccgtcactcctttagtgacgtctgggttacatttatgactatcatctttagcaacataacacttgtctaacctgtgggtacaggcctcttaagtcaactatgcaggaggctgaggcaggaggactacagggcaaaactgatctgggctagagtgagttcaaagccaggtattaccctagggacctagtgagatcctgccttgaaaaatagtttgaaaaatgcaaaggtgaggctgaggatgcggttgaatgttgagctcctgcctgacgagcccccgaattcacacactgacagtgagaatggtggtgtaaagatctccacgccagtgcgatggaacaaacccataattttaacactctggaggctgaggcaagattgcctgggatggatggatagagcaaaatcaccttccattaaaaaaaaaaacaaaaaaaaaaaaaagaaaaaaagtgctctaagcaggtacttcatgaaggaggtgttacatcctgctacttgctaacaaaattaattacctgataaagcaagcaaaactgtcattcttttgttttgtcaaagcataaaggatccaaaatcttcacgttgtaaaacagtgtttatagtgtctagaatgcaatttttaaaaattgttcactatataaaagtcaaggttcctggaccaagagctggttcctgggtgagagttggctttggttgctgcagtggcacacctgagagatcaatataaagaaacgtgcttttttgtgtgctcatggtttcattctatattgtcttggctattattcattggccttgaataaccctatgtgtatgtcattgcagtaggaacatttatcataaaagacttttcacctcagagtagccacaagccgagaaagagaggtagggttgtgctgtagagatactctggttgttaaagcttaagcatgaggacccaagtcaagtttaaaaatcactaaactttttaagttctaaaactttttgctgtttgaagaccattgttaaggactgaggattggtcagtgtggtcgagccctttcctggattcacaaaagaagaaaaatcacaaagaccaaaaataaagcactggcttcaagaacactgaaggcatgcatctaaccgagacagtgccacgccctgtcttccatagtgcttttgggagaattgttagggaacgctgacctggagccattctgggtgctaggttagagcaagagaagagcgcagcctgtgatgcactggaatggcagggattagggaggccctgggaaggactgaggagagcatgagctctcacacttcagtaggaatgctgttagccacgtcaccgactcatgaccactgcccatagatgtatgttcaggagcccatcccacagtgtaatatgtttattaacttgttgagttaggtgcgatgagtatgctgtcaacttgacagagtccagacttgcctgggagacaagcctgtaggctgatgtaggctgatgggcttctcttcaggtcaaggtgggtcaagagaaaagctttctttccttccctgttttggtagtttggtttggttttgtgtgtttgtttccagttttgtgaagggtctcaggcatgataggtaagaaagtaccctgctgctaagctcaaccccaagatactgaaaacttactttgtagagtcatcgtgccttttgcaggtcactctgaaaacagactataggtatcaaatctcaaagatgtttggtgagctgtttatatttcttcttactataatgttactcattattgtgtctggccatatgcacatgtatagcacacatgtggaagtcagagaacagctccttggttgcacttagagattggactgaggtcatcgggcctacatcagacagcaagtgctcttgcctgcccactgtctgccatcccctcttacgtcagtgaagtatagatagcgcgtgttgtttctatccctaccaacagttcttttctctttggttttttgagactgggtttctgtatagctctggctatcctggaacttgctctgtagtccaggctagccctgaactcacagaaatctgtctgcctctgcctcccaagtgctgggattaaaggcgtgcactgccactgctaagttcctaccagcatcttaatgctctggttgtcacacaattgtttgtgctttatagtaagatatgtctaattgttttttgttttgttttgtttttttctagattgaagaattctcattaaataaattagggaatttcagccttaaagatgttgagaaagactctgtggtctgggaatacactgacaacagcacaggggacaccagctcagcaaaagaggaggcacccaaagagactgcagcaaagaagggacaggtctgtgcgttcctctctggtcatacactgaccttcccatcggactccagctgtggcgcttacgcattgctccgtctccctgtggctctcttccctgtgcttctgtctacatttgttggaattttgggtctcacttggcttcccaggctcactctggagcttattatgtagcccacggtggtctgagctcgtgcagtcttccagcctcagcctctggaagtcctgggattgtggccatgaactggctctgtcttaagtgtttttgagtatagtgttagttaattgtacaaaggcatgggttgtattacacacagcatttctctgcatgattgtaatgtgctttgaccttgtttagtcctctgttccccttctttggcccacctgtcccctacccctgttccttgtccctgttcctactagaccctttttaactgctgtgccttagtctgcccttccattctgcatatgagacaaaatatgggttgttcatgtctgtgagactaacttattttaatgtggtaatgtttacttgcgtacattttcatgcaagcaccataatttcctctttatgggcaaatacaattccattttatatagagaccatacattcttcatccatgttcctagactgactctttagcatgactggtgtgagtagagtggtaagctgggtgccggtcttctctgtggtgagctgactgttactgggctggggctggttcatgcttgccccagtttacccattaaggagtccacacactgatgcactagctcatgacattccattttcttttctatgcagcctcttgagtaaacaggcaatgaaacaagttgaaaacttgcagtcaccatttacttacatggcttcttctgtaggtagaggcctcttaaagatactgagtagagtccttacatgggcaatgactgccataaatccttctaggactgagattcatggttctaagcccactgcacattaacaggtcatgccccctctggttcctggcttattcatgcctcagatgagactgtggtgaacttcggactcctgaaactggggaagataagggagatgccctgaccctgatgactctacatagcaccattctgttttctgtgtgggttttggttgtgggcagcagcccagcctcttagacagtgtgtgtaaatttgtgtcccagctctgactttgtagctctgtgtccttgggcaggtcacttattctttctaggtcccggcttcctcttggtgcccagcatcattgattcctaagtgtctaacttagtgccaggcatgtgatgagcactctcaaaactagccgctatttactttactagaaaagaatgctctcctctttgaaaagaaaggtcagagccagtggtgtttgaaggttctgaagttccttgctatgatgcattgaagacatttcaatgagagacttaaaagtccttcataagactacaaatgactgtggataaagaggtaaaattcagcaagattcttgggttcccatgtccttggttacagtgtgtgggaccaagaacatgtctattcccctcaggggtctcagcactgcctgcagtccaccacaggactcaggattggcagaatccataggcctgagatttactaattgagtgtcacacctcttattctggtgtggtgttagaagtgtaattgtagataaatttataaactttggatggaaaaatgttttattcattgtgattagagaataatgtgaagaaaaagtcgttgctatgtgtccatttaatactttacttcaaagtgttatttggagtggttaagcaacctctagaacatacttaatgtgagagtggtgctgtgttaattaagctctgctgcctcttcctgctggagccctgtcagctacaaatacaaacgttctcagactttcagttccccctgtagcacttgggagtttagagccgagtgacctctaaagcatcttacaggtgtcacgttgtgtttcagtgatgtttgcttttcttcaaaagatagtacctgagaaaaagggcagagagcaaccacgtctgccagctgctttcccttggttctgatttaatcctcatcactgtcctgtgttataggtgtatcatccctactctgcagataatgatagcgaccattttttgaacactgtctgccaggcactgtgctaagcactttacagacactatctcactcagtcctcccaacagccctatgaggtgggtactgttatccccattttccaggtgaggaatccaagtcttagacaccttatagaccgtgaccaagctcatcacagctagtacctggcagagtgtgagtctgaaactaaactcgtcacacagccgttatcctgcccatgctgctgatcatagagaggagaaactaagttgcagagagcaggaaagagctgtgagctgactgagtcatactgggacctttcccccgctcctgctgtcttaagtcctatgtactttcattatgtcacatctgttattggaacttgtcaaacgtctgtgattgacaaactagtgtcaatttctgatatcagctattatttgactttagaattaagtggcgcttggcaggtttagtgtgttggggcagtgacagtgagtttccttctcctccctgccttagcagtactgggctgtggatatccacacctgaggaggtgccttcagcagcagcaatgcttcagccttctcaggggcctctccacctgctgagacctcacagttagctgtgctgtccggctacatgacacggtcctgtcctctcctgtggtgaaattcctgggataatggctgaatgttagcatgctcgaatcccagggtgcagtgcagtgctgttcacccctgaccaaatagaacttacaattagattatctagatggattgtcaagctcacggttttccagagtcttcatatttttcatataggtttgactgatcttgcacttgtcaggctgagctgctgtatgggttaacctctgtattccttgtcatccataggtgccattgacatttaatataaagcatcagccttcagtgccagtcgggcaactctgggtggaattgctgcggttctatgctttagagtttaatctggctgatttagtgatcagtattcgtgtcaaagaattaatatcacgggaatcaaaggactggcccaaaaagcgtatcgcaattgaaggtaataatgttggataactttgacgtggtgccagtctaacagcccacttctgtcacattctcttccagttcctagcagaggtaggcctggtctgaaggtaaaatagacactggtgcctcttgcatgcggtgcactggggtgagggacagcgggcttacttaccccaaggtaaagggtcttagttaccaagtgactggctacaggcacccgagtccctgctttgtaagttgctctcccagcttccctgtgacctgtgggttcttactccctcttcctaccatccccactcttgtgtttgagattctatcgtctcaggaatcccttttgagctttagttttgcaaagatgaatgaaatactttttcatgtgaaaaatgctgttcttagggttggttgactgcagtagaggaaacagagctattttcaaagcagaaagcagtcatttctgcatagaaaacactttgtagtgaaagctgtcactttgcagagtcagctgtcaggtactggtggccctgttagtgtcattgaatggacgagctcctctcagctttgcaaagtcaggaggttggaaccttctagaaatcttagctctcctcctttaacttaagaacaacagcaaaactcctacatggaaatctcagttttgcttggtttttttttttttcaagttttatgttgcataagatttttttttctttttgcataaattctgtgtgcagtcatggggaaatctcacatttttaaaccctcccctgcagtttctctggctcagctcttctggccaattgcctaacctgctggagttctaggggaggagaaaagattgagagaagtggtgtctcctcctggtgcctccctctcgcccctgaaactcaggccagccacttcagtgatggggcctcccagggcggaagagtggaggtaagcttgccacactgcagggctggcggagcgaggtccagagcgctcacttgctcagccgcaagcctgtctgtcagaagctcctgagttccccacagctcaggagccacactgacaacatctttcctacctccagtcactgagcagctagggaaggggcatcagttccctgagactccgaagcgttgctttcagctcctaactgctgccccactcctacctgggttgtttttgtaaagtgtttaaagcatgtaagatgcatgatccactctactgttggtgttacctgctttatcttggaaaatctagttttaagcatgatgaaacagaaatgtatgaagtggtggctttcttttttctctctctctttttgttgcagacccctattctgttaaaagaaatgtggcaaggaccctgaataaccagcctgtgtttgagtatatactccattgtttgaggacaacatataaatatttcgctcttccacacaaagttacaaaacccaacctcacaaagcctcctagcccagtcacctgtgtttcagacccttacagagaagcaaaaaatggtggcccagaaccccaagcaacaaatattgataaactgggaaatgcagctgtggctcaagatcctggtgttcaaacctcaggtgactgcagagcacagctagttactcttaagaataccactgaggaggtgggaagcccagcaaaggagaagacaggaggtgtgcacatcccagcccaccaggagagctctggctgtgtccaggcagaggtcagttgtgagggtttggaggatgccacagcagagcttccggaaacaggaagtgacaacgaggaagtcagaaggaagaccaagcatcctttgagcactgatgaccaaggtttaagcagcagcaagcacccagaactgcagaactgtggcagcctgtgtggtctgcaggcagacaacactctggagttagtagctgaagagtgtaatagctgtgcctctttggacaacaaggctgaggtcaatgaagagaggatagaaggcgctgaggaactagaagaagcagcagctctgagttgcttttccccttcagtacagagtcgcacatctgcagccatgcactttgatgatgaggaggaggaggaggaagaagaggaggaagaggagcccaggctcagcattaaccttacagaagatgaggagggggttgctaatgagcatcaggtggacagcaggtatgctgggtcaggtgaggaggatgccctctctgaagaagatgacttggcagagcctgctaagggtgaagatacaggagaatgtggagaaaacgtgggtgggactctgctcatagacctaaatagaataacacttaaagaagaaagctttcctgaggaagatttacctggggaccagtctgagttcttctacgaatttagaaaactgaccttcaccaaaggcaaggtaattgttactaatagactctaataactccagtggatagtgtttctagttttctctctgtcacctgtgagcaattggcagtgtgctattgcatggatatgaagtctgaggccaacttgaggaagtcagttttctctttttctttcttttctttctgtgggtcccaggaattgaactgaggtctccaggcttggcaccaagtgccatttaccaactgagctacttgtcagccctgatttcagtttctatgaactggaccagtagcttcccgtttggtgtggtttaacccatttctgttcgtgcgctgtgattcctgtccctcctgatggggatgttcatagacgacagacagttcgcttcccattgccgtccccagagtagcatgtcccatctcaggccctcagagtagctttgttttagcctatatgtgtagatgtgtagatgtgcaaagattcacagtcactcatgttttggttcaccatctccctgcagtcccccacagtagtgtgcagcttgtgtaagcgagaaggtcacctaaagaaggactgtcctgaggacttcaagagggtccagctggagccgttgccacccctgacacccaagttctcaaacatcttagatcaagtctgcgtccagtgttacagtaagtgttctgtgttcacctgatgcgccacagtgggtgacactcaggagtcatcagaggtgctgccagcctcacagttagtactctgaggattgcagacagtgtgttgtgagcataggcacctaccacccctcccccagctcctcctacagccactccctctcctcaccctaaccgactgaatccaggccttgctgcaggtagactcatggatgtgggggccatccactgtcagctccccaccccatcccccatgctagaatagtgacaggcttggtcttgcaggcagcttcagctgctgtgtgagtgcatgagagcagcagtcctcttgtgcctaataccccttggccccaggctctcaggccatagggatgctcccttttctgtgatggtgtctctacctggagggaaagaatactttgaacagcccgcatgcaagctctttagggaacatccatttgaggaagcactggtgctcagagaagtttcatttctatttctgaagaggcctgctgctgcttagcctggatgtgctcagggcccctccctgactggtacttaagctccctgccccccaggaggctccctccctgaagctgccatcaaaattgcctcctggatcctgggattacaggcaggcaccatcatgtccaacctaatccctcctaccctctcttcctactagggtctccctctgttactgaatttttgggtccaaacaacctgcctctgcctcagcctcccaaatattcaggacatatactactgtgtttagctactattgacatttttcgttttattaagctttttcagatgttaaggaagaaaactgggcttcccattaaaaacagaataacccacagacacctctgctccctttctagaggatcctgacagccagggctagagcccttgccccagttggtttccatttcaagagcagttcttggggttagactcatttgaggcagggtgttctgtgtgtccctggctggcttggacctcacagtgatgccctcctctgcctcccagtgctgggattacacctgtgttccacaggattgggacaggtgctatttgtttttattgctagcactgtctgttgagaaggataaaaatctggtttttgaagcttgtaagttttctttttctaaaaactatattttgtttttagcttttttgagaaatgtcaacttttaaagccactcccctactcattatacctatctgtttttaaacagaggatttttctccaactattgtagaagatcaggctcgtgaacatatccggcaaaatctagaaagtttcataaaacaggattttccaggtaaataattttttttttcctctttaggaaaagaaaggtaacatacgtattccaggcatattaacttcacagcttacctaattaccaataggaagatggcagtgtgggatcacccaggccataagaggtgaattcactggggactgcagttaagtcatgcacacttacaggagcaggagaagtggcttgcagacactctgacctctgagtgtgtgcacttgtgtattgagccacacacaaaggtaaaaaccaatcttctaaagtacgtaggaagcattgctcttagagtatgaaatgtcataggatggcctacatctttcctcgaaacatccttgcattttggcataaagtgatgtccactattctttcatgtcatatacagctgtgtatttaagtaaactaagggaatcattaagaatcaatgtgtagtgaaaaagatgctgaggcaggcaagatggctcaacagataaatgaccttcctgccaagcctggtccctgacttcaccgctcagataatggaaggaaaacccaactcctgcatgtttatgttgtcctctgacctccttatgcacacatgctgacacaataaataaataagtgaataattgttataaaatatttgaagaccttaattacaagaggatagttagcaattggtattttggattcatgaaagggccattttttaaataaaaactaattacatgtactcaggtaatgagctattacttgtcatctgtccctaacaggaactaaattgagcttgtttggctcctccaaaaatggatttgggttcaaacagagtgaccttgacgtctgtatgacgattaacggacatgagactgctgaggtacggttgccacgtgaacacacatgtgctgtgagcatgtggttagcgccgtcctcactggcagaactgcgaggcatctggaatgtacggggcattccacatgcagtgcaccaggaagcacagcctctggcttctgcgctgacattcttggagggggtgtgaagagtagaacaaagctctggctgggcatgggtggtgcacacctgtggtcccagctcctgggagcctcatgaaggaggtttgctagaagttcaaggtcagcctgggctgcctagcaagagcctgtctcaccaaaaaaacaacacacacacatacacacagagactggatagctttaaaggggcttttccagtgtagtacagattggactagattccgtgaagctagaccaccttcaccagtgcccattggcttggctactagaccagtacacctacctatcccccgttacctgtgatgtcggtttgcttgtccgtggtgagtattagctttatagctcaggacctgcatttgagacaaacttggtcttactagcaccaaaacatgtgtcctttggtagataacagaaggaataatttctgttcccttctgctttgagaaattctgtaattgggtggctttgatcgtgtgtatcaggaggcagcagagaggagactttgttaagatgcagctcagagcctgcttgtgggggtgggggtgatttgttcctctctccctgaagacagacttgtctgcaactctgttcctcctgcctcagcctgaggcctgagcctgtggcgtgtgccctcaggacactctttgctgcctgtttttacagttttattagcacagtgccacacccagacttggatgtgttctctgaggctgctttctttctgataacaaagtctggaaagtgctggagacaggatccagtatcttgtgcatgccaggtgggggccatccttccagccacacctgtcactgagggacacttcagaagcagtgctggtggagacactgttgactcagtggctgactacactgccactgctcagggactctcatggctttgttctgaatctgtattctgatggtgttcctgacttcaggagaatagtcaaaccagggtctacctgggatttgctgaatggtgtggggtgagattaagtctaccataaggagtaacccactatatcccctcaaagttgatcctcattaatgtggtttataaactacctttgacagtatttctaaagtaaaattctgaataggttgtagggtctgtgtaaccatcaggatttactccagtggggatgacagccatactttaacatgccaaggcacaatgctatgtgcttgtatcccaaaacaaaggggacataggcaagagggctttgaatctgaggtcagactgggcgcagacgctttggtctgaaaaacagcaaaaataccattccaaattgctgcatgacttcaattttagctagtcctagcaggaagtagactgagttagaccactctccacagcaggccatgagatcttagttaaactgtgtatagatatagttgcgtgcagcatagatgagacagcacagacgcttctcttgcatgccatacctacggtactcttccaagggaggtaactacctaggggagtgggggagagtcaatgtcttcatggtttaaagacctttctggaagctcctatttggtcttttgttgtacatccaaagcaattaaggtatgtttggaggcttgcatatccttagggtgttttgtatgtgtggtaactgacactcacctgaaaggaaaataaacccatctgaagttgggcagatggtggcacagtaggtaaaagtgcttttagtgccgccctgatgactggagttccatgcctgaatcccacagtggaagaagaaataattcctcaaggtagttttctgaccaccttgcatgctgtctttcacacatataatgtcctgacacatgtccccacacccattcatacacacacactaaagaaaaagattggaaattaatctcactgtctctgaaggcaatagaagtacgcaaagtgtactgttactgttttgttttatgcctgacccagaacctcacaagctcgccaagcacgctagtactgagctacagagccagagtccttagtcttacgaggtcacccatgctggctttgaacttcctttgcagcccaggacagccctttaagaggtgactgtcttgctcagcctccagaatagctaagatgacaggtgtgtgccaacagtcccagcttgcttcctgatttcttttccgttgttgtgcctttcctgcaggggctggactgtgtaagaactattgaggagctggctcgagtcctcagaaagcactcaggtacttccatacctgtcctaaagtacttctttctttttctttactgttttatatatgtagaatttattcctgccaatgaggaagtgcgctgggttatttacaaatatgtgcaatattggtgtcattaaaatgttctatagtctgatatagaaaaagattgctagtaatgcttatgtgttggtgctagctgttgggtctcagtagaaagcatattcaaggcaggtgaggtatttaagtcatcttgatctcttttaatcacaaatctagaagactgttgtaggtgatttctgaagtgtttagagctataaaaaggggtagatcctgcaaatgatgtacagacctaaaatgttcttacaaaatagtgtaggtgaatgtttgtttgcttgcttgcttgtctctctgtagctggggatagaatctgaggccttgcccatcagatgcaagtgctctaccactgaactacagccccagccctgtcttaaacatgtagagtgggctagcctcaaacttactctgtaactgaggctggtcttgatctgcttacctctactccagttctgggattatagatgtgcagcctcatgcctggctctgtttgccaggtgagttggctacatgattaattggttttagatggctttgtttgtttgtttttgaaatgtggtctcaagtgaactggccttgaactcataactcttgcctcggcctcctgagtatgtaggattgcaggtgtaagccacaactcttgacaaaatactttctttaaacatgaatttcttaatcttttatattgagatcaaagtattacaatacagcctctgttcttatgaacaacacttgtgggtgtgcacatacacagtggtacagtttactttgtattttgacaaggtattgtcctcaaatgagaatccatctctaaagataagttttgtgtggcttctcgggttatacaaagaaactgaagttgcaaggttagatagtgcttaggttttagttctgagctgggctttgatgtttattgtaactcactcttgcttgctctgggtctctttctgggtcatttgagacatattgttcctttcctaagcattctccatgtatacttcgtaaggacaaaccatgttcactggttgtagaacagaaatgactctgtatagtcatttatataaggaattataagataggaatggaatgtaaattacacaaagaattaaatagcagctagaaggctccacttaaaacctaatgccattagaagcagtcagtctagctatggcattaaatgcctgcctcataataattaggaatataattaggccaacagaaaagttaaaaggcctgtgtctccttttattggagtggatagacagaaggctttgggattataaattggagccagggggacatgcaagggctaggtcttcaaggaaggcttgtgagtgtcaaatgagatctaccatagtagattccttaaagggaagaggagtggagtgtgtatggaggttctggattccaaagatcccacttcttctgtgccatgtgaacttgggcttgttggtttattttacatttcccttccgctgcctctgcccgttcttctctaaatctcatctagacttgagcactgtcatctgtggagtcagcagaataggcagatgaccgctagtcaccatgcacacagtgaggttggagctgcctggctccacagcttactgcttgcatgtgcctgagtgacacctgaggtctgttccccctcatgcaaggtgaagttgagagtctggttgtgaagggtcctctgaaagtccccattacactcgggcctgcagggattgagagcactgtctttccattcacatacctgttcctccatctctatgttctcaggccaccatgacagtccatcaggtgtggtcaccctgcctccatccctgtttctggcctactgttggtccttgattctccagtacttatgccctcactggcttctttctcctcaaggataattcctctgtttctctcctgttctcctcaagtccattctctagcctacatagtgtcatggaagggccctcaagcctttttgttcaactatccttgtcttgtaaatggcctccacctccactgtctccacatgttccttttcaaagtgtagctcagacagtctccttacctgcaaagttaattccttccttttccatccattgcttctagctctgtggtgactactgtgtcaggcattgagatgatgctccatgggctgtcagtcagtcagacagacagggaagggaactcatgcatgcaagctccagtagttcctgtgtggacccggaccccctgcatatacacttgcatgttctcattaaccagttggtttgtggaggacagtggacttcttggttctaattcaaatatccatgtgtataacagatacctactttgccaggggtcttcctagttacttagttacaattgtttggctagttgtaatgaatacagctaggcagctgaagttaggtcttgtttccctcccaagttgtgtttaatcatgcatctttcttccctcttagggttgaggaatatccttcctatcacaacagccaaggtgcccatcgtgaagttcttccatctaagaagtggtctggaagtggacatcagcttgtataacacactggtaagatttccttggacttggccaacctgtctttcattcattttttaaagagttccaatgagtagcctagcctactctgccatgtcatgaatctcctgttttggttctatggatccccgccccccttttctttttttcttgtttacttccttcaatccttcctttctcccatccagtcctttttttttttttttttttttttttttttttggtgggggagggagtgggggtgagctcatggggaccttgagctgctgctgctctggctccaccctgcaagcaagtgctaagattacaagcacattctattaggcattttcttaaggctgtaaagaggaatgagtgtctctttaaataagtaaatgagccacatgtggtggtacaggccattgatctcagctcttgggaggcagtgcagaggcaggtggatgtctgtgagttggaggctgtcctggtctataaaatgagtccagaacagccagggctattacacagagaaacactgtctcgaaaaatagaacaaaaaagtaactaagggaaatgagacattccattttgtctgtcttatccctgtccttttggttgctcagttttatccccaaatggctaagcagctctctgctcttgttttatttactctttgggaattgtctgagtggttggtgtgtgccttgtagtgttctgaggctggggctatggagaattcagtagctgttcccatccacgtgggctaagagtgtagtgcagtggtaggttatttgcctagcattccatcccagtgcatgccaagccagtatgtcagtagggtgtgagaatgtgtatgtatgcatgtgagagaaagtgtgtgtatgcatgtgggagtgtgtatgtgtgtgtatgtgagtaagagagtgtgagagagaatgtgtgagaatgtgtgtgagagtgtgtatgagtgagagagtgtatgagtatgtgagaatttgtatatgtgagagagtgtgtgtatgcgtgtgagaatgtgtgtgagagtgtgtatgtgtgtatgtgagagtgtgaatgtgagagtatgtatgtacatatgagtaagaatatgtaagtgtgtatgtatgagaatgtgagtatgtgtatgcatgtgagtgtctgtgagagtgtatgtgcatgcttgtgagagtgtatgtgtatgtgagtgagagagtgtgagagtgagagtgtgcgtgcatgtgagaatatgtgtgtatgtacatatgagtaagagaaagtgtttgtgtgcttgtttgagctcatgcacttgtgaagattcacttcagataaagtcagagcttgtctgcttggcttgaacctgcctgtgatttggtgtgcacgctggggtccttcttttggcctcacacctggctgctctgaggcccgatgggacctgggagcatttcacacaaatgatgccgctgtgaaggggagagagagtcttatatctacttaaagaaaacttactttattttactgttttatcttattccattaggtttcactgtcttggtttttgagacaggacctctcatgctgacaatgatcttaaacttctcatccttctgcctccatctccaaagtgctaggatgacagacctagtagcatgcttgtttattttaatggctttttgttgttgttgttgttgttgttgttgttgttggttactattcagactaaagatttattcatgaaatcagaagttacatgtatgtgtcattatctcttagattaatacagcttatctcagaaactgtcctacagtttgagcctttccaggtcgcagtgtttgcgtcagtgagagcctcatggcctgttctccctttcaacaggcgcttcataacacaaggctcttgtctgcatactcagccattgaccccagagtgaagtatctgtgctacaccatgaaagtgttcacaaaggtaggtacattgatgcatgtggtttatctggaaattgctgtatggaccaggctggcttcaaactcacagagaccatcctgcctcctaagtgtatgcgccacaatgcctgaccttagtgtgttaacttttcatgatgctcctgctatgaccgacaatccacttctttgttgaattcagtttaattcaggttggggtggttgcttttgttgacatatttttattttttaagatatggttttcatattagttcctcaagaagtggtggtaatggggtgactgcaagctgagtagaaacacccttcagagtgctctctccctctagatgtgtgacatcggtgacgcgtccagaggcagcttgtcatcctacgcttacactcttatggtgctatacttcctccagcaaaggtctccacctgtcatccccgtgcttcaagaggtaggtgcccacgggagatggtctaagccagcctctgcttctgctaatatgttattggtcagtactgacatcttgtaacttttcctggacattttggtatcaacattttaatttttcattctgtaataatacttttaaaattaatttcagatatacaaaggtgaaaagaaaccagaaatacttgttgatggctggaatatttactttttcgatcaaataaatgaactggtacgtattttaagagtaaaggttttcccaacccttggctgaaagtcagcctgttctgtgctgtagaagtgttgtgaccatgaggactggcattcacaagtgtcccctttcagttggtcctgtccctaagctgggtgtgttccaggcgctgtaccagggtttcctgtcagctggttcttggtagttagtaactattccaaaggaatggatttttgttgtttggttcttgtcacactgactgtgtacatgtgtactgagttcagtgctgtggcccacagagctcttgaggtttattcacagattgccctgctgtcatgtcctgggatacatcattgaacattctcagttgtctctactgcaagtcacagagtaggattaatagactcatgtcaatactgttttaaacatgaaagaaaactcatgcaactctgttttgtgtatataaggcaactgactggtccaggcttcctgctgaggtgcgcatgcatactgctgttaacactttatgatggctacagtgacatccttgttcccttgcatctgtagcccacttgttggccagaatatgggaaaaatacagaacctgtcgggcagctgtggctgggacttctgcgcttctacactgaggagtttgactttaaggagcacgtgatcagcatcagaagaaagagtctgcttacaacttttaagaaacagtggacctcaaaatacattgttattgaaggtatgaatgaagtcaaattagaagtgacatgttggccgggcatgtgtgaggatgatgtgcagagccttttaagttgagcatcaagtgtgacctgtgagcccccctggctcttcccccaacagtcacctgtttgcagtacagcagccctgctatggccacaccaccctaaaggttcgttttaagtgactagtgcctccaggcggggcctttcacaggtccaaagtcttcactgaggagaataaactcagttgttggaccacggcagtagagcacagcagcagaggcaaggcagctttgggacagcagagctttaaagcctacagcgagtggcttcctaatttaattctgccgtgtacttttactttttggtcatggtaagtgcataaagcactcagtactaaatgtgtaaagtttagtgtgtagttccacagctccagattcgaatgcctgtcccagatgctcgggggctcagagagttgtatagactttgggtctggttaattctactgggtgatatttttataagaaagtttaaaactaaaataaaaataagtctttactgagggatggagagtgccagtagaggtggattcttagccctttacatactgttgggaaaaggactgtctgtaatgattctcagtgttgaccccagagagagtcctttcctgatggaccttgtgcccaaacctctgtgtgactccggcacccaggagcgaagcagttgaatcaagtcaccctactgaattcaacagtccactgaaaccattgacgtgtatagttagttgttcctaagtggtagggattcagtttttaagaagacaaaataagccgggcagtggtggcgcacgcctttaatcccagcacttgggaggcagaggcaggcggatttctgagttcgaggccagcctggtctacagagtgagttccaggacagccagggctacacagagaaaccctatttcgaaaaaccaaaaaattaaaaaataaataaataaataaaaaagaagacagaatgaaggtcaagtgctataaagtgagctgggaagggactgagaaaatgtcttcttggtctcacaggacccttttcttatcacactgtcacatagatggagtgtgaattttgtgattatttcattactgcgagcagtactgacgcagtgccataagcactacctgggctatgcatggtagggacttgtgttctagaggctcctatcaaagcacagattagtgaaggcagattgccatgtcatttgttgttgctcagcttactaagtgaactttaaaaagaaaaaggcagaactgagagtgtgatggccacatctaatcccagtactggggagctaacctaaaagccaaagcagtctttgctcagcttctcaaccaggcctgattaatagcaatgcttccaactgtatggtaactaatgtacaatctgccttttataaccagcaaacacccaaactgtaaaacacgcacacacacacgcacacatacacgcacacacacacacacgcgcgcacacacacacacacacacacacacgcacacacacacacacaccagcaggaaagggcaagcctgggatgatggcacttgtcgtctgtgctccagttgactgactttgagtgtcatgttccccagcttggtgcctgccctctggaagctttgtggacagaatcatggtgcctagcttcactcccagacgcccgctgtggtgctctgcaaatgtagttcttcacgtctgcatggagggctctaaaaggatggatcctagtttgtccctctgtctttttcagtgctgttttaggaagaaaatgatatcgatcttcatatgatgaccatgaccagatcattagtcatgtgtatagtattttaaatcatctataaaataatatttgggtttagaagcatgctgaagagtacgtccactcagttgcacctgtccagctgcctctttcatcccaagtgttcttgtcctctgcatctggctcttcatggttcttgtgaatcatctccttggcccttgataatcaatgtttaccattatagtgacactcgatagctcagactggcctggaactcagctacacagcccaggctagcctccaatcccttgtttttctgcatctgcctcccatgtgatgagatcagaggcatggcatgcacacctggtttatttatgtttgcaacttctactgtgacacagaatggacaccactaaatgacctggttagtgagtcttcctcaggatttcctccagaagtaggcaacctggacaataagaagaacttttataaagatcataaagatgatacagagctattttcttactcatgcttttggaaaatctcacctgatatgtaggtttgactgttgctgagctgtgcataactctggatgatgagcaaagaaggtggcactgttgtgtgtgtgtgcgccaaggtaatgagatgagtgctggcagtctcccctgctgtctcacctgcccctctctctctctcctttactcagatcccttcgatttgaatcacaatcttggtgctggattatcgaggaaaagtaagtgcctcttgtttgttaacctgggcaatttcttgttctcttaatgcatgtaattgaactcttactatttcccttatagtgacaaattttataatgaaagcttttatcaatggtagaagagtatttggaattccagtcaaaggatttccaaaggacaacccctcaaaactggtgagtttttgatagaaatgccagagaacaattaagatgcacattttgagcaccaaataagtctgcaatgtggtgtggttgaatcgagctggctggtgtgtctgtttcctcctgtgtcacttcatggtgtggcattggaaatatgtagttactttgaaatgtttatcattgactttagccactctgttgcaatagatctctccagacatgttccttctctatccagaactctgtcccctttgaacaacaggaacaatcaggagcactgattcagcttctgcatgtgggcaagtaggcacttctagcaaatcatagtcgagctcctgtcagacactgctctggacatttacagtggtgtttctcgtacttgttcaagagctccttcacctacacagtgtgttcagatgagtgatttctccaggaggtgtgcaggggggatgcatcatcccagcctcctcctgcagcagcaccagcagcagcagcagcagcactagcctgcagctctttgccttactttaatacagagtttgcactgtgtgtttctcagttcactgcagtttagccattttgtctcatgacaggctctctgtgacctcagcttctgctgcagtattgaagccactattatgtcttatatgtcagtgccctccaacttgagggcataaaagacatagtttagatgatctgtgtcagctattgtgtcactgtgctgctccctggtgtgcaggtgtgttggggatgagtggtacacatactaaaataccaacctgttctcacactgatttcatggtgtgccatggtcttgttcacagttcatcttacacagctgtgttcttgtaggcatacttttttgatccggatgtcctaactgagggagaactggccccaaatgacaggtgctgccgaatttgtgggaaaatcgggcacttcatgaaggactgtcccatgaggaggaagtaagcaccagttccgaagggaagggttgggttttcattttcttgtcccagtttctaaatgtgagtctactgatacagaaaaaagacacttggaaattttcatgggagtttctgccccactgtggcccatatatctcccaaatcaaaaatacagaaacgtattatttttactaataagctgttggcactatacagggcaggttctcaactgttctaacctacatccaggcatagggctaagttagtgttctaacctacgcccagccacagggctgagttagtgttctcacctacatccagccacagggctgagttagtgttctcacctacgtccagccatagggctgagttagtgttctcacctacatccagccacagggctgagttagtgttctaacccatgcccagccatagggctgagttagtgttctcacctatgtccagccatagggttgagttagtgttctcacctacgtccagccataggcctgagttagtgttctaacttacgccagccataggactgagttagtgttctcacctatgtccagccacagggctgagttagttgtcaactgagtcttcctttgtttgctctgttccatgtgtctcctcagggtgatttttttttcttggcctcctttgtcccctttttccttcctctaagaccctctactcaatctcaagtcccaccctcctgtctcctgccactcagtcacaggctccagccttttattatccaatcagagattattggagagcattcttcatagcacatgggtcagtacaatgcccatgtcctgactgcagcctgatcttggggcacagaactcagcatctgaatacacagcgtgcaagaccaacccaacagaaattgagcagttttcatataaatgtaatactgttttttaaaaatgaaaataaactgatgtaaatgtggccatgggtgcacatgctgcgggctggctctcacgccaggttaaacactttttcttccctattttgggtttgggtttggttttaaattagtttaatccttagtaattattttcagtagctcaggtgtttgggcaccatgctttctcctgctgatgttttgagaggcagggggtacctttatggtcggcttggatcattgttctcctggctgacagtggtttgctttcaactaaacagtgctagtctcatttcaaaatacacttaagggaagttggtcacaatctgggatctaagaaatagtaatcagcagagcagaaagaaattgttaataccttggggtggtaccatttattactacttcctgtgtttgggaggctgagaaacatgagttcaaggccagcctcagctacaaagggaatatgaaatcagcctgggctgtgtggcgttacgtcaaaaaacaaacaatatgtgaggatgcagctcagtaagagcactaactgctcgtgcacaagaccctggttccattcccagcacctacagttggtggcttacaaccacccgtaattccaattccagggcctccatggacacttactatatatggtacacatatgtatatgcgtataaatgaaagaaagtcactctttataacaaaggaaaaagtgactctgacattcttgaagatagaaccccttaaaaccattgttaaaatttttctgagaaattcaagtcttacagttcaaattttcattgcctaataaaagctaatacatcaaaaaggctgaccagcaacccactacacatatgatttgagtttcatcatgcaggtatcaaagcaggcactggggctggagagctggcttaatggtgaagagcactagttgctcttccacagaaccggggttcaattcccagcaacagcatagcagctcacactgtctgtgactccagttccagaggacccaacgccctcacacagacacacgtgtaaatacaacaccaatggacctgaagtaaaaagaaatgtattttagaaggcaggtactgagtctcagcaggaagcactgcttgcagcactggtgacaggcaggctctgcgctaaagattacagttccagcagctgcagagcagggtgtttggaaactcactgcatctgggttcaaaacacatagacttgtttttcttgttgtcctctccacagtacagtgtaactgagaggatgtgtatgtgctatgctatagcacgtgactttctgtaaggactggggcaactgtgggtgctggtttctgagtggccacctgttacccacagtctgtgggtgctgaaggacagcagagatcttaatacagaagccaggctttgtcacattctcggcctccttttcacattctatggtcctagctatctctacacttggacacatcttgatactcccataagtttctgttgacacttttcctattagtattttatcttcactagagtgaggcgacggagagaccaggaagataccccaaaccaaaggtactctgagagcaaagaaaaaagaagcaaagaggacaaagagattcagaacaagtacacagaaaaggaagtgtcaacaaaagaagataagctcacaccgtgtgcagctgcgaaagccaagccagtgagggcagctgtcgacctgggccgggagaagctcctcaggacgcccacagaaaagtggaagagacaggacgacagagactcgagagaaaagcgttgtttcatctgtggaagagaaggacacattaaaaaggaatgcccacagttcaaaggctctccaggtacagacaactctccagaaaccgtgatgttcatggtcaagggatataagaggtctagaggcttttcacattttgtatcggtttctttaaggacggttgtgtaaggaagcactgcagctccccatcccattcacacacaccctgggtacagctgaattgcttattcctgggtctaggtagccttatgaaagtctaagatagtcaatgaatgctagtctcctctccagtccatataaacattgtctcagtatccagtaagcaagtcacacttagaggcatgctgttcactgtgtacgtttgtaagtcacagcactgcctagacactgggtgaggtggtggcttaccaccatgtacaaatgagtatatttgcacccacacactctaagcaggaaagagaatagacggttgttgacagtgttcttgtctgcagagtactgggaagggtttcattgttagcccttatttaatacctttctatcagggaccatagtaacagcccacagatccacagatgagagtcaaccacaagtcttcttgatgcagtagtccatggctataaccaaagctacctaaaaggctgaagcaggaagaacactttacccaggagaataaagaccagcctagccaacatagtatgaccttgtcttgaacacaaaactaaatcacctctaattgctggatgtgaattggtccatggataagtaccttttaatagactgttaagacactgtctggatgcctttaagttgtgtatgctatggtcttcagaacaatttatatactgtactgccttgtaggataagcctaggtgaattggataattgtagctgaggaacactagagagtagctgttactgctcttctgctaagggtgctggtgagggcagctctgtggttccttcctctcagcactctggtgctttgagtgatttattaaatcgagtctgccaggcaaattgtctcaacttctaagactgaaagttttatgtgccctgttctcaccctacactccccaccccctagggcttttgaggcagagactcactattgtcatcaatgccagcctagaatttgctgcatagccctagctggcctcaaactcagtatctcctgctgcctttggggtcacgagcatgtgctgtcatgcccagcttctcctcatttattttctaaggagctttatagagagaatttatgcaatgctcgagtgtttatggatgacttggctctgggtaccccagcctgagtcagctgaaccccagccttgttcttctaagtagcttgggacttaacctcaacattcaccttgattttcctttataaggagacaagattaaaagaattaaaatgctgatatgttagcactcagttgacatgctcctcagggtcaggttggcactatttcagtaggagtatagttaccgatcatctcacttagctcaaacagttgcctcctttaagctagggaactagacagtatagatacaagttaacatagtttcaccaaaattgttcttacatactatatttgtgtttacaaacagcatgaaacagatcttctggtaccctcctcctcctccagcatagttgtcctctgcctcctcccccacccccccaggtgcatccctttgtctagtagcaagaccaacacgtctcaaaactgtttaagagttgtagcctagagccagacagtggtgtcatacgcctttaatcccagcacttgagaggcagaggcaggtagatttctgagtttgaggccagcctggtcttcaaagttgaattccaggacagccaggggtatacagagaaaccctgtctcaaaaaaaaaaaaaaaaaaaaaaaaaagaaagaaagaaaagaaaagaaaaaaaaaaaaaaaagaaaaaaaaaagaaaaattaaaaaaaaaagagttgtggcctaaagagatagctcagggaggctggagagatgacgcagaggttaagagcactagctgctcttgcagaggtgctgagttcaattcccagcaactgcatattggctcataaccatctataatgagatctggtgccctcttctggcctgcaggcatatatgcaggcagaatgctgtatatgtaataaataagataaatctaaaaaaagaaaaaaaatactgcatggcttctttaaaaagaatgttaaaagagagagagctcagttagttagtgcatgctcaaggacctgagttctggtcccaggatacacataaaaagcaaagcagtgtaggagattcttttaatcccagtgctggacgcagagataggcagatctacccctgaagctcgaaaacagctagcttagcctgaccaagccagtgagagaccctgcctcaaaaaaccaaaatgggttgctcttgaggaatggactcagaggttagctttttccagatacgtgtacacccatgcacacacatgcatgtgcacacacacacaagcttcagagtggcagttctgtcagcctgactgtacacctggcagctaaccttagggatcagcaaccttaagaaaaagtcctagtctagaagcctggctacttcctatgcagtactcataactagtgtcagcagttggcatctgcgaacagaaggggtcagagtagagcaagtgcttcgtggtgctaactcagtaatgtttctgtgcccagagttcaacgcccttccccatcattccttcagtggattgtgtagaattccatcatgtcatcagaaaatatgtcttaaaacattttagaaaaagactgttgctttaacttaaagtaggaacaaaagtgttcctctctttctgtaggtttgtgtaagtcagattatgtgtctgcatactcttcacctagcccattgagaccagttgctcaggtaaacgccagcccaaacctgagaggggagccccccccatcctcttcaccctcacagcctttgggagtgcttgcagctgtgtgctgggccctcccggctggcctctggtgcttgctccttctgtctcccacatactgtgtgggaaggcttgttgggccctggtagtaggggctttggtagatggctcctgcattcatgtctgtctttccaactaacttgggccaacctcgtgcctaaccccagctcttcttggatgcggtctgaggctgtttctgttgctttatcttcagtttttgtaaaccagtctatttcattttttaggcagtgcttttacatgaagacaaaaagaaacaaaaaacaaccatatttttgagtccccagtcaggtatgtggttttaaaggatcagatatgtgttgttttcttctctgaatattttaccacatgcctttgagatgcttcctttcctatgtggttctgacagggatatcagaacttctcaagggaactttaaacaaacaaaaaaccctcttgccttgcttccaccttgatccttatctgatgttcaatgggtaagtgcagcctgtgtagttttcagattctctgggtgactgcttcatttgaggaagagttgctcccttagccatggaagcctttcttgcacatttgtaactgctgtggatttgtctttgctgtgccctcacggtttctccttgtgaatgttagctgccatgctccagagtaaggaaagaaagttataacctgaaccctccactctgcacccagacaactgtttcatttatctcttcagtaaatatctgctgagactgtctctaactgcagggcaccagccccagcactgaacacttctcggtgagcagcaaagctcctcctctacattcttgtcaggagtagacaatagagagaagcaggcaacaataaagggtagccatatggtgacagatgctttaagcaggaaaagcacagatgatgctgagtatgcagtatcctctctaataaaatcgcatcctgaggcagctgaatcacaggagatgagggtcaggctgaaggctggtagacctttaactgtcggcatggaggagcagtgagaggtgaacttggagtagatgagtctagcttcttgaagctacagatgtgatggagggatggtgctctttgaagtagtaaatggctaggacaggaacactgacgccactcaagtatttaccaaggtagttgcgtagagacgatggtcacatgtgggtggagaatgccagggaggacaaccatacacatctgtgttctgaagacaacaccagcaaaatgaatgcatcgggttgtgacatggatacacaggatcagatgacacgacaggctttgtctaagaaccagaaaaataaaggaaatttctgaggagaaataggagtcagtggtgaactgaaggtagctggagttctggtctagagaaggccagtgtccagttgagtatatgagtgtattagggttctctagagtcacagaatgtatggaatgtctctgtttattgagggaatttattgtgatgactttcagtctggagtccaactaccccaacaatggtcagctgtgagtgggaagtccaaggatctagtagttgctcagtcccacgaggctagttgtttcagctgctcttctgtagatgtaggttccaacagatgtgctggcaagtaagtgcaagcaggcaaagaagagtgaatcttcctacttccaatgtccttatgtaggtctccagcagaaggtgtggtacagattaaagatgtgtgccaccacacctggatctgggacctgttttttgtcccatgctaaccttaaactcaaagatctccttgccttagactcctgggattaaaggcatctactgcctttcctgggcctaaccttttcatggccactgtgcctcaagatctccatgcggagatccaggtcagaaatttgtgtcttccagcctcaagatctggatcacaggtgagccctccaattctggattgtagttcattccagagatagtcaagttgacaaccaggaatagccactacaatgagcctgctggcatttaactggtccaggctgcagaagagtgtaatattgttattgtggccattgcatttcaacccactatactcaggaagatcttctagcaagtaaaaccacatggaagaaagggatgcatgtggaccatggaaatcaaaaaaaacaaagatggtcaaaggaggaacagaaagcgccagagttgagctcagagtacaagtgaaggaagtgcttggttaggtgctgcttggagctctgtgtggaaactgagttcagcaccgggcttagcatctgagctcagtgaagcctttgcagagaacctaggctttgggagctaggttcagaataccaagaaaaggagcctgcttagcctgggctgtggtgtgaagggcagagcccccttctgccatatctcaggcctatggagggttactcaagagaacatggtgtgataccagggtaagaaggtcttttgctagtatttcaagtcgtcttctgactctcaaaaaagagggaaaaaactgaggtaaaagtggctttttcagcaatatcataggaaagaacaaaactgtgagaaaatgtaaacggagtccttcctgggacagctttgcttaatcagccagccctggtctctctttacctcttttaaaggaggctaacaatgggcaggtaagcccagagagcatgagcaatcgtcccttttaagttcttgtgtcatttattaaaaattaactcggaggtctttttatgtacatgaatgttttgcctgtgtgtgcctatatgtacttcatgtgtacatggtgcctgtggaggtcagaagaggttgttgaatgccctagaattggagttacacatgcttgtaggccactgtgtgggtcctaagtaccaaaccctggtcttaactgctgagccatccccaacacagaaaagtgaaatttctaatgacagcgcttatagaacttttactacagcagtgtcacagagtgggtgtgtcataacatgtagaacacagattagctgcattcagacatccattgtggatttagggaatgccatcctaatattagggaaagtactgacttgttaatgctgactttggtagagcaagaagtcttcagctgcccctcaggataagctgtctctcctggcctttctccctcttctgtgaagctaggacactgaccactctgggagagttgaggaagctttgggctattatttctactatgaatgcagttcatggggggaaaaatagtggaattgttaatgtgtttaactccttaagttttttcagcaccaagaggcatgatcttaagtatttgcgattgttttagttttctttagtgaggaaaggaaacactgaaataatgagaactttttttttttttaagctagggtgtcatgtggccctggaatccccatgtaatgcttcatatatggtgggcagacactgctgtctacgtgacattcccaaccatggtgtcgtatctgtttacataaaatttaaagtacttgggatttgtgctggtgtgcagaataagagcatgtgacttgaaggaaacagagctctccaggtcttaactgcacttagaccagaaggagagcattgtacgtgacaaacaagcaggaagagggacaagggacaggagctccagtcccgctcaggaagagtcatagctgttctccatggagcacaccatttcacaatcagagtgctgttggataccctccaagcccagtagacagagtgaaaggggaatggtgccccacagttaagctgatcgaggttggggaagagaggtgggctatatcacataaccacactgactttcaaatgaccctagctttctggaagggtgtgagccacagacagcaccagtcagtggcttcattttccctgtagatctgggagtttgaagatctaagatgtacatgtataatcagactaaaagaatgctgttttaagcaactttgaccttaagcagatattcccaaaacatttcacacaggaaaagtactgatgttcctgatgttaggcacatgaaggaacacagagtgtgagcagtttattgcatgtttctggtttccactccatgtgttgggggcgccccttgccctgcacacacctccgctctctcggctctgagctgactgctgaggagctgcgtgcaaacacttgagcagctgcgtgagtgcagagaaggttcctggtccccacactgtccccaagtccgcagagagcagcactgctgggcttaagaggttacacatctttaaagttgagttttactataatttttcaagttttaaaaaagtggggaaaaaaatgtagatgttatagacctagaaatgccatggccaactaacatatacttagttataaagaagttattagttattcatctcagtaaaaaaaaaaaaatcctacaactaaaaacttactaacttaaatttattatggggaaattttattacaaactgtattctgctttctacaagaaaaaattatagattgctaagatttgttcttgccaataaaatagctcagaaagtaagttagtgacagctgtcacatattaacatgtgacccatgtctgtgttgtaggtagaaatagtttcccttgagcccctttgtagactaagtctctgacccactctagtttccttaatgagcacatgttgatggacagctgtgctcttacctttgattttgccatctcggctaacaggtgcattcctctgatgtctcagcaagtagtacttgtttaaattatcataaaggccattggtggggctggggagatgttcagtgggtataaagaggaccagagtttggatcggagcatccatgtaagtgttaggtaacatggcagcctgctaggaatccatcgcatagggggtggagggagggagctccagagcagacttgcatagttacctaacccacctccatgtataaggaggagactatggggggaccatccagtaccaagccctgactccatcatatgtgcatgcgtacacacacacacacacacacacacacacagtgtccaaacacatattcgcattcacaaacatgaaactatttcatacacacagtcatatggcgggaaaatggtttggtagtggtgtgatttttgttgttattgttgttgttttaataggccttaaagttctagtcagtgataaagttatataaatatacataaatggggcagatagctaccaatcttttagactgtctctaaattttaaaatgtcaggccatttggttgaaaagaaataaagggaaagcttgtgtggtgggcattgctaaagctgctgctttgggaaagttgtgtccatgcttctgaaaatgtggacaactgctgcgctttgacttcttttacttacatttaattctacacttcatttggaaatgacaagagtgacagtttaagaagggagctagcttccttctccccctcagaagttatgggtgcaagccaggtgtggtggtcatggtgtagtatttaatccccacactcagaagcaggcaaaaagcaattctaggctagcctgggctacataatgaattttaagtcatccaaggcctcacaatgagattctgcttttaaaacctgtagctggcatggtaccagttactaaaccctttgcattccttccattggtttgagtagagccttcattgtacagtagtagccacatgggctctcattccctcttgtatgtgctcagactccagaacacagtacatgttgtaagctgtggatggcttcactactaattaagtacagagaattttattttctccttgtacatccataaggtattactagacttctaaagggtaatggtatgaggtactaatttctggccagcgatctctttgcagtctgtgagctacaaacaaaaagaatatcctatgtaaagaactttcaaaatgtttcttccagcctcagtgcctgcctgtggctgcattgaacagcctcggggctgtaccttaccagcactgaggaagcagtgtctaagcactgcccagtgcctctgatggctgtgcacttgtttatacctagcctaactgctcgactcaggacgagtgccctttgtggtgggacacgtgtctgtcagtaactgacaataagtattgtgtgactttgctcaaacaccattcttttcgtttatgttggattttgttttccctcctaggtagcctttccagtaaatatatgactcaggggagagcctcagtgaagaggacccagcaggaatcatgagggaaggaactgcagcactggaaatgccactcaggtgtccgtggccacttgggaaattaggttcatggcacaggacacagtgacacagatcaggcttcaacgtaacagttgaggggcatcgtaattttttaaattttaatgaaattgttaataaggaaaagaaaaattttaatatagtctaactataccaccaatctccagagatttgaagattttaatagaaagtcaacttaaaagaaaaatatgagggccagaattcaatgactacagcgtcatggattttagttctttcaaagcactctaaaaatagtgtgctgctcaccagaggagttagccctctttccctacacatcccctttttgatttccaagaggggattctctctgttgttcctggatcgtggtatggacgcacatcaaggacatgtggactatactgctgtacatagggtctacaagcattcttcatggctcattgtagaaatgatagcatggaatgcaagcacctgtcagtgtgggcctcggtggacgaccacagcaccactggcacatctttgagggcttccttctctaagtaattgacagaactgttgtgctcataaaaatgaagtcataaaaataagtagtccttttttgctggtttaaaaaagaaaaattaaaggagaaaaggacagaataaaagtgctttttactttttatgatacacagaaattagggtggagagcttttacaaacctctgaagatcaaagaggctgctgtctctgccaatcacaagtttgattggcaaccttctggtctgactggagccctctctaaactgttaatgaacttcacaagcctttctgaaatagtacagagtcagaactatgccggtttatttatcattttgaaataaaatcgaactttgaacgtgtaattttatccacattattttcttatgagtcattagaaaagtcaaccaaagcgctgacagtacacatctccttaatagggtgcccatgctgttcccctttgatagctgtgcaccgggtctggggtgtgcaagcaggagactggggggcagagagagagcttgctaaggacactggcacaacgagggagactcacgagaggcatatatgtgtgaactagactggtcatagtctagttatgaaagagtcatgtcaaaatggaaatcattaagaaattggaaatcatggtaaaaaaataaaaatggtgaccatcaaactcatgggttgtgcaaccggggcctccctgctacgtgacggctcagctgctggcctgcttcctttcctcctgctcagctgctggcctgcttcctttcctcctgcctctggctgtgaagtgacagcgctgctttctggctggaacagtgccacgcctactgaaaaagcgcttagtgttgtttatccctctgcccctagaacggagaagaaatacgcagccaggccaatctttatacctggtagttattttctacttggatgttttgtcggttgttgagggagaggagtgtacttacccctaaaattaaacagaattgtcatgttttcttctagccttaaaaaggtttcctacattttgattcttaaaaaaaattctgcccagcagcctggtgtttttgatggcttatactgataccattagacaagtgaggcacgcttctcagcggataagatagcaggctcgcagccatggccaagtcaaagcttcctctgcaagcgatcgcagggccagggccgatgccctgttctgttctaaaacagcggaaactcagaatccagtttttacagcaggagttctgaacacccgatcttcaccttctaacagtctcttgctcactgtgaactgctttggcaagcttcctggtaaaagatgtaaaagatgtgttttcagtgtacagagaaaccctgtctcgaaaaaccaaaaaaaaaaaaaaaaatcagtctgtttttcttttgcttcaaaggtggcttctatcttaaggagaggatatcttcccaagtggaacaaaatccttgcaagagagagatcaatgaccgagtggggttcacagttttcagacactaaaaatagagttgaaaacatggtgtgcccactctttgtaaagctatgaagaaagggtcagaacattttcttagctcctgggcaggtctaggcagaatgtacaatgtctgtcttactctgtcagtgttccagcatggcaaagtccccatttcggacggggaaactgccccttctagtcagaccagtgagatcgcactggaaaagaaaacacttgttctttccgtctagacctgaggccgaatccatttccctccctcggccttcctggaaccataagggggcgatcaggggtagcaaacccctcagtactccccacgcccacccagttcccgcacggggccagctgctgctccgagataaaggagctcccgttcttacgtcatcacgggccgcgaaggaagccgaggcgtggtgacaggcgcacagctaatcaaatgggaccggctagcaggaaaggctagccaaatgtgcacggggcccgggatcgggactcaagaaccgatgctaacgtagcgcccagggcgctcgctctcagaggctcggatagagccaccatgcccgtgcttccatgcgaggctggtagctacgtacgtgctcagttttcttgacacaaactgctacacaagagtgacatttcaataactggaaacctgtcgtatggtgtctacccgcttgctttactatcgaagcagctccagagtcacagagccgtgtccccacttccggggggtctgtcgttagtgtacgccatacggaaggagccatcccacttccgctagcgcagtgaccgcgaagcccgcaaggtcacaggtcacctcccttgcctcgtcagtgatgacggccaatcggcccggcccgtcactcacccggactgtccaatggtggagcgggacgggcgacgggaggcggggcctgtggcgcctgcgcaggagcttgtggcgtcaaagtgcccgccgtgtccatggagagaagttgagtccccacgctccagccggaggctgcgggtgccgcgacgtggacatgtcggcgtcgttggtccgcgccaccgtgcgggctgtgagcaagagaaaactgcagcccacgcgggcggccctcacactggtgagtcacctcggcgtccgcagggaggtggtggcggcggcggcccggggtgcagagcgagcctggacgcggactagggtctcccggcgggccgcgcgcggagctcgatggggcggacgggctgtgtgcgctgccaccgggcggccggggcggaggacggcagtttgccgccgaggtcacggcgttcccggagaaaggtcacacagggaacgccgcggctccgcataacctcccaggaggcgtcagccccagaggatcgggacagcgtgagaccgggattcattcggtccagacgccaccgcggaatccgctccacccagagtcctaagaggggctcttgccaatagttagttgaagcaaaatagaagggagtcgtgaacaagtgagataatctgtttataggataggtcattgtttggcccttcagtttgccccagtaatcacactgcattctgtgttgcttttccctccgggaccagctagttttcgtcaccgcaggtatgtcatggattctaggattgtgcaaactatgctcatcttactgagaatagagtagaatcctcctacaagtaataaattccagaaaagtcgagcacaggataggtggtggttgttattgtcgttgtttgcttgcttagttttgttttgtttttttttttaatcaccatttggcctattgcatgttacttgggaaatttcgacccgccccttctcacaccccccctctgcccccgtttctacctcataagcatacattatcatgatccgctgtttttcatgagaagaaataattgagttgcctggctcgcaccctccgtaggccattccttccaggagtaacatctcatttgcacagtcctggcctgtgtcgtgctttgtaatcttctgtttcgttatgtatagtagatctcaattcacaccctctgccgcgctgcctagctcagctgtagagtctgtggtgttaggcttggtcctagaatcacctttccctgattttcataggcacagctgttggcaggcgtcgtggttcgtacttgtttttcaagtgtctggtaaacattttgaaccccagcacatagcaaatgcaaaagcaacgaggtgaccaacggcctaaagtgtgagagagagataactagcaaacaagagtaatatgagttaggtattgcttggccggtacatcagcctgacagcagggagtctgacattctgcaacatctactagaagtcagccatggccaggaaaggtgtgacataaaacataaacactagctatctgttagctgatgccagtcgtggacagaatggatgggctggcacattgggctgtgtgtatttttagtcagggtttctagaatttatggatagtctatatagtaaagggatttgttacaatgacttaaacagtctgtagtccaactcctcaacaatggtcagctgtgagtgggaagtccaaggatctagtagttgctcagtcccatgaggctagttgtttcagctgctcttctgtagatgtaggttccaacagatgtgctggcaagtaagtgcaagcaggcaaaaagcaaatcttcctcctcccagtgtcctcctgtaggtctctaacagaaggtgtggcccaggttaaaagtgtgtaccaccttgaactcagagatgatcttgccttagtctcctgggattgaaggtatgtactgccttgcctgggcctaagcttttcatggccactgtgcctcaagatctccatgccaagatccaggtcagaaacttttatctaacaacctcaagctctggattgcaggtgaggcctccagctttggattgtggttcattccagatagagtcatgttggcaaccaggaatagccattacactgtggtgtagactggtaagatctgcaaacccagaatggctccagctcaccacatccaaaaacaacgtgctccttcccacccccatatatctaggagttaatagagttgaatttgcagggaccagagtcagatgtgactggagaatgtgaaagctgctacctagttgatgggcagctttatttccatcattgtacaagacagaggtggtcagctttcatgacgagaggctcatcctcaccaagctccacttgggagcgagcggtggggcctagctagcatgcatgttggtacgcgctgagaacctagttcactctgtatgcactgtagtgtgtacactgtactgtagaagactctggacgcttagcttcccagcgcagcctggtagagaggggcccagggtgtgtataaggacatgttacttcactggagtagggccagaagatctttggaacagcaactagcacgtgcctttggtttagaaacataaccaggaaaacctgcaggttacaaccaggtttctagtccagtggtagaacagccgctttagggcctggcgtgagaacagagtggggtgttgtgtgttcattgtaaagagagatttgttttgtgtcacagttgttaactctttggtcattaatttaggagcccttgcaaatatttaattgtgccttaaccacagagttgtaagattaatagccataacaaacacgggccagggggaggagcctgtgtgggggcaggggctaaactggcagagaatgagctgtgaagctcagggcctgagtttcctctccagttcccagataacaacaacaaaaaagctaaagttggggggtggggtgggggtggtgcatacttgtgatcccagtgctggagtgggagcaggcagggctggggctccagtggccatcagccaccctacgggcccagccccaggccatgtgagcagttctgaaacattcctgaagtgcatttcccagcattctgaccaaaaaaaaaaaagcagctttggaataattgtttggtttgcatgtttaatatttaaaatttatttatttttgtatgtgtggtcatgcgtgccttagtgattgtgtgatcagaggacaactctgggtgtcacttccctccttccatcatgtgggtcccaagttcctttacctgacaaagtacctcaccagccctttgaaaaatgtttttaaaacctcttcaatatgttctcactttaagcagctgtgttcctatggtagtttacacaggagcagattaaaaggcattattagattttacaggatttcagtaatctgaattctgagcccttatttgttggtagatttcttgggaaggttcaggttgagctggtctgggaatgcagacatagtagaaagctgccagacttgcagtggtgttcagggaagacctccccactgccagggtctgaagcaagcgggtgcttaccgtctttctagtaccaagttcagcttggtactagaaacagattggtaccgtgaacagaaagggcagtcccatcaggagccctgtccgacccatgcagttcttttgactaatcggagcagtcccttagctgaacaatggcagctcccagaagctgaagggtcaagtactaggaccagcttgggatgcacagtctgtctccaaaacaaggcaggaatacagcagtcccttggccactttaggctgtctgtccgtccctccgcccctccccctctccccctttttagttgagagctccttagtaacagctcctcagggaggaacgcaaagggaagacggttttggtcacttgacagcagcttgcagacattcaggtccttttaatgatacttttccttgtgtgccttttcctgtgtacacgatgtgaatgttagtgttcatgtcagtggagatggcctgcatagcttacttttgtgccctgtgttgaaattgttttgagacaaactagctgtgtatatcaatcaggctgatctcaaattcatgatcctcctgcctcagcttcccaatagccagaattacaggcagacactgtctaaatgttttctgagacttgagaaaagaaaaaaaacaccaaagtaggtgtcttagttagggaagtcatttaagccccagcccttgttggaagtcctattccaacaaggccacaccttcagatggtgccatccctggtccaaggatatacaaaccatcacattccactccctggcccccatagacttgttcaaaaacatgagtctatgggggccatacttaaacatagcataatgcaaaatgcatttagtccaactttcaaagtcctcatagtctatagcagtcacaacaatgttaaaagtccaaagttcaaggtctcttctgagattcattcaacttaattaactgtaatccccaaagcaaggcaggaaaccagctgtgcaaactccaaactctgcatctccatggctgatgtcaaagcagtcttcagatctccactcctttttcatctttgttgactgcaacaaactgctttctcctgggccggttccactccctgttagcagctttcctcagcatgtatcccatggctctggcatctttaatgtctccaaggcaatttcaatgttacagcttcttgtttcagtgtctgggattccacttgatcttttggactcctcctaagagctggcatcacttctcccatctctgtcctcggtagcactctatgttcaggttgattcactccactacggctgctgttcttggtgatcatcccagggtactgacatctccaatacactggggtgttccactccaactaggcttcaccaatagcctctcataggctctcttcagggtgccaagcctcaaatcctttgcatgaccccttcagtcctgggccatcaactacagctgaggcttcaccttctccaatggccttccctggcctctcacagtgctaagcctcagcttctctccatgatcccttcattccttcacaagcagtaccacctgagtgactcttacacattaccacgtccagccgcagcacgaggtacaaccttgggtatctctggaacacagcttctttgtgctcccagaaaacaatttctagaagatttcacctcagtgatgctggtctcttcttaatcactgctaattccttagctccaactaaccagcatcaactgtcccagtagttccttccattcttaactctagagccagagccacatggctgaagctgccgagttctgctgcttacaagaactagaacatgatccccttgtactattacattatcactagctttatgttttctaaatccttcactgcctaagcttggctatcctggttgcttgctctgtagattgaccttgaatgcagagatcagcatgcctgtctcatgggattaaaggtgtgtaccaccatgcctggatctaattaagctgnnnnnnnnnnnnnnnnnnnnnnnnnnnnnnnnnnnnnnnnnnnnnnnnnnnnnnnnnnnnnnnnnnnnnnnnnnnnnnnnnnnnnnnnnnnnnnnnnnnnnnnnnnnnnnnnnnnnnnnnnnnnnnnnnnnnnnnnnnnnnnnnnnnnnnnnnnnnnnnnnnnnnnnnnnnnnnnnnnnnnnnnnnnnnnnnnnnnnnnnnnnnnnnnnnnnnnnnnnnnnnnnnnnnnnnnnnnnnnnnnnnnnnnnnnnnnnnnnnnnnnnnnnnnnnnnnnnnnnnnnnnnnnnnnnnnnnnnnnnnnnnnnnnnnnnnnnnnnnnnnnnnnnnnnnnnnnnnnnnnnnnnnnnnnnnnnnnnnnnnnnnnnnnnnnnnnnnnnnnnnnnnnnnnnnnnnnnnnnnnnnnnnnnnnnnnnnnnnnnnnnnnnnnnnnnnnnnnnnnnnnnnnnnnnnnnnnnnnnnnnnnnnnnnnnnnnnnnnnnnnnnnnnnnnnnnnnnnnnnnnnnnnnnnnnnnnnnnnnnnnnnnnnnnnnnnnnnnnnnnnnnnnnnnnnnnnnnnnnnnnnnnnnnnnnnnnnnnnnnnnnnnnnnnnnnnnnnnnnnnnnnnnnnnnnnnnnnnnnnnnnnnnnnnnnnnnnnnnnnnnnnnnnnnnnnnnnnnnnnnnnnnnnnnnnnnnnnnnnnnnnnnnnnnnnnnnnnnnnnnnnnnnnnnnnnnnnnnnnnnnnnnnnnnnnnnnnnnnnnnnnnnnnnnnnnnnnnnnnnnnnnnnnnnnnnnnnnnnnnnnnnnnnnnnnnnnnnnnnnnnnnnnnnnnnnnnnnnnnnnnnnnnnnnnnnnnnnnnnnnnnnnnnnnnnnnnnnnnnnnnnnnnnnnnnnnnnnnnnnnnnnnnnnnnnnnnnnnnnnnnnnnnnnnnnnnnnnnnnnnnnnnnnnnnnnnnnnnnnnnnnnnnnnnnnnnnnnnnnnnnnnnnnnnnnnnnnnnnnnnnnnnnnnnnnnnnnnnnnnnnnnnnnnnnnnnnnnnnnnnnnnnnnnnnnnnnnnnnnnnnnnnnnnnnnnnnnnnnnnnnnnnnnnnnnnnnnnnnnnnnnnnnnnnnnnnnnnnnnnnnnnnnnnnnnnnnnnnnnnnnnnnnnnnnnnnnnnnnnnnnnnnnnnnnntacaaaccatcacattccactccctggcccccatagacttgttcaaaaacatgagtctatgggggccatacttaaacatagcataatgcaaaatgcatttagtccaactttcaaagtcctcatagtctatagcagtcacaacaatgttaaaagtccaaagttcaaggtctcttctgagattcattcaacttaattaactgtaatccccaaagcaaggcaggaaaccagctgtgcaaactccaaactctgcatctccatggctgatgtcaaagtggtcttcagatctccactcccttttcatctttgttgcctgcaacaaactgctttctcctgggctggttccactccctgttagcagctttcctcagcatgtatcccatggctctggcatctttaacatccttgagtctccaaggcaatttcaatgttacagcttcttgtttcagtgtctgggattccacttcatcttttggaccctcctaagggctggcatcacttctccatctctgtcctcggtagcactctatgttcaggttgattcactccactacggctgctgttcttggtgatcatcccagggtactgacatctccaatacactggggtgttccactccaactaggcttcaccaataacctctcataggctctcttcagggtgccaagcctcaaatcctttgcatgaccccttcagtcctgggccatcaactacagctgaggcttcaccttctccaatgggcttccctggcctctcacagtgctaagcctcagcttctctccatgatcccttcattccttcacaagcagtaccacctgagtgactcttacacattaccacgtccagccgcagcacgaggtacaaccttgggtatctctggaacacagcttctttgtgctcccagaaaacaatttctagaagatttcacctcagtgatgctggtctcttcttaatcactgctaattccttagctccaactaaccagcatcaactgtcccagtagttccttccattcttaactctagagccagagccacatggctgaagctgccgagttctgctgcttacaagaactagaacatgatccccttgtactattacataaaggttaggcccaggcaaggagatctctgagttcaaggtcagtctgggacaaatcaagtcccagatccaggcttggtggtacacatctttaatctgggccacactttctatagtgccattccctgggcctgtcaccgggtgggggtggggaatgggatggtgagacagggtttctctgtgtagcactagaggttacccttcctttcttctgcccttcatgcagtgcctagctgcctctctggtcagctgcactgtactccgccttgacagaccagccggcattgactttattttattttattttatttatttttttgcagtgctacacgaaacaaaatacacacgtatcatacgtaatagcttaaaatagtgcactaaacagcagccacttactttacacgtatggcattgctttctctttgtgtggggggtgtatgtgtaaaggggttgctgtacaagtgctcatggatgcatacgtgtggaggctggaggacatctccagtgtcagtcattcttcag

SEQ ID NO: 414 - DNA, 5138 bp, Mus musculus
gtacaaagtaagaaagttgaagtcaaagaccatgggagatacagcaaaaccttactttgtgaagcgcactaaagaccgtggaattattgatgatgatgatttcagaaggggccatccccaacaagattatttaataatggatgattatgctaaaggccatagcagtaaaatggaaaagggccttccaaaaaagaagatatcacccgggaactatgggaacacccccaggaaaggactgtatggggtttccagcaatccatatgcatttaaaaacccaatttacagtcagcctgcttggatgaatgataaccacaaagatcaaaataaaaaatggctatctgatgaactcgctggtaatgcagacagctggagagagttcaagcccggacctaggattcctgtcataagccgctcaaggaaggaatcctttcaggaaagtgacgatgcctacaggtggcaggaggggagaggctgcagagctgtgagaaggctgtttcagaaagacctcagcagcctagaagccatgtcagaaatggaagcaggaagtcctgaaaacaagaaacagcggtccagacctcgtaagccacggaggactagaacggaggacagtgagcaggatggagatctggacggtcctgtcatcgacgagtctgtcctttcaaccaaggagctgttgggcctccagcaggctgaggaacggctcaagagagactgcatcgacaggctgaaaaggcgaccacgaaactgcccgacagcaaagtatacctgcaaactgtgcgatgctttgattgactccattccgtttgctcataagcacatcaaggagaagaggcacaagaagaaccttaaggaaaagcaggaggaagaattgctcaccacactgcccccgccagcgccctcccagatacatgcagttggcagcgccattgacagagtggtgcaggagtttggtttacacagtgaaaacttggatcagagactagaaattaagcgtgtcatggaaagtgtgttccggcacaagctaccagactgttctcttaggctttatggatcctcctgtagccgactgggcttcagagactctgacgtgaacattgatgttcagtttccagctgtcattgaagaattctcattaaataaattagggaatttcagccttaaagatgttgagaaagactctgtggtctgggaatacactgacaacagcacaggggacaccagctcagcaaaagaggaggcacccaaagagactgcagcaaagaagggacaggtgccattgacatttaatataaagcatcagccttcagtgccagtcgggcaactctgggtggaattgctgcggttctatgctttagagtttaatctggctgatttagtgatcagtattcgtgtcaaagaattaatatcacgggaatcaaaggactggcccaaaaagcgtatcgcaattgaagacccttacagagaagcaaaaaatggtggcccagaaccccaagcaacaaatattgataaactgggaaatgcagctgtggctcaagatcctggtgttcaaacctcaggtgactgcagagcacagctagttactcttaagaataccactgaggaggtgggaagcccagcaaaggagaagacaggaggtgtgcacatcccagcccaccaggagagctctggctgtgtccaggcagaggtcagttgtgagggtttggaggatgccacagcagagcttccggaaacaggaagtgacaacgaggaagtcagaaggaagaccaagcatcctttgagcactgatgaccaaggtttaagcagcagcaagcacccagaactgcagaactgtggcagcctgtgtggtctgcaggcagacaacactctggagctcagcattaaccttacagaagatgaggagggggttgctaatgagcatcaggtggacagcaggtatgctgggtcaggtgaggaggatgccctctctgaagaagatgacttggcagagcctgctaagggtgaagatacaggagaatgtggagaaaacgtgggtgggactctgctcatagacctaaatagaataacacttaaagaagaaagctttcctgaggaagatttacctggggaccagtctgagttcttctacgaatttagaaaactgaccttcaccaaaggcaagtcccccacagtagtgtgcagcttgtgtaagcgagaaggtcacctaaagaaggactgtcctgaggacttcaagagggtccagctggagccgttgccacccctgacacccaagttctcaaacatcttagatcaagtctgcgtccagtgttacaaggatttttctccaactattgtagaagatcaggctcgtgaacatatccggcaaaatctagaaagtttcataaaacaggattttccaggaactaaattgagcttgtttggctcctccaaaaatggatttgggttcaaacagagtgaccttgacgtctgtatgacgattaacggacatgagactgctgaggggctggactgtgtaagaactattgaggagctggctcgagtcctcagaaagcactcagggttgaggaatatccttcctatcacaacagccaaggtgcccatcgtgaagttcttccatctaagaagtggtctggaagtggacatcagcttgtataacacactggcgcttcataacacaaggctcttgtctgcatactcagccattgaccccagagtgaagtatctgtgctacaccatgaaagtgttcacaaagatgtgtgacatcggtgacgcgtccagaggcagcttgtcatcctacgcttacactcttatggtgctatacttcctccagcaaaggtctccacctgtcatccccgtgcttcaagagatatacaaaggtgaaaagaaaccagaaatacttgttgatggctggaatatttactttttcgatcaaataaatgaactgcccacttgttggccagaatatgggaaaaatacagaacctgtcgggcagctgtggctgggacttctgcgcttctacactgaggagtttgactttaaggagcacgtgatcagcatcagaagaaagagtctgcttacaacttttaagaaacagtggacctcaaaatacattgttattgaagatcccttcgatttgaatcacaatcttggtgctggattatcgaggaaaatgacaaattttataatgaaagcttttatcaatggtagaagagtatttggaattccagtcaaaggatttccaaaggacaacccctcaaaactggcatacttttttgatccggatgtcctaactgagggagaactggccccaaatgacaggtgctgccgaatttgtgggaaaatcgggcacttcatgaaggactgtcccatgaggaggaaagtgaggcgacggagagaccaggaagataccccaaaccaaaggtactctgagagcaaagaaaaaagaagcaaagaggacaaagagattcagaacaagtacacagaaaaggaagtgtcaacaaaagaagataagctcacaccgtgtgcagctgcgaaagccaagccagtgagggcagctgtcgacctgggccgggagaagctcctcaggacgcccacagaaaagtggaagagacaggacgacagagactcgagagaaaagcgttgtttcatctgtggaagagaaggacacattaaaaaggaatgcccacagttcaaaggctctccaggtttgtgtaagtcagattatgtgtctgcatactcttcacctagcccattgagaccagttgctcaggcagtgcttttacatgaagacaaaaagaaacaaaaaacaaccatatttttgagtccccagtcaggtagcctttccagtaaatatatgactcaggggagagcctcagtgaagaggacccagcaggaatcatgagggaaggaactgcagcactggaaatgccactcaggtgtccgtggccacttgggaaattaggttcatggcacaggacacagtgacacagatcaggcttcaacgtaacagttgaggggcatcgtaattttttaaattttaatgaaattgttaataaggaaaagaaaaattttaatatagtctaactataccaccaatctccagagatttgaagattttaatagaaagtcaacttaaaagaaaaatatgagggccagaattcaatgactacagcgtcatggattttagttctttcaaagcactctaaaaatagtgtgctgctcaccagaggagttagccctctttccctacacatcccctttttgatttccaagaggggattctctctgttgttcctggatcgtggtatggacgcacatcaaggacatgtggactatactgctgtacatagggtctacaagcattcttcatggctcattgtagaaatgatagcatggaatgcaagcacctgtcagtgtgggcctcggtggacgaccacagcaccactggcacatctttgagggcttccttctctaagtaattgacagaactgttgtgctcataaaaatgaagtcataaaaataagtagtccttttttgctggtttaaaaaagaaaaattaaaggagaaaaggacagaataaaagtgctttttactttttatgatacacagaaattagggtggagagcttttacaaacctctgaagatcaaagaggctgctgtctctgccaatcacaagtttgattggcaaccttctggtctgactggagccctctctaaactgttaatgaacttcacaagcctttctgaaatagtacagagtcagaactatgccggtttatttatcattttgaaataaaatcgaactttgaacgtgtaattttatccacattattttcttatgagtcattagaaaagtcaaccaaagcgctgacagtacacatctccttaatagggtgcccatgctgttcccctttgatagctgtgcaccgggtctggggtgtgcaagcaggagactggggggcagagagagagcttgctaaggacactggcacaacgagggagactcacgagaggcatatatgtgtgaactagactggtcatagtctagttatgaaagagtcatgtcaaaatggaaatcattaagaaattggaaatcatggtaaaaaaataaaaatggtgaccatcaaactcatgggttgtg

SEQ ID NO: 415 - protein, 1296 aa, Mus musculus
YKVRKLKSKTMGDTAKPYFVKRTKDRGIIDDDDFRRGHPQQDYLIMDDYAKGHSSKMEKGLPKKKISPGNYGNTPRKGGVSSNPYAFKNPIYSQPAWMNDNHKDQNKKWLSDELAGNADSWREFKPGPRIPVISRSRKESFQESDDAYRWQEGRGCRAVRRLFQKDLSSLEAMSEMEAGSPENKKQRSRPRKPRRTRTEDSEQDGDLDGPVIDESVLSTKELLGLQQAEERLKRDCIDRLKRRPRNCPTAKYTCKLCDALIDSIPFAHKHIKEKRHKKNLKEKQEEELLTTLPPPAPSQIHAVGSAIDRVVQEFGLHSENLDQRLEIKRVMESVFRHKLPDCSLRLYGSSCSRLGFRDSDVNIDVQFPAVIEEFSLNKLGNFSLKDVEKDSVVWEYTDNSTGDTSSAKEEAPKETAAKKGQVPLTFNIKHQPSVPVGQLWVELLRFYALEFNLADLVISIRVKELISRESKDWPKKRIAIEDPYREAKNGGPEPQATNIDKLGNAAVAQDPGVQTSGDCRAQLVTLKNTTEEVGSPAKEKTGGVHIPAHQESSGCVQAEVSCEGLEDATAELPETGSDNEEVRRKTKHPLSTDDQGLSSSKHPELQNCGSLCGLQADNTLELSINLTEDEEGVANEHQVDSRYAGSGEEDALSEEDDLAEPAKGEDTGECGENVGGTLLIDLNRITLKEESFPEEDLPGDQSEFFYEFRKLTFTKGKSPTVVCSLCKREGHLKKDCPEDFKRVQLEPLPPLTPKFSNILDQVCVQCYKDFSPTIVEDQAREHIRQNLESFIKQDFPGTKLSLFGSSKNGFGFKQSDLDVCMTINGHETAEGLDCVRTIEELARVLRKHSGLRNILPITTAKVPIVKFFHLRSGLEVDISLYNTLALHNTRLLSAYSAIDPRVKYLCYTMKVFTKMCDIGDASRGSLSSYAYTLMVLYFLQQRSPPVIPVLQEIYKGEKKPEILVDGWNIYFFDQINELPTCWPEYGKNTEPVGQLWLGLLRFYTEEFDFKEHVISIRRKSLLTTFKKQWTSKYIVIEDPFDLNHNLGAGLSRKMTNFIMKAFINGRRVFGIPVKGFPKDNPSKLAYFFDPDVLTEGELAPNDRCCRICGKIGHFMKDCPMRRKVRRRRDQEDTPNQRYSESKEKRSKEDKEIQNKYTEKEVSTKEDKLTPCAAAKAKPVRAAVDLGREKLLRTPTEKWKRQDDRDSREKRCFICGREGHIKKECPQFKGSPGLCKSDYVSAYSSPSPLRPVAQAVLLHEDKKKQKTTIFLSPQSGSLSSKYMTQGRASVKRTQQES

SEQ ID NO: 416 - DNA, 71207 bp, Homo sapiens
tttgacagtttttaccatgcatgcctgtgaaagtaggtttagaaggttatattgcctttcagtgctagtccactctagatgtgaatgggtatgttccaagaagggattttagtaatttctttccagtttttatgttgttagttagaaggctgaatttcaggatttcatcctttttttgtttgtttgttttttagacagagtctcactctgtcacccaggctggagtgcaatggcgcaatcatgactcaccacagcctcacctcctgggcttaagcagtccttccgtctcagcctcctgagtagctgggaccacaggagtgagtcatcttgctggctgatttttttcatttttgctagagatgacatctcactatgttgtccaggctggtcttgaacttctgagctcaagcagtcctcccaccttaccctcccaaagtgctgggaattacaggcatgacccactgcacctggccccatccatattttaatctatattttcaatccctttactttgatttagccatgtgttcttggagaagttattctcttggattcgcattgtccccatctgtacaatggggacagtattagcaggattgctgtagggattaaataaggcagtacatataaagtgctttacatctgttgcataataagatacaccatcatggtagctgccattatctgacagaatttctgcagccatccacttctgtataaaagcagtaggagttgattgaggtctttggaggaagagagaagttactctttctagaaaatgacagcaaatatggttatatggagaaacctttgtgaccagaagagaggaagagtttaaaaaaggaattcggttccctatcacttactggcttgtgaactaataggggcttttctaaagggtattgcagtattattttaaatttatagagtttttgcctaagaaacctgtaataaacactgaagttagatgcagtttttttgataatgtttataatgataagcaaactaaatgagaatggatacatctctaagtaaaagaagtgcttatctgaaaaaaaaaaattgttcagaccagaaatactggccttaaaagattatgataatttaattgggagtcgggggagtattaaaaaggaaatattaaggtagcgcaaggtagcctgattttctgttgaaatgacaacttaccttttagtattttatttgttcagtgtattttgattgattttttaaaactacttttccaacactttaattttttttaattttttaattttcttatattgtggaaggtgtttgcagaattttgagatagtcatctcaggtagttttagcacaatgcttgctgcttatcctttagcgctctcagcaagctttttataaaattggaggtcctatatttccttttcagcctgccagttcattgtaattgccatactagtagtaatgagttcctctgaaaacttgatggaggaattacttcatgtagggcttttcagtaggtttatgtttccaagcactaatgtgttactaatagtttcattttttaaaactcgatataagttatcaaagctatctaaaacaattttttatggtttaatcccacaatcactttaacaagttgaaaagttataagttttaaaaaggaacaggatgatttttattcattataaggattatagaactaatagcagagtttataaacaaatgtacttagagaaaacttttgtttcaatggccagttgtttttttcctttgaaatatgctcagtgtacaggccattcaaagaagctaaaatgaaggtaaaggtaaaatgagagatagttgtccttagtaaataaaattttggcttggacttcttcatattaacggagggacccggcttaggtgttattgatggctaaatttgcaactaaatgatgatttttcactccagatgagtatatagttgatttctgagttgtccaggggtacattttgcattttgccttattgagattgttcacttatagaagatgaaagcaaatgtggctggttttaatgagaataacaggtgtacttacagatattatagaatatgtaagatatatttacaatatgtattgtaatattttaatataatagaattatagatatacttgccttcagagtataatttttctgttgctttgctatgctcagcagtataccaggaagagataataaaaatcaaattgtatgattgaagtagaattcttttaaattttccaaaaagatgatttctatggcttaatgtctacaggtgatgtgctcactgaatacagtattaaagcattttgtccataggacagctacctttccttctgctctgcatgcagatgtgatttattctctcacatgatttaatacatatgtaaggtctgctttttactcaggagtggcattatttaatattgccaataatatttttcccccaccttaagaaaacaagaagcagaggtccagacctaggaagccacggaagactagaaatgaggaaaatgagcaggatggagacttggaaggccctgtgatcgatgagtctgtactttcaacgaaggagctgctaggcttacagcaggctgaggagagactgaagagagactgcattgacaggctaaaaagggtaacatccttatatatatatttgttggttagaatcctggttttagcctcaattttgttgttaattgagtatgcatgctctgatcaattagatatcctactttggttatcagtatttaagcactacaagttaaaagtgatgtccagtgtgatttaataggattaggagtcattgctattatacttaaaatgactgttagggtagtgataaagggaacaataacagtagcaattttaaaagtgaagaagaagccaggcacagtggcatgcctgtagccccagttacttgtgaggttgaggcaggaggattgcttgaactcaggagtttggggctgtagtatgctataatggtatctgtgaatagccagttcactccagccagggcaacatagtgagactcctgtctctttagagaaaagaaattgaaggggaaatcatttcctggctgattttgtttatctgaatgtttggttttacttatgtctctctctaaataaatctcttcaaattatagcgaccacgaaactaccctacagcaaagtacacctgcagactctgtgatgttttaattgaatccattgcatttgcccataagcatatcaaggaaaagaggcacaagaaaaacattaaggtaaattgaatgtaacccaaacaagtctgcttacttgttagttgttattacttgtcatctttgtggctttcttctccttaaggctatgatattgataactttactgctttatttattgaatatatttgagccaaaatacataatactggtcagatgtattttactggttaatcttgtgaatttccttaagggcagcatcaggttatatgaagtcattgataggacccaggtatatgtccttatactagtattaaagcaaacaatgtttgtaagtgctgtttttaatattctttccttacactttctccttatgcccacctatcctctgttaccactgatccacattatgtgcataaggaagtatgtatatgtttgataggatgaaaactaacacagctaaaatgagaagggagggctaagaaaaagaaaactctatagggtgttgtcttcatgagtggtagaaggtcaaaactatgtgtaagtcatttttaatctcaacatttgatcttaaaaggagaagcaagaggaagagttgctcactacgttacccccaccaacaccctcccagataaatgcagttggcattgccattgacaaagtggtacaggaatttggcttacacaatgagaacttggaacagaggctggaaattaaacgtatcatggaaaatgtgttccaacacaagttaccaggtattttctagatttgtttttctatttaactacctaaaagtacctcattcatttctcctaccaatagtaattttcatcaaataaaaatttatttaccatgtcatgaagctcttgtgttttctatttttttgttttttgttttccctggctttccctaaggtaacaaggactttcatatgcattgtcattataaacctgtttccattataaattttaccctgtgtgtgaactttaagttgaatgccctgcattattggggcactgtgggactcttgtgtatgtatgtttccctttccgctcatctaaattgacaccatattttgagttaaaatcaagagaagtatcctgaagttattttcaggttattcatgtcaaaaaaaaaaaaaaagattttatttaactgtacttaagagaattgcagcatctaaaatgaactttgaaaactagttttaagaaatttgtattggattttgtgcactgttgaattgattttccaagttatgtctgtcttctgcctgtttttaactttagacctttggcatgatggggagggggcacaactatttggagtgtattactatgaaaatttaaggtcaggtatgttcaatgcctgacacaactgctgtcaatccttgatggcaacaaaccccaccccacatcatcccccaacccccactggccattgctgtttaggtaaatggttggaatagcttcatcattctcaattcttgctgtgcatcagaattatctgtgaagccatggacaactatttttacaaagctcgacaagtgattctgatccacagctagggttggaatcattatttatatttgtcaccttataaatcttaaaactgtttgttctactgaaagatcatacatatagtatttgtaacgcatatactttcataagaataagggaaaataatctcattttattatacatgtatttcctgaaaagtcagttgtaattctgatgatttttactgtaaaatttcatgtaaaaatgaatgtactttgttgtggaaaactgctaaaacccaaagaaatcacttgaattttagcaaaccttaaacaaacaagaaaaccaacccctgatgagaaaggatactattttggcatcatagtaaaacactgaaaataaatgctatactatagatagtactcatatacacacacatcttcctctgaagagtgaagtgtctgctacctatgtcagtgatattgtaattatttttcaaaagtttattgggattttgttacagcaaacgctttttgttcataatataatgagaaattcatattaaatatgtcaaaagattatttttattattgttttactaaaacctccttatagtaaattacaccaatgggtgcattctaaaaggtgaaaagaaacgtttgcattagctcttgaatatactatcaggtttataaatttaaacaaagacattctttttcaactggcacatttaaaaaaatattttaaatagtattttcttcataaaatgtgatatttagataatagtattttattcataaaatacatgataacgtagcaatttgacgttttacaactgacatgaagcgtggctgttaagctaaatcatagttgatgcagccttccctattaaattaagtgaagagcaaagagccacctatttctgtcctttgtttatgctagtcttgaatacaagtttgcttttgtgtgtaattttaattgatggttctgcttctgaaatagcagtgttttgttataacttttgagaaattctactgtatttattacttttatttatttatttattttttagattgttccctaagattatatgggtcatcctgtagcagattgggtttcaaaaattcggatgtaaacattgacatccagtttccagccattgtaagtacaaaatgaaatgctggcactttcagagtggtatggaaattctttcttacaaatgtaaactgtctatgaatatattttagatatttgaagatattttaagtgtaatgacagcatccgcttgccttcagtttcagagcttttttttttaatactctgcaaattttcatacttattttagtctatagatcttttatacatccaacactggtttttcaaccatgtgcacctgatgggggtgtttaggttctgttacttaaaaagagtaaattttcttgataaaatcaactttccagtggcagaaagggaattcagattttaaagtgtagatatttaaacatttatgatctgcaagcttaattgtctctggagtttcctctttttgtatacctattttgttaaaataattaggcttttaaagaatcacacctagcctggatttctggtttaaacatgatttaaaagtatgttgatgagttagaattttaaaactggagtgtagctggacacggcacagttctgtagtcccagctactctggaggttgaggcgggaggatcacgagcccagaagttcaaagctgtagttagctgtgactgcacttgagaattgccactgcattccagcctgggcaacatagtgagaccctatctcttaaaaaaacaaaaaactgaaaggcactttagtagattatccatttctctgctgttagttcccacaggcctgtttatagatgatgtgtttgcagttacttgggttgcttgttaaaaatccatattctgagctgggtgcagtggcttcaccctctaatcccagctactcgggagactgaggttggagggttacttgagcccaggagttcatgaacagcctggccagccccacctctctcaaaaaaaatccagattctggggccccagaggttctattttacaacctcttacttcttgctaaacctgagtgctgtagctacctggtaagctacccaatagactgtttttttaaccttaaattctgatcagtgatttaccagccatagcagttattttgatccggtgtcattaattcatttagcaaatattcactcatcccatttgtatggcagacatactaggttataaaggacaaaacagagatggttcctctttatggaactcatctagtaaaggagattagtaattaccttgtaattatagtgagagctgtgcaggtaaaggttcagggatagaaaatgacaaggtctgggcagagatacagcagtcatgaaggcttctttgaagagggaacatttaagctgagttctaaaagacgaaaaggagcctgcaggagagggggaaacgggagggaaaagagtttcaggcagggggagcagcatttgcaaataccctaaatcaataaagagtttggcatattcaaggagctaaaagaaaggttgtgtaagtatggtgaagggaccaagaaaaagaagagcaggagattaggatggctaggtaggctgggcttgactggccgaattgtgtagaccatggtaaataaagaatttggttttgacctaagggcagtaagaagtcattgagagttgtaaggatacagtttatgattttaaatggccctggctccattgcgaaacaaggattttaaaaagaagtgcaagactgactccgggaccagtaagctatctgttgcaatggtattagagtgaaaggtaatattgttagcagtttgacaaacttccagctaccactttgagacttgctgagaggcaggttaacctcaataattagttaaatcagaagttagttgtatagtaggtctcttgcccacatttgtcttcatttggtgttgatctgtctgtctttgactgacatatgcaaacaacatagtgagtaatttctttactttgatagcaatgtgcatttctcatttagaaaggaatttggggaacttcggatgactcttatatcagtgaagcaaaatcacttaggaataatttcatgtattcattgatttatttcctagatgtctcagccagatgtcctcttacttgttcaagaatgtttaaagaacagtggtaaggccaaattccacatttaaaaaatttttatgttgtctataatttggatctatcttatttctcaaactttgaaaatagcaaggcatgcttttaaaattatttatgtgggtaatatccaaagcaaatgcccatgaattattaactagagtcctgttagtagttctactatgcagaataaccatttcataagtaaagcttttagcttgatgacatcatcactatttataaagattaaatgagtcctagatgtgactaagaaatgcaaaatatgtaaaatgtactcttgagggtaaaactgaaggataatctgcttttatcaatggttaaaatcagtattttaccaacagtgaataggtgtaacccaaccctaattaatgaatccacagagtggtgcccatttaggtttatcagttgtctaatacaatgtccagcttggggctttatggctctttgtgttttacatagtccttatgaaactgtgtcatctcttgaattagtcatccccatcctccttgttttggttaaattttgtcttcgatcaatacatattttgacactgaatattttagtagcttttacagcaactttgtttttaaatgtattacctatatttctaattgttatccatataacatttgaattttctgatccaatgatgtagtcacttataatgaaacattcactttacaaactaagggttttacactaatgtgataacttggtttttgaatgtaatattttttccttttcaagtcattgcagagcattatttagtagtggtctttcaaaagactcaacagctaagggacaactggtacttgtactttatctggttctgcttttaaacaaagctttaattaaccaacttaatatttttcttcttctttcctcagactcctttattgatgttgatgcagacttccatgctagggtgccagtggtggtgtgcagagaaaagcaaaggtctcatttctttaaactgtttatttactaactctcaacttgccaaaagcacaagtactttactacatcttaatgtccaatttctagaattataagctttttatttggttatcacacatggttcctactaacattctccctatacttttggcatttgatgtaaaaggggaaaatctcattttaaaaataataaaatgacttaaaagaaaaaatatagcaaggaagtatttcggtccatttcaactcgttaaaaaacagccttattaaatagttacttgctgtaatcacctgtattttgccaccctttttggcagcatttatggcagtgctgagtaacagtgtgacctctctggtttatctctctctgcctctgtgtgaaagcattactgtcactactgtaaatgggtggtttataggctgtaatgattcttcattaggtacattcctccaactcttgggaaaacactcttttattgttacagagatgaatcatgctcccatttgaaacttttttttttgagacggagtctcgctctgttgcccaggctggagtgcagtggcgcaatcttggctcattgcaacctccgcctcctgggttcacaccattctcctgcctcagacttccgagtagttgggagtacaggtgcccaccaccacgcctggctaattttttatatttttagtagagtcagggtttcacccaggatggtctcgatctcctgacctcatgatctgcccgccttggcctcccaaagtgctgggattacaggcgtgagccaccatgcctggcccgaaacatttgataatattttccttatttgcatttccccccaaaaaataatatttgaaaacaaaattattaatccgaaaaataaagtttactcagaaaatagccacgatatcttttttgtaaagaaaatttattaaattactcataaagatgtagtttttttcacttttaagctttttatttttgaagtatttattatgcatgtatattagttgttggcataaaagacactttgagacctgtgtaacacttttttctttttttctttcccatcctcctcccccacctctcaccagtggtcttctgtgtaaagtgagcgcaggaaatgaaaatgcttgtctgacaacaaagcatttaactgcccttggaaaactagaaccaaagctggttcctttggtgattgcatttaggtactgggcaaaggtaggcttgaggtctttatgcatgaatacattctacatatgtataagcagtatgctttgatttttacttaatttaatcttcagtgtttaaatgcaaatttatagacatcaaaagagaaagacatctgaattttgcaacagaaacgtacagacggaagattcagtgtttctgtttcactttaacggtattgctcaaaagatcaaaatgatttatagggcttattaaaaatcagatttgtgagttaaatctcagaggataaggcccaggaatttacattttaactagtttaccacagtggttgttaggcacaggaacgttgagataaagcttctcatatcatgtccaataacatacacagagacggcaaaaaatagaagatactctctgatcttgtttacatttccataatgttttaaatatatttcaattaaaatactcaaacagtagaagatttaacgttcccccaaaatgtgaggttgagtcatgattataaaattgagattctgtcgcttgaacctgggaggtacaggttgcagtaagccaagatcgtgccactgcactccaccctgggtgacagagcaagactctgtctcaaaaaaaaaaaaaaaaaaagagattccatgtatgtgcttttagagaaaatcaaaagctttactgattcaggtatatcaataacaatagatacttcccgtttcttggatcctgaatgaacaacggatttcccactcttcactggctaaattataattataatatgctatcctttgaaaaccaccgcctgcttcatcactaagtagaacatgcccttttagttgttatttccattagtggtgatgagtttgtccacgttctctccccacgccaatctttgtgaccaaagcatgcatatgcaagacgctatgggttagggtaagaggaccattgaactggcttaatgtgtaactgaacaatcgtttttaattcattaacatgtattctaaacaaatgaatgaattgaccatggatatcaaaaaataaaataggaaataatattttagggccatccacaagtgagtatggttaacaggattaaatattcaaaattgaaactatcacttaaaaccacaatatgtggttgctgcaaaagtataaggaagttgtatattttgtaactgctattttcagctgaagaattaccgtaaatcatgtagtaaacaagaatgaggttacaggttttaggccaaatcgtgtaaatgacaaattcatacaaaaagaatgcttaactttcttttctcttgtttgtagctttgcagtatagatcgccctgaagaaggaggtctgccaccttatgtgtttgccctgatggccattttctttcttcagcagaggaaagaaccccttttgcctgtatatctaggatcatgggtataaaacattttttttgcttatatatctgaacagattttattacaggtccacaattaaattttgcataatttcaaaatctagacacctaaccagaactgacatggatttatttattctactcatgtgaatattcatacctttcactgctgaaatactaatgtgtttgatttcagtatgttgccctataacctgcttagggatattattacctttctagactgcaaaatctcttaatttttgaaatatgtatggtcctgagacgaacaagagactgaccctgtaaatttaccatttggtacattctttctttgggtacagttttctaaattgatacttgaatttacatatcacctccagacagacagactgtgggaagcatttggttcactgtaacttactttctgtttctaatctatttctccccataacctgtaaaacaaaaaaatatataaacattgaaattgctacctgtaccacaagatgcagaacctagtagtcatctcttgaataatattttgacattattttaaagatgaattagaattcatgtgatcactctttctttctggataaattaatgttgagttgatttgttcaagtaagatttaagaagagaccatctgaaagagtcaacatgatattagctcatcctcttagaaaccttgtttgtaatcccttggtattaccttgatacacttttatgtgtagaaaaactcccattttatagaaagaccccttagtgaaaagcttactttgacacattggctattgtaactacttttcttaatgcacacaagtttctctcatcatttaaggagttcttaacaatgagtacacatcaaaaaatacatttaaagagaattttttccttatactgaataaggtgagattaagcagggacttctgtctaccaggccgtgggaataaagactgaagtagaataactcacttagaaaactatcctggcataagggattattgcatgctgtgtatcctagtaacctaaaggtagttctcttcgtgcctgtggtactgagagaattcagagccatgagagggtatctctaccagactactgtcctggtagaaaaaagagcaagagaacaaagtcaacccttagttgataaataactctttccagcacacccaagtaggaatgtgtgaaagtctttgaagttttcctttcaccttgatctaagagagataggaatttaggataggattaaatcaggtggactcctgcacctaaaaaaaccctggcacaagttggataagttgccttgctcactaccatcttactgaatgagatctgctttttcatgtgtcttgatcttctctaagtagtcatctgtcattaacatgagaatgcaggaaaaagaaaaatctcttctggtgatgagattctcctaaggatacttcagggtagtatggataccctttcctatggccagcatattatttccttgttagtgataccggaaactctctaaagtgatactgaatttgattttgattggatcatgtttgttcaaaatttaatgacaaaagcaggtatgcagtgatcaaacactggattgaaatcattggatccattaaggcacactaccacccgaaccaaaatgatcctgcggtgttcagcattttaaactagttaggaagtgaagagaatggaactaatacttactaagtatctttatgctagatattttacatacattatttctgcagaaaatccaatgaggtcctcataattatgtacatgagagtatctaactgttaattccttcaaaatatttaaagcactgtgtatactagtcattgtagtagtgcctgaaatacaaagatggacaagaccaaattccctgtcaggaagtttagtgtattgtgcctgtgttctctgatctgtcttttcacaaatcttttagtcattctgtcccgacctacccagatctcttccatgttggagactccaaccctctccaacctttattcccaatcataattcccattttattgtcattaaatcttgatatgattgaagttaatcatagtgagttgtgaatgaagaataattttatattataaaaacctagtccttagcagatattcatactttagagatgccaggtaatatagtagaaaaaagggtgattttcaagtttaccagcactgggactcatctctgttttgccactcacatccttgtgaccttgagcaagttatttaatctctgagcctcaatgtcattctgaaccttgaatgagataatgaatgtaaaattcctgaaacaaggaaggagaacaaatgttatagtccttttctccttcagtagaaagtcaagttccacttatggtgtggaagtgtgaactcctaatcaagtgatccttctgcaaataacaactataaactctgggcaacatacagaaacaacagcatcaaaaacctgcagactgaacaaatgcaaacagtctttagaggggagtcaaaacttggagcaaatgaccaacacagagtgagtctcctgtttttctgtagctctacccctaaaggcaactctgatttaagacaaaaatcagtcctcttcctggccagaggaaccagggccaccagaagataaggtgtacaagaggaggaactgaaaggaaagataacagataagtggaacccttaaaacccttaaaaagaaccctgggtataaaaactcaggatgtctctgcccaactcctgaaccagtttagtttggcatgaaaggagcccagaagtcgtcactctcatcctcacaagaaaaaaaactgaacaaacggaaaatcaacaattctttttggatccatcagacaattgatgtcatgggcaaaccactgcccccagaattagagagcagggtaatacagtgaagcacagcttaccagagcagaaggccaggagcggaatcctgccactgaagccaatactagggtagaaaaatttaaagtgtagttgacaaatttccgaaggctcagtttggacaagcttgagggttaaaaatttctcccattcttaggagggcttcctcagacttttgtgtgagttatacctccaggaatcccactaagctctgagggtaaagacctgagaaaaatctcccagtgcttctggcaggatgagaggaaaagttgccatttagaaataatgcccagagcattctttaattattgaaagcctgcccttcggaggtactcttactgaagcctaaccaccttgggttttacttgccacgggaagggaggtacctagctccactgctccagccttcctttctcatctaagtaagggtggtagtaggagaactgggaaatagttatgaaggtcactgtctaggggcacaagctcactaaaagactgagacctaatcttaggactatacagtgtttcccctctccagggatcacaaggtctgaactacaagtctcagaccttttttaagaagtctttagggaaacacagaggcaacaagggagacaaaaacaaggacaccagaggaattttcagctacgacagctgcagaaaacaataaacatcctaactcctagccagataaacataaaacctcaccctaaaagcctgtttacccagtacatcgtgtctagctttcaacaaaaaattacaaagcatgctgaaaggcaaaaagcacagcttgaagagacagagcatgtgtcagaacttaagttggatatgacaaatgttgaaattgtcagaccaggaatttaaaataataatgattaatatgctaaaagctgtaatggaaaaaatggacaacatgcaagaataaatgggtaatataagctgagaagcagaaactctcaaaagatttaaaaggaaatgctagaaatccaaaaaattataacagaaatgaacaatgcctttgggctcattagtagactagacatagccaggaaaaatctgagtatgaagtgatagcaacagaaaattctcaaactgaaaagtaaagaggaaaaaggaacaaaatacctaagaactgggtcagttagtcaaggttgaaacatatgtataatgggaataccaagaggagaaagaaaaaagaacagaagaaatagtagaaggactaatgactgagaatttttcaaaattaatgccagactcctaaaccaggcctgtgtggggcagattgaatatagttgggggccaaggcttaaagaactgatgcaagagctgagccacaatctactggaggtgtgataatttccagtttgcctaaacaagttaattacctgctgctaaaacaaaaacatcactttttggagtaaaataaatgattaaaattttaataatataatatttacaatgtctaaaatgcaatccagaattactcagaaagagtcaagaaagtgagacctactctcaaaggaaaagaaaatgaacaaaggcaaactccaagatgacccagatgcaactgtcaaagacattaaagcagttattatagctgtgcttcatgacagaggaaataatacatgtggaataaatgaagagataggaaatgtcagctagagaagtaggaaatatcaaaagaaccaaatggaaattttgtctgagtggacaaacagaaaacactcaaatgttagacctaaaaccaatgatatcagtaatcaacttaaatattgacagactaaatatccccactaaaaagcatagattaccagaatttatttatttatttttaactttcaggttcaaaggtacatgtgcaggcttattatataggtaaactcatgtcacgggtttattggacagattattttatcacccaggtactaagcgtagtacccaatagttattttttcttgctcctctccctccttctacccttaaccttcaagtaggccccagtgtccattgttcccttctttgtgtccatgagttctcattatttagctcccacctataagtgagaacttgtggtatttggtatttgattttctgttcctacgttagtttgctaaggataatggcctccagcttcatccatgttcctgcaaaagacatgatcttgggtttttttatggctgcatagtattccacggtgtatatgtaccatattttctttatccagtgtgtcactgataggcgtttaggttgattccacgtctttgctattgtgaatagtgctgcagtcaacattcgcatgcctgtgtctttatggtagaatgatctgtatttctctgggtatatactcagtaatgggattgctgggttgaatggtagttctgcttttagctctttgaggaaagtgttcccttttcactgcaaccttgccagcatctggtatttttgactttttaatagtattctgactggtgtaagatggtatctcattgtggttttgatttgtatttctctaatgattggtgatgttgagcttttttcatatgctcattggctgcatgtatgtcttcttcagaaaagcatctgatcatgccctttacccaaactttttaatggggttattttttccttgtaaatttgttaagttctttatagatgctggatattagacctttgatatatagtttgcaaaaattgcctcccattctgtaggttgtctgtttactctgttgatagggctatgcaaaaattcttcagtttaactagatccccttcagaatgaattttaaaagcaagactatattctagaagaaataaattaaatataaagacatataggttaaaagtaaatggatggcaaaagatgtaaattgtaaccaaacgagagaggctatgttaatatcagatgagattgatttcaagtggaaaaaatatgccaaagacaaaagggacattttattagggtagggtcaattcattgggaagacaaaacaatcgtaaatgtttgcaactattaagagggcaccaaaatacatgaaataaaaattgatggaatatattctaccatcagacaaggagattttaacagccttcatcaattgacacctgtgttagctaaacaaaaaatcagtatagatagtataaactgatacatcatatcaaccgccttgacctaattaatatttataaaacactatacccaataactggagaatacatattttttacaagtccatatggtacattcatcaagatatactacatgctggttcttttgtttttttaatttaagagacaaggttccactatgttgcccaggctggtctcaaactcctgggctcaagcaatcctgtgtcagcctcccagaggagggcctatgctggttcttaaaataagtcatagtacatttgaaaggattccatggattaaagaggaattcaagtgggacattaaaacatattttgaactaaataataataaaaatgtaagatagtttggcatagtggcacacaccctagtcccagctactcaggaggctgaggtgagaggattgcttaagcccaggaggttgaggtcgaggctgcagtgagctatgatcacaccactgcactccagtctagaaaacagagcaagaccccatctcaaaaaaaaaaaagaaagaaaaaaatacaagatatataaaatttgtcagatgcagctaaaatagtgttcatagggcaagttttagatttaaatgcttaaattcaaaaagaaaggtctaaaatcagtgacctaaaggtccacctcaaaaagctggaaaccaaaatgggtgaaagacctaaatgtaaaagttaaaaactctgaaactcctagaagacaacctagggaaaaacctttgcagaaaggatttcttaacatactaaaatcaataaagaaaaacattaagaaatcaaactttatctaattctaaaactgcagctcttcagaaaatatcactaaataaacaaaaactcaagctacccagttgagaaaaatattgaatacatacatccaaccaagaaatagtcactacgcctaatattttccaaagtgttttctgtggaagactagttcagtctgtcaacaaatctttactgagcagttaccatggccaggcaccaactaattctgggtgttactgttagaagtggtgaacagggccgggcatggtggctcacgcctgtaatcacagcactttgggaggccaaggtgggtggatcacctgaggtcaggagttgaagcagcctggccaacgtggtgaaactccatctctactaaaaaaatataaaaaaattagctgggcatggtggcaggcgcctgtaatcccagctacttgggaggctggggcaggagaatcgcttcaacccaggaggtagaggttgcagtgagccgagatcatgccactgcactccagcctgggcaacagggtgagactctgcctcagaaaagaaaaaaaaagaagtgaacaaaacacaattcttgccctcgaatttatacatccaattggggcaagagactaataaatatatatgcagtggtggtactttctctgaggaaaaataaaccagggtaaggaggacagagaatgataaatgtggagctccttagagaaaacatttgagcagagctgaataaagtgagggagaatgagtcatagtctccctcactttgttagggggaagagcattttaagcagagggaataccaggtgtcatctctgagccaagaagatagaaggatcagagaagtagaaaagagccaggttactcaggccctggaaaggactgcacttcatctagagtgagacagaaaccactatgaacaggagagtgtgtcttctgttttagaaggatcactctcttctaaaccaatgaagtagcccatttggtataaaaatacatttgggaaatgtgatgtcacatccatactccatcccatattattttgttcattaacctgtttttgtttgttttttgttttgttttttttttttgagatggagtttcgctcttgttgcccaggctggagtgcaatggcaccatctcggctcactgcaacctctgcctcccagggtcaaacaattcttctgcctcagcctcctgagtagctggaattacaggcatgcgccaccatgcctggctaattttgtatttttagtagagacgggatttctccatgttggtcaggctggtctcgaactcctgaccttaggtgatccgcccacctcagcctcccaaagtgctgggattacaggcatgagccaccatgcgtggcctgttcattaacctgttttaaaggctgtgataaatcctatcatacgatgaagaaacctgttcagctccgtttgacatttcacaagccttttcaactagaccattttcttttgcattaatattcattaatagcacataaaatttactttgaaaatgtccagcatacccagaattaatagtatttaaaattattttctaattagctggatctagttcttgtaattttcattttctagcaatatagttgtcttgtatttattaagcagttactatgtgctgtatgctacaagcagatactacctctatctgagtgccttatggtcattttttttatatcataaccatcccatgaaggaagtcctagtgttacccctttttaaaggaacctgaggcctacagagagtaagtaccttactcaaggttatacagctagtatatgaaggagctgagatttgggaccaggcagttttacttcagaacccatgacgtcagccactaggccattttgcctactcttagaatatttactgaggaattatttcacaaagtcaccatttcttttgcaaatcaaaaccttgttttttacttttaaaaatatttttaaatgtatagatgtctctgtgatagtccataaattatatcttttgtattttcgttgaactatgagtatttttttattccaagattagtagactgtgtttgatataagattatttctatcttattttagcatgtgtctaatttttcctagattgaaggattctcattaagcaaactagggaatttcaaccttcaagacattgaaaaagatgttgtgatctgggaacatactgacagtgctgcaggggacacaggcataacaaaagaagaggcaccaagagaaacgccgattaaaaggggacaggtctgttctcttttgtttctagttgtcagtttcacttgccaattgtgaagttgtggattagtcagtcttgtcttctttccttaactatctttactatttcgtggctctttcatttgccagtctgtttagtacctcgaacagacaagtaatgagaaaaggttaaaaaaaatattagatcactaaatccacagttatttatgtagtttctttgtgctggttcctttgaaagagactcagaattcaaaggtaaatccatatctatcctcaaagagcttagtcttaggtggtattatgaggtttaaatgtatgaaaggttaactagctttcagttactaaaataacagtgaatgcatatatgatttaatgtaccggtcccatactgttgggggtgggcaggggaatttatgcacaaggaaagaatagccattagaatttcaaacaaaaatctctgcaatgtcattatcctagtaataagaataagattctctcccaaataggtgaaaggcccctgatcttcccgttaccttttggggtaaattgacagtaacatccacaaaattcttggaatcgaatcccagctttatacaaacaagtcatgtcactcctccagttcatgttttactcatgcctaaaatgaggagttagtggtgaatcagattttccagttgtgttttctagaatccttgaacactgggaggaggaggagagtggtggtaccaccctacctctgctgccaccagaaccacttttatctgtttcttatttggagtctctgtagtggagaagagtataggctgtggagccagaatatgtgaatttgtatcccagctctcccacttcccagctgtgtgtccttgggcaagtgacttcgcctttctgtgcaccagtttcctccctactcatggggataatattggtaccctctcatagggtcacttacagaatgcttaactcagtgccgagcatgtggtgagcactcagtaaatgttagctgctattcttattttatttgaaaaagaaaatgttctctgctttaaagaaaaccagtttaagttcctgtagtctagatatttcaaaggtctctccagtttcatgttatggtattatcaagtcatttcagtgagatgcttaaaaatcctttgtaatgccgctatggataaagaggtaaaatgtaataatgcttaaaatttctggggggtttatttgtgtcctcaaactgtagtgtttgggacttagacaacttccatttttaatcagttctgccttgtaaagccaccagatgactttgtattacttgacagaacctttgtgattgagaaaaatagaccactgattttgaagcttaatataataaagtatgattgaaaacaaatttgtgcaccttagaggaaattacttttttcagtgtgaattataggaaaagctattgctgtaaatccatttaatgctttatttttacatttttatgttatttggaaagattaatcatgctgccacttctgaaataaagtgagcttcagacattatggggttgcatatggtgtgcactgtactgagatcaggagacattgagacattgttctcatccggccactgccaggcagtgcaaccttctgacaagccatgggcactcgtggggcttcagttccttctcttgtaatatacaggagttgaactagattacctcttaagagcatcttacagttgtgacattgtgtttcagtgatatatggatttcttgtacttaaaaaggctatacctacgtggaaaaaatacagagagcaaccaagtctgccagatgctttcccttgtttctgatttaatcctcatcactatcctgtgttataggtggtatcatccctactctgcagataatgatagcgaccattttttgaacactgtgtgccaggcactgtgctaagcactttacagacactatctcactcagtcctcccaacaaccctatgaggtgggtactgttatccccatttttcagatgaggaaacccagacttagacagattatagaccttgacccagatcatacacagctagtacatggcagagtttggatttcagatctaagcttgtcccaattccaaagcctgttctcttagccactgtgctgtgctaccagtctgagaatgaagaagctaagtcacagagcaattaagagctatgacgtggcagaatctctatttgggcccatattttcccctatcctaagtaatatgtactttctaatatattacatcgcagttatgttccaacttgtcagaagtctgtaactgtaaaaccagtgtcaatttctgatggcaagagttatttgactttaaaatcagttgtcactgacagagtcaatgtgcttatgtagcttctcagggcagtgagaggagtgtttttcctttttctctatgcctttagctactgtccatttttgtgtgtctgtgactgtaaaggtgcctccagcagcagtaacaggaagagttcagtgctgagaatattagcaacccatgcacagtcctctccacctgttattaacagttcaaaattaggagctctgtctggttaaataaaactgatcctgtctattcctgtgataatgactggattatagcatactctaatcctaatagtgcagtgaagtaatgctgttttaccacaaacaaaatagaagttagaattgatttatctagatggattgtcaggcttatatctttgttaaggttttccagatttttttaatttgatgcttaaatgatctttaattttccagattgtacttacatctgaaataacctgtatgtttctctttgctattaataggtgtcattaatattggatgtgaaacaccagccttcagtaccagttgggcagctctgggtggaattgctgcggttctatgctttagaatttaatttggctgatttagtgataagtattcgtgtcaaagaattggtatctcgggaattgaaggattggcccaaaaagcgcattgccattgaaggtatctcaaaatgtttatcttattcccccccactcttttttttaaaggtaccagtctaacagcatgctttttatttcagtctcttttcagctcctacaagtaaggtaggcctgccctcaaagggaaataaatagttagaatcttgcatgtgttaacagtgggtcatttcaaggaatcaaactgttcaccctgggtttttaaagtataaacaacttgaataatggctggctgagtccttgctttctttgtagattgcttaaccacttaaatgcctaaagtatgtttttcacagtgatgtgtaaatccccctttcctctttaccattctcacctctggattttttaattcagtccttttgtggattgttgaagttgtttagttttgcaaaggtgaggacaatactttttctcgtcaaaaatgtcattctccattggattcctctccagtagagagaatgagtagttatttttgacatatctacagtagcatttagaacttattcataaaaacacatttttagtgaagcctcatttaactgaaatcactttatcaaagacacactgatgtgccctgtagacatcattaaatggactagctcttctcagctttgcaaagtcaggaggttgaaacccctctagaaatcttaattctcctcctttaaataatttaaagaacctcctaaatggaattctcttatttttgcttgattttttttcaagctttatgttgcataagagggttttttgcattttgcataaattctgtgtgcagtcatggggatctcacatttttaaaccctcccctgcagtttctgtggctcagctcttctggccaattgcctaacctgctggagttctaggggaggagaaaagattgagagaagtggtgtctcctcctggtgcctccctctcgcccctgaaattcagtccagccaattcagtgatggggcttcccagggcagaagagtggaggtaagctcgataaaccacagggcctggctgagtggggaggcagagcactcagcagcagcagagcctggtgggaagatcttccttcccaagggcctgagagccacgctgataacatcttttctacctccacagtcacagagcacaatagggagaaggggtactggttctgaacagaatgggttcccttcatagagccgatgtttcagaaaatactgctttttgttcttaaactctgttttcttactccccacccccagtttttttttaagtctataaaatgcaagataaattttaccattgtttgttgtctgtttttatctgcagcaggctaatttttaaaacatgaaatatagtaacatatgaagagatggatttttctttctttcttttttttattacagatccctactctgttaaaagaaatgtggcaagaaccctaaatagtcaacctgtgtttgaatatatacttcattgtttaaggacaacatacaagtattttgctcttccacacaaaattacaaaatccagccttctaaagcctctgaatgcaattacatgtatttcagaacattctaaagaagtaataaatcatcatccagatgtacaaacaaaagatgataagctcaaaaactcagttttggcccaaggtcctggtgctaccagttcagctgcaaatacctgtaaggtacagccacttactcttaaagagactgctgaaagttttggaagcccaccaaaagaagaaatgggaaatgaacacatcagtgtccaccctgaaaactcagactgtatccaagcagatgttaactctgatgattacaagggtgataaagtataccatccagaaacaggaaggaaaaacgagaaagagaaagttggaaggaagggcaagcatctgttgactgttgatcagaaacgtggagagcatgttgtctgtggcagcacacgtaataatgagtcagagagcactttggatttagaaggcttccaaaatcccacagctaaagagtgtgagggacttgccactttagataacaaggctgatcttgatggagaaagtacagaaggtactgaggaactagaagactctctaaaccactttacccactcagtacagggccagacatcagaaatgattccctctgatgaagaggaggaggacgacgaagaagaggaggaggaagaagaacctaggctcaccattaaccaaagggaagatgaagatggcatggctaatgaagatgagttagacaacacctacactgggtcaggggatgaggacgccctatctgaagaggatgatgagttaggcgaagctgctaagtatgaagacgtgaaagaatgtggaaaacatgtagaaagagctctcctagtggaacttaataaaataagtctcaaggaagaaaatgtatgtgaagaaaaaaattcacctgtggatcagtctgattttttttatgaattcagtaaacttatcttcaccaaaggcaaggtaatcagtaccaccactagtcatagaactaggagactttaaggactttgaatgcatttaatttcaatttttatatactaggaattttcctattttggtagtgttgaacaagttggcctttcattctgatatgactgctcggtctgcttttctccttaagactcatgggaattagcagaggaagggaatgctattagtagtgaaaatagccactatgttctcctaatgatactataggatgtccccatctctcagatcatttgagtggatgcatgttatattttcatttcctttggaaagtgaataggtgactgtgtacttttaaaacatgattccagactcctttatttggcaaataaagtgttaagtcttgttttgctttgccatattcctgcagtctcctacggtagtgtgcagcttatgcaaacgagagggtcatctaaagaaggactgtcctgaagacttcaaaagaatccagctagaacctctgccaccattaacacccaagtttttaaatatcttagatcaagtctgtatccagtgttatagtaagttattcacatttcttttgatttgtcaaaatattaaattgacatttactcgagtctttagaatcactatcctatttaggtctctaaacattattagggaccaagtctattccattctccattgtatcctcaagcgttccatgtcatgtctgttctgtttgggacatgcaataaatgtcaaagaaggatgaggagagatgcagggaggatcttttttatttaaaaaaaaatttttttttaaattttgagacaggatctcattctgtcacccagactggagtgtagcagagcaatcatgagtcactgcagcctcgacctcccagactaaagcaatcctctcacctcagcctcccaagtagctgggagcacagatgcatgccactatgcctgactaaatttttcattatttgtagagacacagtttccctgtgttacccaagctagtcttgaactcctgggctcaggcaaatggaggatcttttatttttcttttaatatcaagtgccttctgtacttccttttattaacagcatagttgttgcatcaagatacatagcaatcatagcaggtttccttttttggagggtgatggtgagacagggtcttgctcggtcccccaggctggaatgcagtggcgcaatatcagctctccacagcctctaactcctggactcaagcaattcttctgcctcaaccacccaagtagctggtattacaggcatgcatcaccacacccagctcattcttatattttttgtagatacagggtttcaccacgttggccaggctggtctcaaactcctgacctcaagtgattcatccaactgagtctccgaaagagctgggattacaggcttgagccatggcgcctggccagcaggtttctttttaaagcttagtattaaatatctttccccatttaaattttccattactctgccaagaaaaaaaatttttttttttttgagacaaagtctagctctgtcacccaggctggagtgcagtggtgcgatctcagctcactgcaacctccacctcctgggttcaagcaattctcctgcctcagcctcctgagtagctggaattacagtcatgcaccaccatgtccagctaatttttttttttttttttagtagagatggggtttcaccatattggccaggcaagtctcaaactcctgacctccagtgatccgctcgccttgacctcccaaagtgctgggattacaggcgtgagccaccgctcccggccaaaaattaaaattcaagttacttgaagcctggacacacttccctggctagctgggctatgtaaaggttggtggtgttattcttcctgctgtgtaagcagatccaggccccagaaagaagggaccaggttatataattgtttttgaaaagtttgctacaaaaatgcatggcctgttataagccaggatacaaagtaaggatgagggtaagggagggacatttttttccagaagaaagatattttctgaagagtctcagttcataattttcccaaaatcgttggaagagagggtaaaatctcaatatgaatttcaaagtactgtctctgtgaggggccgaaagttgccttgctgaggatcttttattaagtcttaaaattagagtagtagcatttcccagctggcattctttgaaatgtttttctagatggcagttaataatatttcatcaccagaagtatacctaggccagcgagggaataacactacacactcccttctctcttagaattcctgggttatttccaggacatattagcatattgaaggtatctgagaaatattatttctaaaatttgaacatagaataatttttgagtaacgctaattaatagcctacttaacagccctttaaggaacacaaatttggggaagcattggtgtagagagccttaaagttttacaaaagaaaatatttaaaggatagatgttcagctgcttaaaatgaaggaacttgtttcacatggcttcatcataaggtgttcatccgtgtcagaagacacgtgttcttaacaagtccttttttttttttttttgggaaattttttttttttatattatgagctattaaaaaaactaggttctccttagggaaaaaaatacatgcaaatgctcacaaacttttaaattcacactttagcggggtggtgatttctgaaggccctttctgtaaccctggtgtctttcaggaaacccaggtggagatcccatgtttaaattactttccgtttcaagagcacttcttagattctttaaaaaaggacatcttaaattttacattactgttacaaaaattagccaggcatggtggtacatgcctatagtcccagctactcgggaggctgaggtgggaagatggcttgagcctgggaggcagaggttgcagtaagctaagatcacactactgcactgcagcctggccgacagaaccagaccttatctcaaaaataaataaaaaacaaactttaccttgttaatgctatctactgagaagacacaatgatttaggaatttttaaatttaagcttgtaagttttattttctaaaaaataaatttttttcagctttttctaagagtgtcaaccggcttattttgtcaatatgtctatttatttttaaacagaggatttttctccaacaattatagaagatcaggctcgtgaacatattcggcaaaacctagaaagtttcataagacaggactttccaggtaaatgatttattttttatttttaagaaaagtagtgtaaccttttttccaaatcagttcatgtgttacaagcacactgattttgagaatcaggatttccattgttttgcaatatacccaggatggtccttggtctgccaaatcctcatttaccaacagaaacagtgtagggtttattctagcaagtgccataagtgaatttcatttaatactatgtttagagtcaaagttaagcttacattattaaatgtgttgaggtgatctaacattttccttgaaatgtctttgcatttaagaataaaggagcacctggtaatctttcttgccatatacagcttgtatgtaaaggaagctttgagagaaaaagactttagcataaatgaccagttaatcagagaacataagtatgagattaatataggataattaaacaactgggtgtttttgattcatgagagggccattttgatcaaaaattaaatgtactcaggtaattagttattacttttcatatatccctaacaggaactaaattgagcctgtttggctcctccaaaaatggatttgggttcaaacagagtgaccttgacgtctgtatgacaattaatggacttgaaactgctgaggtacagtgaccacataaaacttccatttgctgtggcagtgtgatttaaccaatctagactggcattacagcttggtattttccaaatttatcagggcataccatatagagtgtgctgtttggcacagtctctggccaaatacattaagaggcttggaaaggttgtgaggaatgtgaggagcagaaaggttatactttcaccctgtagcaaaaagtggattggaaagtgttgcctgggaattctacatagccaaaccagcctcttcagtgtcccattggcttggctactatgctgacttggatcacacactcacataaggttacctgtaaagtttgttaccagacaggcagtgtggtaaatcataagagtactaaccttagagtccagaggcctggatttgagacaaacttgtttcatcagtacctaaacatgtggtctttggtaaataatcgataaagtataatatctgttcctcctgcctccgctgatttttgtacacattatcatggatcatgtgggtcaggagttagcaaacgatggcccttgggcaattcagccccccactgcctgtttttgtaaataaagttttattgggacagaatcacacccattcacatatgtaatgtctatggctgccttcactcttaagtacagagtttagtagttgtaagagaccatatggcgtgcaaagcaaaacaaacttgccagcccctgggatatctgaaggcatttataaaatataaaacactatataaaggtataaagtctaggaagtgctgagtccctattcttttaaatccttaacagcagtccaaatgctaaatatccaaatgaatgatgctgctgttgctgaagacctttttgtaccttttcttagtttcaagtctttctattttgaggatgtatctgatttgggaaaatagtcaaaagtgatctagcctgaatttgaataaagtatataagcaagattggctcaacatatggaatgaccctatcatacatcctcaaggtttatttatttatttatttttttacatggcttataaactagttttgagggcatttctaaagtaacattccacgtatgttctgggatttttataaccatcaaaaaggcgtatgttgagtcagcccaaatgtttttaagaatgatttatcaaatactatttatatttgctgtatgactttagttatatgcattataattctggctagtcctatagggaaataatttgagcttaatcactctccacagcaattcatcaactcttaaactatagaaggtctgcttagaatgaatgagctggggcacagaagcctcctctcatttattctgggacatggggtacatccgagtgatattatgtggaggggaagaaatgaaggtcctcaaccatggttcagagacttttttggaagccctaggtccataagcttcctgactgattttagcctttgttgcacacccaaaaacaattaggaagtagggtatttagtggtttttgtaccgtcaggatatttcctgtgaatactgactctaatacccaactagaaaggaaaaaaatagatatagactgacttgaaattaattacattatttctgaaggtaatggaaactatagccagtttcagaacctgtcttccagttttggttaagttctttatgccttctttgttgtagggattggactgtgtcagaactattgaagaattagcaagagtcctcagaaaacattcaggtacctctgtaaactttttctaaaaatatttctgactttttaattagtgttttctatagtcttcccttggtatccatggggtatttgttccaggcccacccatcacccctcaaccctcccttccccagcagataaaaaaaatccttagatgctcaagttccttatataaaatggcatagtatttacatataacctatatgcatccttccatatagttttagtcatctctaggttacttataatacctaatacagtgtaaatactatgtaaatagttgttatactgtattttttatttgtatttttttattgttgtatcgttagttttttattagttgcttttttctcttaaatatttttggtttgtgtttgattggatatggggatgcaggacccacagacatgaaaggccaattgtatttagagtttactaatgccatgaagcagtatagtggctcattcatagaataattgcaatattaatgtctttttaaaatcttgtatgcgtaagtatgaaagactgaggaattggtgataatttatatgcatattgttgcctagctcagttttatttcaagacaaagcctacgccagacaggcaagaaaggctataaatccttttcctttgttggcgttgtataagtcaaagtgtaggagttgctaattgtgtgaagtgtcaaggaaagcaccccggactgggcttgtgggttgaatttgcagctgttctgctcaacaagctgtatatgaccctgaacaagtccttcacttgaagcgatctctttttttaagaaatgggatcttgctaggttgtccaggctagtctctgaactcctgggctcaagtgccttggcctcccaaagcactgggattacaggtgtgagccactacgcttggcctgatctctttttttcattgataaattgaggcaactggactggataattattctagagtatttacagctataaaatgtatagattttgtaaaccatgcacagaattgaaatgctgttaacgtatccttttgttgtcatggcagctatggataccattaacagtgaaaaatcttcttttaaaatgtagttcagcaaacttctgtgctaagagctgaaaatgaaagtgaacaatatatggcccctatcctcaggaacttaaaatccatggtctgtccatgaaaagtttttgtacatttcggttaggaacagactttaagtcacagcatgaacgtgcacacacacctagacacacacatatatacaccttgggtgccacttttctttgaaattttttccccaggagttaataaagtacataccatgttgtttaaataacaggaggaaaaaaaatcttaattttggtttattcccaataaaaattaacctaaagtatacagaaattgggttaggctttgtttttttaaatgtacattgatttgttcacagagggcagaacaatataaaaaaaaaagaaaaaaagtgcattgatatacttttctttggtcattgaagtaaacatttcccttaacttgggaattccacctctaaagatcatgtgttttgttttgttttgttttgttttgaaggtcgtgcaaagaaactgaagtactaagttagcgtgactattaattttttagtactgagctagattttaactttgtgttttgaaataatttaatttcacatttaaaggaaagcagcaaaagttgcataaagagttccacatataacttttattcagatccaccaattaacattttccatatttgattcatcattccatcttttgcttgctctcaatttcttcctgtaccatttgagattaagctatagacattatgtcctttcccctaaatacctcagtatatatttcctaagaaggaacgatgttaaaaacagatcatttttagattagaaatgacttaggcacacagatgatttataataataatggaatgcagattgcctggaacaagaatttcgtaacagctagagggctgtgtttaaaacttcatatctttaaaacagtctccccaggtattttattgggtgcctcctatgtgcacagcactgtgttgggcacttagggatggtggaaaagtaaaaaaatctgtatgttttttttgtgaaagcttccatatcttaagaggtaaggtaatcttccaaactatgtaacaatgtaaggtaatattcaattaaataacttctaagaagagagaatgtgggaaagagttgcacaggggaggttgatggaagagatggaggttgctatgatctcagatgatggtgaacacgatttgaaaaggatgggaaaagaaatcatttctaagtgcatagatgtgaatgtgagactgtgggatattttggagagcagtgagaagattggtacatttggagattttcaaatgggaaatactaggagataagatgaagtctatagatatttggaagcactgaagtttcttcaggagggaaaggacccaataaaagcataacataaggtttttaggcagctggtgtggtattttagggaaggtataatgtagacaacagggcagcaggacctcagccagggtgccactggtgctaacaggaaaaagatatgagagattccaagtgggaaaatttcctagatttggtacctgcaagtaggaagtaaggattgaggtcactatctgggttatttgagaaccaggaatgtttgcagagaacacctgtgtgaaagtgtttagtttgccatgagcatataatctccaagacttaacattccagaaaacaattagaaatatggggttgccagtcagaattgaagatgaaaataaaacagtttttttgcattgaaagccttgaagaaaaagagagagattgagagaaagagactagacagaaattaagaaaagagactgaaaaggaactgggaagatatgctgtgaataaatccgagactttgaagtgtggtaatgatcaacagtgtcaaattccagaatgggaaggatgtgaagaaaagggcctctgtctaatttagaggcgagatagcaaagtactaggtggaggttctggaatcagactctgattttaaattctgtctcccccttgctggctgtgcaatcccaaaaagtcactcagcttcataacaagcactcagttcctcatctctaaagtggaaataacaattctatggcatttaagaaagataatacgtaaagtgcaaagcctagcatattctaagtattcagtaaagtgagcttccttgccccctttccccatcagattaagtttcatttcctctgtctgccacacagattttttcctgaaatgtcttctacctacttattttctcctgtgttctatgatgtgatcactatgtatctgctttttaggaaccaccacttagctctctcagaagaaactcaaactctgacatctcagaatgagcttatctttcactttaccgcttcccttctgcaggaaccaactccattaatctgcccttccttgtgaatcctttttcatggttgttgatattggcatccttggaatcaataaaacgggtgaaatgataattagcctgacccacactaggttcagtataagttgggagtcaatcttacctagatttgaattccggctccacaatttaccagctgcatattcctaagctagtgaatctttctgggtctctgtttcctcatctgtaagatgagggtgataaacctaaggaggtaatgtttgtaaaggactcttcacatatccctatcacacattaggtgctcaggaagtggtaactcttactctgaaagccctgatcctctcttactacccctagcttcccatccagttacagatgctctcaaacatgccttgcttcttctgtgtattcccatgccaccatgaaagttcacacccagttgtttttcataagtggtcaccctgcctctgttcctggtgcctccagtctgtccactgccagggttattgtctaactagatgtggtcagtgattcctcccaacttagaccagttcattggctcctctttgattctaaggataattctttttatttatttatttatttatttatttatttatttatttattattgatcattcttgggtgtttctcgcagagggggatttggcagggtcacaggacaatagtggagcagcataataaacttgtttatctggtcagcagataaacaagtgaacaaaggtctctggttttcctaggcagaggaccctgcggccttctgcagtgtttgtgtccctgggtacttgagattagggagtggtgatgactcttaacgagcatgctgccttcaagcatctgtttaacaaagcacatcttgcaccgcccttaatccattcaaccctgagtggatacagcaggtttcagagagcacagggttgggggtaaggtcacagatcaacaggatcccaaggcagaagaatttttcttagtacagaacaaaatgaaaagtctcccatgtctacctctttctacacagacacggcaaccatccgatttctcaatcttttccccacctttccccgctttctattccacaaaaccgccattgtcatcatggcctgttctcaatgagctgttgggtacacctcccagatgggatggtggccgggcagaggggctcctcacttcccagtaggggcggccgggcagaggcgcccctcacctcccagacggggcagctggccgggcgggggactgacccccccacctccctcccggatggggtggctgccgggtggagacgctcctcacttcccagacggggtggctgccgggcggaggggctcctcacttctcagacggggcggctgctgggctgaggggctcctcacttctcagactgggcggttgccaggcagagggtctcctcacttctcagatggggcggccgggcagagacgctcctcacatcccggacggggcggcagagcagaggcgctccccacatctcagacgatgggtggccgggcagagacgctcctcacttcctagatgggatggcggccgggaagaggcgctcctcacttcctagatgggatggtggccgggcagagacgctcctcactttccagactgggcagccaggcagaggggctcctcacatcccagacgatgggcggccaggcacagatgctcctcacttcccagacggggtggcggccgggcagaggctgcaatctcagcactttgggaggccaaggcaggcggctgggaggtggaggttgtagcgggccgagatcacgccactgcactccagcctgggcaccattgagcactgagtgaacgagactccgtctgcaatcccggcacctccggaggccaaggctggcggatcactcgtggttaggagctggagaccagcccggccaacacagcgaaaccccgtctccaccaaaaaaatacgaaaaccagtcaggcgtggcggcgcgcacctgcaatcgcaggcactcggcaggctgaggcaggagaatcatgcagggaggttgcagtgagccgagatggcagcggtacagtccagcttcggctcggcatcagagggagaccggcatcagagggagaccgtggaaagagagggagagggagaccgtggggagaggggagagggaagaggggagagggagagggagaggactaaggataattcttagcaaaatgtgtatgttctgtagttggacctttcccagtttctccaccatctcctatgcctcatattccattccctcaagttcattcggcaacctatgcaattctctggaacttccctgaacgtaccattctatttcaggcatctacactttttgtgtacagtttgccttgcctggtaaatttgctcaactgccactatttttgctggtttttctccctctttttcaaagcttagctcaggcaatttcctctctcctattgaagttaattcctattaacttcataacttctagctttaaggtgagtaacttgtttggaggataatcgtcccttaggctgttctccaaattagatatagtcacatggagagaacaggtgggaaccacatagttcagactctatagtagtttcctctgtttggtatttgtcttagtgacaacgacatacacatgcatatacacacatgcacacgtgtgcacatacgatccagtaagttcccagaggggagtgactgtttgattcttgtagttctaatatcaatatgtttaataaatgtaaactttgccagactaatcttcccagatgtttgttaataacagaattctttgacaagtcctaatgaatgcaatgaaacaggccaaagttaggtttacaccattttatattggaacattaacataagagttacttatatccccagctgctgtatttaatgataacattttatttcccaacttaggtctgagaaacatcttacctattacaacagcaaaggtgccaattgtgaagttcttccatttgagaagtggtctggaagtagatatcagtttgtataacacattggtaagatttttttcaggctttttgtttagagaggttaagggaacaaatgtctcaccttgcaaaaacctcaagttaaagaagtcattcatttcatcttagtgaatctttcaagagttattatgcttacttgctgtgaacctggcagtgttctgaggctgaggattctaagataattcagatatgtttcagggatttataggacctctctgaccctttaggggtgtttgtgcagagagatcttatatctactgaaagggaactgattgtttatttcaccagcccttattttctagatgttcagaccaaggacgtataaaagccatgaggtcagatgttacttataattctttattattatctagtaagttaatgaagattgtctttagggaaaaaaaaaaggttaatttcagttgaaatgtcttcttcctaaaatgaatcagactgtaaacctatttaaaatattccagtttaaaatcttttcatctaggctcgcatggtggctcatgcttgtaatcccagcactttgggaggctgatgggggaggatcacttgagcccaggagttcatgaccagcctgggcaacatagtgagatcccatctccattatttaaaacaacaaccaaaaaaaaaaaaagagaccctttacacttcattgttagtcttatagtgttattttccttttaacaggcccttcataacacaaggcttttatctgcttattccgccattgatcccagagtgaagtatttgtgctataccatgaaagtatttacaaaggtgagtatgcttcctattgtgacttatcaggaaatttcattgcatctttaaacactgttgaaaacataaatctattttttaatgaactgtagtcatgtgaaatgcttcatgtagctatttgggagaccctatgaagaaagctaaaattttgttctgaattttatacaatgacctgatcttgcacgtagccagctgtccactgctttgctaggttggattggttttgcctttgacaatgtgatttttatattagttctcaaaatatgcactttacttttagtgataacagaatggatgcaaagttagcagaaaacagacctttcctttgttcttggttttccttctgtctagatgtgtgatattggtgatgcatctagaggcagcttatcatcgtatgcatatactcttatggtgctatattttctccagcagaggaatccaccagtcattcctgtccttcaagaggtattagtgaatgaaattgtatttcttatctggaaaactggtgatctctgagcctttctcctcctctaaaattctgtggttctgtagttaattttttacctattttcctagaagtttttgtatcaatgcattaagtttgtaatccatactaatagtttaaaaattaatttcagatatacaaaggtgaaaagaaacctgaaatatttgttgatggctggaatatttatttttttgatcaaatagatgaactggtacgtattttaagagtaaagattttcctatatccttgactaaaaattagctatactacagtgtagatggtcaacaactattttattgcttgttgtatttatatatcttatgatagtaaaaaaaatagtgttttcagatgctttctttgatgtgaaaatatttttactaagccaagtgaatttctagggcctatatccagtatttctttaatgcctaataattccaaatggttaagtaactttattccaagtgaatgaatatttgttctgtggtttttgtacccagagtttagaaagactttcaatgagctaaagagatctaataacctacgtattaccaaggctcttagaatctatttctggatcttctgactaatatgttctgagacttgacactgaaaactctgagctcttcctactccaagtcacagagtagagattaataaacttatgtaaattatgtttttaaatatgaaagaaaagttgcataattgagctctagttaattagaaataaatccaaatttactccctaaaatacaaatgaatattgatattaacacttcactaaagaccatggtatcccttgttcccttctatttctagcctacctattggtcagaatgtggaaaaaatacagaatctgttgggcagttatggttgggccttcttcgtttctacacagaggaatttgattttaaagaacatgttattagcatcaggagaaaaagtctgcttacaacttttaagaaacagtggacctcaaaatacattgttattgaaggtacgaataaaattaaacttgaagtcgaatagactatagagcttgaactataaggacattgttcttcctccttgcagagctcttccagctgcttggggtgtgcagtgccccagtctcattgtccataccaggccaacttttctctttccagccttaagatttgttttttaaatgactgaagccatttcaccatgacaaattttttgctattgttggacacatactgaaggataaggcagcagtagtgataaggcagcttcaagaaagtgggacttctacaaccttcctgttggggggtttgaagagtgccgctaagtgaattttcaagatcttcattcgctattgatggagttcacctataagtaattgtatataaattttgacatttattttgaccatatggaagccttttctttttctattttttagtttttgagatggagtttcgctcttgttgcccaggctggagtgcagtagcgctatctcggctcactgcaacctccgcctcctgggttcaagcaattctcctgcctcagccacctgagtagctgggattacagggacccaccaccacaactggctaaatttttgtacttttagtagagatggggtttcaccatgttggccaggctggtcttgaactcctgaccgcaggtgatcacccacctcggcctcccaaagtgctgggattacagatgtgagccactgcgcctggccaccttatctttttctattgaatgtagtgatctattggagccattgatgctaatagttgattgtttatttccaatttgtgggattcttattttaagacaaaatggaatttaaatgctttagctgagaaatgacctaagaaatatttttttaattttaataagatttttaaatgtttatcttttaatatgtttgtatcacataaataatacgtactattctaagttgtggttttattattatttctgcctattggcagtattaaaatacaatgaacttttgtaaaatgaatttcagatcaccatgggttacagatatagttttgactttttaaagatctcatgtgtcaaacacatagaatttttgacttactacgccttttcgttatcactgcagttcttatcatctgtcacttattaaggtattccttttttttttttcttgagacagtctcactttgtcttccaggctggaatgcaatggcgcaatcttggctcactgcaacctccacctcccgggttcaagtgattcttgtacctcagcctcctgagtagctgggattacaggtgccgtgccaccacgcctggctaatttttttgtatttttagtagagacggggtttcaccatgttggcaaggctagtttcgaactcctcagctcaggtgatccggcccacttcagcctcccaaagtgctgggattacaggcgtgagccactgtgcccggcctattaatgtattcttttttaagttttgaaggtttattatcttttgcttctaattcttacattactttcagacaagcagttagtaataggctaaactaaaaagaaggcttcattcataatcatataaccagctattttagaattgaggcatttcagtggtgatagtagtcgtttgtttttgtttttgcgggggacagagtctcactgtctcgcccaggctggagtgtaatggtgcgatttcaggtcactgcaccctccgcttcctgggttcacccgttgtcagcctccagagtagctgggactacaggcacacaccaccatgcctggctaatttttgtatttttagtagagagagtgtttcaccatgttggccaggctgatcttgaacttctgacctcaggtgattagcccacctcagcctcccaaagtgctgggattacaggcgtgagccacagcacccagccagtagtagtttctttaactgcacagtagctaatattgtagtatctccactacaccaagcaaataaccaaaaatacacatacacatataaaaatcacttgaagaaagaatgaccaaactgatgaaggtaaccttctcatagcaataattattgcagggttgagctgaaggaagggtcctatacttcgataaactgatagtctcaatctcaatatggtacacctcagttaccgttcactagaagcatacctggcaagtggaagatgccactttttacttctttacttctcttgtgtatgctatatccatgcagtccttcattttctcaataagaggattcccgaaaaaaggtcatcgcttttttctctttgccttcttgaatattgttttagggatgtgaaaaatagaagttagatatctacacataatgtctaaattatgaatcatgggtgtatgttattttagatcacttataaaacagtatttggatttagaaatagtgcttttaaccccatttatttcatgagacagtttattcacacctcacataaatctttgacattagcattgttttcatcattcctaccattttctgggttatttaacaaacagtattccaaaacatatcctatatacagctatctaagatgtttcagatgcagacatgtaagatcaaatgagagtctatattaagcttttactagaaattgtatcccaagatccaggtagccaatggcatgccattgggacagatgtatatatctgtgtgttttataagtgtgttttgtaatctccatcatgaattattttctgaagtgatctttaagaaatttgttacatagtgggaacatttagtgccaaaatgttttaaatgtatttataacttctatatacatccaaaactagtgtcattaagtaatatcaggctaatgtgtcttctgcaaacagtattttgttcaaaaataggcagccagtcataacataaagagctttataatgatttaaatataaagtagtacactctattctgatgaacagtgtagtggaaaaacttgccttctgtttaggaatatgtattgcttagctttattataacttctaagctcatttaacaggtgtcattttaaacttttttttgcacttcttttctatcatgtgaatttaaaacttattaatgataagcaaagtagatgatattcttgtcttgttttatgaactttacttattggatgaatggtggcattttctatttgattaccttatttgctcttaaatttttttgcttagatccctttgatttgaatcataatcttggagctggattatcaaggaaaagtgagttacttcgtttgtcaattttattttttattttacttatgtatttacttttataatagagacagggtcttgcttttattgcccaggctggtctcaaactcctgggctcaagtgatccacctaccccagcctcccagagtgctagaataacaggcgccaccaggcccaggtagtttgtcatttgtaatacaatctcttttccttttaacccgcctaagtgagttcttactcttctttttagtgacaaattttataatgaaggcttttatcaatggtagaagagtatttggtattcctgtcaagggatttccaaaggactacccctcaaaaatggtaagtgtgttggaaataccaaaaaataaaaaataaaaaaaagtgcctaatttgtacacatcacttcagtagtaacttaaatatttagaaagtctgtgagtctagccaaagtaaatgactatagtacagaatgattcccagagcccccctttttcttaaacatccccgggtagaggccatcagaatagagagaaatagtaagaagttggatttaaggttgttaaattcttgttttcctctttgatgccttttttttttctggttatctgtgctagccttcataggtgcattgctgttctgccagcattcggcttgataccagccttggccaagcccagtttgtacatatctagaatctagattttccaatctgcttgcaaaaagtagtaaatcttttgctgggactagggggttaacagtgcttcctgtagcagacagctatctcttctcatgtaacttgatactcgagtttttcaggaaccacatttattgaaaacaaagcaaaattatgtcaaaaaaataatttcagtgagagaaaaatggctagggactagatgatcttgctaagaataatattatgttcttctgcattaatttccttatactttttattcttatttttaattgacatacagtttatggagcacaacgtgatgatttgatacatgtatatggaatgatgaaatcaagttaattaacatatatatcacctcaccattttttgtggggagacatttgagatttactcttagttatcttgaaatatacactattattgactatagtcaccctgctgcgcaatagatctcaaaacttattcctcctgtctatctgaaactttgtaccctttgaccagcaaccccctattccctctgtactcccagtgaagacttttaaaatttaacgtaagtgtattgctttataggcacattcagtgtttgattacatctgtacatctgatttatggtagatattgatgtggcttctacaccagtgcttctgaaacttgttcgaacaaatcacctgaggattttgttaaagtgcagattctgattcagcaggtctaggatcaggctcaagactgcttttccagcaagctccctggggatgctcatgttgctggcctccaccttaattttagtacaaagaggctacaggctagaccattatctttcctttgttctgttatttttccttcagcagccacaactaagcaaagtagaaacacatagttttttttcttttcttcaatataatctgtatgatgcaaatcatgtttctcaattcattatgttttagccttttcatttgatgaggagacaaagcctgtgtacctggcctcaactccctcccacatcctgaaaagctgactcatccgcttctttagaagtgtgcttaaacctttagggttagggctcacgagtgctctgcatgactaaaaggaataaacaaaaatggatttagttaaaactatcctgagttagaccttgatggtcttagattttgtttggaattaagcagtataaataatatttattaaaagtaatgttatatcaacattgaattgtaagataactgtttaatatctggttagttttgtgttccgatctcacgtgaatagttcaggcttttatatatttatgttcttctaggaatacttttttgatccagatgtgttaactgaaggagagctggccccaaatgatagatgttgtcgaatttgtggaaaaatcggacacttcatgaaggactgtcctatgaggagaaagtaagtaaatgttcaaaggggttggttgtgtttttattttcttaatgtcccaatttttaaatgaggtactattataacaaagaaaatacacttgtgtaaaatccagcagttttcagatacatttaagttttttattttattttttaatgaaatgaagtgatttaaaacatgactttaggccgggtgcagtggttcacgcctgtaatcccagcactttgggaggccaaggcgagtggatcacctgaggtcaggagttcaagaccagcctgacccacatggtgaaacctcatctctactaaaaattagccaagcatggtggcgggcacctgtagtcccagctacttgggaggctgaggctgcagaatcgcttgaacccgggaggcagagattgcagtgagcccaaatcacgccattgcactccagcctgggcaaaagagcaagattctgtctcagaaaaaaaaaaaaaaagcccaggtgtagtagctcatgcctgtaatcccagcactttgggaggccaaggcaggcggatcacttgaggccaggagttcaagaccagccttgccaacatggtgaaaagaggaaacaaaaattcttcctttttacagtagtgagaagttcagaatcatttcagtcagtaaacagtcaaatgagttccttcaggatctcagttacatctctaatgcacagtaactgttcagcacgttgggatatatattcacaaacagttcactggattttagcactctttgtattccacttaacccttaataattgttgtgagtaggtaagccatgcagtttagtccccatgctttcttctggtggcgtttattggggggcaagagagacatgtttttgcttgcttgccttgggatacgttgttttgggtggtagtggtggtgtttttaactgtacagcaatattttaaaacatggtgctcaaattaggttaccatctggaatttgagaagctttgtttttcagtcctttttttcattactcaaaaatcagtgattattaggataagggagaaatgattttgacattttaagagcataaatcttaaaaccattgttcctttgtgaatttaagccttcacatctaaaatttccagtgccaagtaaagaaagaatgctaatgtgccagaaaggccgttcaagaaatcactccatggatgatttgcctttcattacatcagtgtcaaagtaggcattcagccaaggagtgccactaattgcagtcattggttttacagcactagagcaactttgaaaatgaagaagaaaaactgcacccttaaaccctgagggagcatcttaacagagaagatggattttcatttaggttcttgcttttccttttaatactttctattcctggtcatctcttaaatctagaattgccttaatattttgggaattgccttaatattttgttaggcttctgtttagatttttgctactaatatgatatcttctacagagtaagacggcggcgagatcaggaagatgccctgaaccaaagataccctgagaacaaggaaaaaagaagcaaagaggacaaagaaattcacaacaagtacacagaaagggaggtgtcaacaaaagaagataagcccatacagtgcacacctcagaaagccaagccaatgcgggcagctgctgacctggggagggagaagatcctcaggccaccagtagaaaaatggaagagacaggatgacaaagacttaagagaaaaacgttgttttatttgtggaagagaagggcacattaaaaaggaatgcccacagtttaaaggctcttcaggtatggacacctatcacaccttgatgtttgctctaacatctcaagggaaatctgctttttagagctctttactattttagttatctttatttctttatcaatatatttactcaaaaaagatcttgtttttaagaaagtaaaatcccttccccctcctttaatgttgatcctccatatatcttattcctggctttatttagagtcttatgagagtcatttggtgaacttttctaagattatcagtgaggtgaaagtgtaatcatccctggtacctgcacatgtagcctcagtgaccagaaaagaagctgcaacttgagctttgctacttgatatatgtacttgtgaaatcaaatcacaggggtggcggtagccagagttatctcaggacaccatgctctgtgcacaggtgagccacacacaggcacatgcatagaaaagggaacagaaagaaataggctgcatagttagcagtgggtgaatctgcagaggggaattatggaagatttttttctgtagattttgtcattttgattttctacaagtgagcatgattattcttatgacgaagaaaatatctattagcagtcattaacaacaccatccacaaatctggcccctttgagttgttaaatacaaattggccatttttgctaaatgggtgaaatgtctattgtgggcaccttttaaacagactactaactataagggtaccttgtgtgtgtataataagtaatgatttacaaagcaatttacattctcacttctcagaactgtgcaagtgatgaaatttgataagcatagaaaagaaatatttggaagtaatttttttctaattaaagtagtcaatcctgtcgctatcctcagttgtatatatatgtttgtggacagcataaagtgtcagctgctttacagtttccctaaaatactccatgtgtatagttcttggaacaagaatacctctcttctattttattttatcatattcagcaatatagtgtatctttttttaagacaggagatttttagatcatacccattcttttttaaaggagctttatatgaaaagatcaaaatacttaaaaatttttatctattatttttagagtagggtttaaatgtttatgaaagatacagctttagctgctcacatgggacatataccagaataaagtgattttcttttgttgttttaagaggaaaatgtatttaaaagaaattacaataataatagttgctaacattcattgagcattcactatgagttaggcactattttaagtactttacatggataatttcatttaatttttacaacagcttcattaaatacattaatatctgctgttttacaggtaaggaaactgtaaatagtatagataacttttaaatagtattcccaaaattattcctaaaattactcgaggcctgtgttgattactcatgactgaaacattattacagtcttcctctttggtacaacaaagtggagaatttgccccagctttgatgaatttcttttttctcgctagcagcaagttttaagttgtgtactagggaagctctcacaacagttagaccaatgattttggcagcctgtggggacagcagcaactcaaaaagatgcggggcgggtagtccgggtggcaggggaattatcaagcataaggaagagcacttatctagaaatgtggtcccttcagaatgcagtcttgacacattaaagttagtagtcatcatattttaaaagtgaaatgacagtggaggcatggggatagatacagggaatttcctttggtggcagttcaaaaataatcagctgcttcttcctctctcaaaattatgctgctctctcttgtttcttcagatatattgctcctttgtccacacaatatactgagtggagcttctgtcacaccaacagacagtctctctgtgaaagtttgaaaacagggctactgctttcaatttaaagtaggaacaaaaagtgctaatttcttttttaggaatgtctaaatcagattgtatgtttggatcgccctcacctgtcccattgaaaccaactggtttatttgttcaggtaaacctagctcaaacggagaaggaggcgtgtctgtcatctgttcactcaggagctgctccctgagtgctctcagctctgcaccatgtccttgcgctgtgctggcagtgcgggccctccttcctctggctgacctgcagcactcctgtctgtcctgcgcgggtgtggtgcgtggtgaggcttactgggcaccggatggcggggccttgtttcagaactcctgcccatggtcttgcttttcagttaacttgcaaaattctgccacccacatgccttatttcagctctccttggatatggtttcggttttaaggctgtttcagatgctcttcctttcgattttgtaaaccagtctatttcattttttaggcagtgcttttacatgaagacaaaaagaaacaaaaaacaacaatatttttgagtccccagtcaggtatgtgggttttaaaaaaaacaaatgtgtgttattttatttactgcatactttaccacatgccttttgagactttttctccaaatatgtgcttttaacagggattggacatcagaatcacttgggggaactttaaaacatatagttgcccatcctctacctttatttcctaaagctaattcttcagtggttaagcatgggcctgtgtgttttgtaaattccaagtgatgtttataccacccatgagtggcaaccagagtcttcaattatttgttccagtcccgtgctttttgttgctgctgtcttgccagcagtgttttctcctcctggagagtatttgccacacacaaagtaaggaaaaaaactaatctctagcctgaactccactgttacctctcagctacttcatttattcattctttcaacaaatagctatccagcctctcccctccctttccaagttcaggacaccagcctcaacactgaagatacagcagtgaacaagcaaagccccttctctcatttactctgcatccttttcagaagaggtagacaataaagagatacagagataatatgtcatgtggtggcaaatgctaggaagaaataacaaaacaagaaaagggaaagagaatggttggctaaggaggcagcatctctggtaaagtaacatttaagcaaagaatcaaatgaaacaaaggggccagtcgggggaaattggtgttagactggtaaactcagagatggaaacaggtgttgtcctgcagcatcactgaggcagtgtggcaggagtggaacaggattggaaactcgagagacagaagaaatttgaaaaaaaaaaaaaaaaaaaaaagtggagcaggcagaagggtgagtgagtggtagaggtgaagtcagagggtggatagatctgggttatgaagcgccttcagcagtggtaggtaccgtttttgttggtttttttctccctcaaagtgaaatgagagactattgtagggttttgagccaaggagtgatattatctgaattctgttttaaaaggttcattatggctcctgtgtggaggcagggtagctacttagaaaccaagccatctcagcctcccgatttgtagagatgtggtctcactatgttgcccagactggtcttgaactcctggcctcatgtgatcctcccaccttggcctcccaaaatactaaaatgatagatatgagccgccacacctggccataagcttcagccttgagcagatactttctaaacactttatatagggaaaaaaaactaattcttgcgtagccaaggtgttcattttgccgagaataacgtagcatagtgtttacaattacgtgggtgtaatttctagctttgtgatcctgagagactgccttatcctccatatgcctcagttttctcatgtgtaaaaagggggtaataataatacctgacagggatgttgagaaatccatgtaaaagtacttagaacagcgcctgcatatagtgagagcagagaaaagggaaaaggttcgtggtggtgattgcattgatgttattattccttcagggtatcaccaagtcttccagtgccagcattgttcagttgagagagaaatatagatgctaggcatacacctagaaatagcattgacagtaagttacgatttctgtaattatcttcttagtaaaaaacctacatatttataaatcttttgagcaactggaaaaaaagtattaacttaaatttactacaggaaaaatgtattgcaataattatgttactttataccagaaaaaagaaaacatttataggtggttaaaatcgatcctatccaataaatcagactcttccaaataagtatatgtcagatgatataactgtctagtttatctgtgatatatgtatccaaattatctatgttgttataaatgtgaactgtatctcacctgtaagtggtgttaatttccccacagctcttcctttccatagtattaagtatgtctttggcccacttgtagtttctcaagaaagcatgttgatacggacagcccctactctcatatatggtgtattgaccttaggcaagagatgtggtttctctgagctccagatatgtcatctataaaattggtgttaacaccgtttatctcatagggtgctaagaagattaaagtactgcccagagtaggcactcagtcaagttctctttcctctcctgatacctacccccatcctttcctctaggttgcatatagttctttactcccaaaggagatcacagtagatagaaaatcccatgaatgtccttgctcttcgttgttacctccctccccctctatcccccacacataatgccttagatattcagtaggttttattgattagaggtgaacttatttggaaggaataaaaagacaaagcaggagaatggtcaagaacatgagttttagagtgagacacttgagtttgaaatccagcccaaccatttactagttgtgtgacctctatcaagttatgcaacctctctgtgcctcagtttcctttttggcaaattggtgctaacacctcacaggactattgtaaggattaagttcatgtagataaagcacttaacacagcatccgacacatctcatcactcaataaattatcactgccctttgttactgtggttaacaaacacttgctgtaatttctctcttctaacttataggacaaacaaataatggaaatttttaacataagtatgtagagattgtggtaccacagtgataaactgatttttatgcttaagttaatgactctggtttatgtatgacaatttattcagtatgagaatctcagaaaactaatgtttttttctattccttaaccttcctaccctttttttggtaaagaaaattaccgaaaaaacaaaaaacaaaaaaaaaactacctctgtctatttatttattccattttaatctcatggcttgaaatctgaaaaattggagttgctgtaagagattggtggatgtctttttgccctcatggtgatgtattcttttacagcttttatcattgaccagaattttaaggcctgcttattttaaaaaacgaaaaccagtgttctttatgataataagcttaaaataatagaaatactttttaaaatagtatggggagagctcattgtcagtgaatatagatcattcttgttgatacccttctttgaatattctagtgtattaatataccattgtttatttaatcatgtcttattaatggactggctgttttcacatatttgatatatcaagtgtcttcacaacttgtgcttgcatattctttcccaaaatattgaaagtccatatatttccttgtacatttttaaagttgatatctaaatctttcattgtagttgcaaagcatgtaatttcttgggggaggggggctgtaaatattgacattttaaaataaaacttttaaatcagccttaaatgtatcaaatgaagtataaatattattgctttttcatacccaccatcatttatatacagctcagctcttctttaacaggcaaaaattatatatcatttccctttcctccttgaattcctttgttgtacttctacagaatttcagcataagatgatatattttgtttgtttgtttgaacttctccctgagatgatatatttttattacacatattttcaaatattttattgagtagcttatcatgcttatctgcaacaaaaatgacaggggcaacaagctaggccctattttctataaattgaatttttaagctttttattaaatctcaaaggatgaaaatatcttctatattgagttttcacaattattagaatatataattgatcaaaacaaatgttacaaattttaattaaaaattactttttttttttatacctaatgctaaatgacgagttaatgggtgcagcacaccaacatggcacatgtatacatatgtaacaaacctgcatgttgtgcacatgtaccctaaaacttaaaatataataataataaacaaatattaaaataataataataattactttttatgtttacttacaacgactttaataagaaagatgagattttttccctatacattcacatatctttgggtcgacattatttactgcgtgaatgaaactgttccttttctatccctaattttttttttatagttgataaaaatggaaaaaccccaatattctttatgatagcaaattaaaaataatagaaatactttgagtttgggaatagaagatatattacaatagtgccactcaattattttgattccttcttaattacatgacaaaaaataacagtgatgtatcatcaaaaattatttgtaatgatcatccactatcaatgtaattttatgaaagctaaaaatttggatttttattagaggcatttacattcaccacagacaccagcattttgtttgcctctcctcttctctgggttttttttttttttttttttgcctcatggcaatacaccacagtaggatttggctggttaggagatacgcctttcttttgtaaagtagataaataattgtgaaaggggaattagaaaggacaggtggagtgattcctgaaaaccagcctaagccttgaccacaaaggcattcacagacatataatttttaagaaagagtacacatggaagttgaagagctagaaattgactctcttaaaactatccttgcggccgggcgccatggctcacgcctataatcctagtactttgagacaccgaggcgggtggatcacctgaggttgggagttccgagaccagcctggccaacatggtgaaaccccatctctactaaaaagacagatttagtcaggtgtactggtgtgcgcctataatcccagctgctcaggaggctgagggcaggagaatcacttgaacctgggaggtggaggctgcagtgagccgagatcaagccacatgccctgtcaggtaggctcaggaacacatgggcccaggttggaagagcaccatttatataaaacactctaatgaatagtcgcatatttgtctagttatttcatcaggataaattcccgctcataagaatgataggtttaaaagtatgcacattttgacagtgatgccaatattcccaaattgtgattgttgacaatcccggagagtcagtgacattgtttcccataccctgacttcattgggatagtcttttttcattttacacctgcttgaattcctattattaccattgaactttaccatttttttttacatgatttcatctatctttctttgtacttttgtattggagtattcttgacagggtctcactgtcgcccaggctggagtgcagtggctcaattatagctcactacagccttgaactctcaagcgatcctcccatctcagtctcccgagtagctgggaccataagctagtgagaccacactcagctgatttttaaaatttttttgtagagacagggtctcgccatgttgcccaggctcgtcttgaactcttgggctcagatgatcctcctcagtttccagaagtgttgggattacaggcatgagccactccacccggcccagtttattattttaacctcacttatatgtgtttgccatacagatgaatgtttgttttaatagtgtgatctagccaacttttgcatggtttcttatcatgcttaccaaattttataaatgccatattattcctctatattatataaaaattcattcatgtgttatttctagtacttttgtttttttacatgcaaatattttatattcaggtatagtgaagatttttctgatatagtagattacatgtttaaatgctacagtagtaaaactactagtactatacttaccaaagggtttaacattttgggaaaaacagaaacgggcaagtagcagtataacaataactaacttaccttctagagaattggcattgtttttcaattttttttttcttttagagagaagggtttcactctgtcacccaggtaggagtgcagtggcacaatcatagctcactgcaacctcgaactcctgggctcaagaaatcctcccacctcagcctcccaagtagctcacaggcatgagccacctgtgcctggctcaatctcttttttttttttttttaataaaagacctgtcactgaggtagtggaagtgccttgagtaccatcaccaacatcgtttcctctgtcatgtccctctcaaccctagaaacatccattattatgaggttaagtctccaagtttccttttttttttttttgagacaaagtctccctctgtcacccaggctggagtgtagtggtgtgatctctgctcactgcagccttcacctcctaggttccagtgattcttctgcctcagcctcccaagtagctgggattacaggtgtgagccactgcacccagccccttctggttcattttttatactctttcatatgtactccttaacatatgtttctccttggtgaatttttaaattaaaatggcatatcatggcatataataagaatgtcctacaaaccagggatggtggcacgggcatgcagtctcagccactcaggaggctgaggcaggaggatggcttgagcccgggagatctgacactgtagtatgcaatgatagtgcctgtgaatagtcactgcactgcactccagactgggcaacaagctagacctcatctattttaaaacttttatatggtgctgtttttatatttgggtttttttctttacagtattccaccctgtgaataaaaaatattctatgtatttattacccagttttaggttgtattcaatattctgctgttattaacagtgctatagtgaacatccttgtggaagtccccttgagcatgtatgagagattctttagggtttgtgtgtctacaagtcaaatcgttaggtcatagcttatgtgcattttagttagattctatcagattacccttgtattggctgaaataattagaactcccaccagcagtgtgtgggtcatttctatgtattcttccaaatactttatttattaatttttcagaattttcatttttgcaagtctgatggatgaaaactactttggtgttgttctcatgtgtatttgtatgactctggtgatgcaaggggcccttttacttttttttttttttttttttgagatggagtttcgctcttgttgcccaggctggagtgcaatggcacaatctcggctcaccacaacgtctgcctcctggattcaagcgattctcctgcctcctgtctctcgaatggctgggattacaagcacataccatgacacccggctaatttttgtatttttagtagagacagggtttcaccatgttggccaggctggccttgaactcctgacctcaagtgatccacctacctcagcatcccaaaatgctgggattacaggccctttttacatgtttattggccatttggagttcctcttctgtgaattgtctgtccaaatcatttgcccattttcccattgaattatttccctattaatttttaaaggttcttcatttattctgaataccgctcttttattattatataaatttcaagtgtctacctgcagtatatcttctgtttcaactttttgtgtgtattgccattccaaagtttttaattttgagataatcaaattattagttttccataattagttttcatcatcatttggttcataatttagggtcatctttaagaaattcttctctaacctgaggtcataaagatatccatctgtattttcttctaacagctttaaaactttgttttttctatttagacctttaatccatccagagtttgtatgtgtatgaagtatgaggtagtctctttttttttcttttttgagatggagtcttgctctgtcgcccaggctggagtgcaatggcatgatcttggcttactgcaacctccactcctgggttcgagcaattctcctgcctcagccttccgagtagctgggactactagtgtgccactgccataacccagctaatttttttttttttttttttttttgtattttagtagagacgaggtttcaccatgttgcccaggctggtctcgaactcctgagctcaggcagtctgcccgccttggcctcccaaagtgctaggattacaggcatgagccaccgcctggctgaaaagccaaatctccatactttgtgcagttcacaatatcgaagatgggtgcctacagactagtagacactttgtggcataaataatacagtggtagaacaatagagtactttgtttcttcttgactgaaatttcttactgaattccctggctgatatttttcattgtgagttgcttatctcgatgtcctgctttgaaaagtatgtgtttagggaatgtttttatttgcatacttactatgtttgctatggaaaatttagaaagtaatgttaagtaaaatgaagaaaataaaaaccatctgtactccctccattctagcattaactactatttagattttggggataaagttttcctgtctttttacattaatacaataatagttaacatttattaagcattttctagtaccaagtactattccagttgctttacatgtattcgtctaatcttcacaataacttcaagggggcaggtattattgtcctcattttacagataaagaaaatgaggcaccaaatacatgattggtggggtatattttagttttttgaaaatgctatttatatagttttataccttgttttttcatattattatccttctgtgtatacctaatattctattatgtgcatagttcctcatatacttggtcatatcgtaagttttggattttaagttctttgcattgttaattataaggtttttatgaatatttatttagcagaatttctacccacctcctcctgatcttcttccttctaataatttggcaaccaaaaattgatagttttaatttgcatttcattgattacccctgatatagaattttttcatatacttatgccatttttttttctattttatatattaccttttcattacctagttatctattggtgttcattcttttctctggtgacttacaagttcattaagtatggtagtgtgcttaggaaactcttaccctaccccaggattacctacaggattactcactctttcttacgctctgactttcttatagttacatttaattctgtattcacttggaaatgggtagagaagaaggatatggtgtgaggagggaaactacctcctttcttcccctccaaaattacttatttgacataatacagttattgaataattcatactttcccccattggtttgaaatgcaaacttcattatgtattactttgttacatataatcacttaagaatttctcaggtctcttcagttttttcgttgatctatttgttcagactccagaacaaaatttagtaactattctgtggtattggttttaatcagtaatcctcatttgtgtcctccacctgtaaatataataaatttccctttttccttttatatcaataagttattgctacaatgattaccatccacagcttcgtatctgcagagtaatgatctaagatatttatttctggccagataattctttgcaatctattatgtttggctgcaaatgaagatactgaattatacaaggcagaaccttaagttcgtctggtgctctgtaccaacatggaaatagtgaatatgtaaatgtattaaaatgagatcactctaggaacctgtctgcattcagaaagaattttgactaagcttatatttaattaatcatgtgcatatatacttttcaatatcaagtcttattacttgattcaaaacaagtgaccaattctagtatgaagtttttgtgactacttaataagaagtaattttatggcttttgtcataaagcgaggcttgtttcatttatattgggttttgtttcttcccctcctctaggtagcctttccagtaaatatatgactcagggaaaagcctcagcgaagaggacccagcaggaatcatgagggaaggaaaatgcagcactctaaatggccactcaggcgttcctattcactcggaaaattaggttcatttcacaggacacagcagtgtagatcaggcttcaacttaacatttaagggaaatgtcagatttttttttaatttaatgaaattgttaatgaggaaaaatttttaatatagtcttatctaccacacatccccatagatttaaggattttaatagaaagtcatgatgtatgtatttaagccacgttaaaagaaaaaatataactatggaccggtattcagtgaatacagtttcatggtttttaattctttcaaagcacattaaaaatggtgtgctgataaaccccaagtaaattaaccctttttccgtataaatccattttttgttttgaagaggggaaattatatttattgttgtttactgaatcctggtgtgaaagcatatcagatatgtatgaactgctactgctgtacttccgatttacggacatcattttattgctatttgtagacgtgataacatgaacatgagtacctatttatgtgggccttcagtggatgggcagtgccactcaggtctctggggtttccctctctaattttaagtaaattgacatataactactatgcttataaaaatgaagtaaggaaaacaagtagtcctgtttgccactaaaaacattttcaaaggaaaaataaaatgaaagtactttttactttttatgatactcagaaattaggatgaagaacttttaaaattgctgaagatcaaagaggttatctctgccagtcacaagtgtggctggtgtcattctgggtctgactggagccctcctggactgtttctttaatttcaaaagccctgcagacatagtacctggtcagaactatgcctcggtttatttatcattttgaaataaaatcaaaatttcaacctgtaattttatctacattattttctagtgaaagattcctaaatttcctggggaaaaaaaaaaaagatcaaggagtgagaacattgggaatgctagtaagaggcgtttaacaaaaaagaagaaaggacaaatatactcccctaaaatagtgtacacagacttccctttgacttgtgcccttgcaatcattggtgtgtgttaacatccagtgtgttccaggctctgggaacgtataaatttgttattataaaaggcacagatgggggtgggggggcggggaattttgtaggcagggaggctcagggggtgcttgctggacgaacattctggatgtttgaggactcagaagacgcacatccctgtgcccttcttttttaaacaattatttgaagacagtctagctaaagacgaatcatatcaaaattaaagacttcagaatttggaggccatggtagaaagaattagtgatcattccctactcattttgaacgcaaactaatgaatgacgcaacctgggctgatgctgctctacgtgaccgtcctcagctgcccccttctggtttcttctctctaactcatgcatgaaagtcgactaggcttacaatgcttgtcacacttttctttgaaaagcccattgatgctgttctgttgttttctagcattatagcagaagacaagtctaagaccaggctgatttttgttctcttgtaggttttgtttttctgcctgggtgcttctgttttttaattttatccctgtaattcagaaagaaaattacctcaatatagaaatacatctatccagtgacttttcatgctaggaaaacttcaagtttaatctctacatgactggcttaatttttactgtcattctggtgcttcctgtttctaatatggattttctcattgcacttctaattttctggaatttacctcactgaccttcctttacctctcatttctttagtttacttatattctcttccttttcataggagccatattttcttgtatccctttaaggatgttaaaagtttcctacattttaatctgatccttaaggtagcttctgcccaaagtactgggtcttttgtttgattttcaatacctcacactggatccatgggacaatgagcagtatttgccagcaggcctggataatggattgcccttgattctttacctggatgtggtcacagccccatcttgctgccccagctgggatgccaaaacgtctgctctttgctaagtccattggcctagctatctttcaagtgcagccggcttatctatcttaagctgtacaaatgccccattaccaaggttctccttgccaccttctctcaggaacaaaaatatgaaatctcttttgtatagcagtggtccagtggccccaatctatgatgtttaaaactcttgcttggctgggtgcagtggctcacccctgtaatcccagcactttgggaggccgaggcgggcagatcgcttgaggtcaggagttcgagaccagcctggccaacatggcaaaaccccgtctctactaaaaatacaaaaattagctgggcttggtaatgggcatctgtaatcccagctactcagaaggctgaggcaggagaatcacttgaacccaggagacggaggttgcaatgagccaagattgcaccactgcactccagcctcggcgacagagcaagactccatctcaaacaacaacaacaacaacaaaactcttgctcaatgtgtgcaggatcagcagtgtgcaaaaatgtttttaaatgttcttagataacttcagtgtatttttcttcttgaaatatgtttgacaaatggcttctacttttaaatctttcctgagtggaaaagatcctggataaatacatcaatagagttcagtgttacaagcaaaaatatacacacacacgttgaaaacagaatttatcaaacccctgtaaaactgtaaagccctcagtagttttttctttggaagcaggcatatttggacagcagcagtcaagaactacatagactttccactgaatggaactctagacttagacaaggtctggcccacctcgttttccagctgtgtggcagtcccctaatctcaggcagttcagtttccattcctataaaatggaaaccattcttggctttccacacagttgtgataatcaagtgaggtcttaccaggaaaacacttctttaaatgtctagaactatgaaactaatgcctgaagtgcggggtgaaacagttccctattgcaagttctgtcacatattagtggaaatctaaaagtggttacagcttgtaactcttttgacacttcccatacccacctcattttgacaccactggacagctgctgctctgagataagctcacatactgcttaaataatcgtgaaaattatttattctaacataacattatttcagggacttgtgccagtttcaagtgatattagaaactaacaagtagattatgtgacttaatgcttatgtgcaaaacaactaaccaagttaaaaactgaatagtggggttttcttttttgtttgtttgtttttgttaaatagtgggtattaaatagaggaaagaagtctgttaaacatacacaggatcctgaatcagaaaattgaggactagatgttttcaatagtgtctaatgctctctactaaaatccttgagtttcagcatctgtaaaactgccatgccagtgcttctgccctactcagttcaaagttgtgaggctagtatgagataatataatatgctcatggagttttctgaatcttgtaaagtgctgcacaactgtgtaatgtgtcaataactgaaaaaaaaatgacagcatcttttatttttattaaattttaattttagggctgttttaggttcacagcaaagttaagcagaaaaacagagctgcatatatcccttgtttccacatgtgcctcactgtcactctgcaccacagtggtacacttgttacaatcttaaacctacatggacacatcattagctctcagtgcccatagtttaccttagggttcactcttggtggtgtacattgtgtgggttttgacaaacgcataatgatatctatccaccattatagtagtttcacaatacatggcatctttaaatactcattaacaattaccatttgagtgaggctgtgtgccttgcacccctctaagggcttctcctgtattaactcatttaatcttcacaatatctgtaggagggaggatatgagatcccaaacccccaggtagtcaaagatgaaggccaagaaacaaacccaccacaccaccacctctctatgtccctccctccctcccttcctccctcccatcactttttcagtttctttctttcgagatgcagtctcgctctgtcacccaggctggggtgcagtggcgcaatcttggctcactgcaacctccgcctcctgggtagctgggattacaggtgcccgcaaacacgcccggctaatttttgtatttttagtagagacggggtttcaccatgttggccaggctggtctagaactccttatctcaagtaatctgccggcctccggcctcccaaagtgctgggattacacgtgtgagccactgcgcccggcccccagtttcttttattttctttctttctctctctttctttcttctttctatctgtctgtctgtctctctcttcctatcttccgttctttctttttttttttgagacagagtctcactccgttgcccaggctgggagtgcagtggcacgatctcagctcactgcaacctccgcctcccaggttcaagcgattctcctgcctcagcctcctgagtagctaggataacaggtgtgcaccaccacacccggctaatttttgtatttttagcagagatggggtctcaccatgttggccaacctggtctcgaactcctgacctcaggtgatctccccgcctcggcctcccaaagtgctgggattacaggcgtgagccacgcgcccggcccccagtttatgtgcagataaggcttaggggaaaaaaaaaagcgtcctcttattgtcaatgcgattgcatttctgtagcaggaagtcagaactacttgatggaattttgaactatcctttcagaaactgcaggagatcgaagataaacttggctttaaaaaatgtttcactgattagttcttcccacattcaaacactgcgaatctgtcctccccaggactgcttcatagacccctcctgccctttttccttcacttctagcacttcaatgacaaatgccacctgtcttgatgtcctcctctcttcatctgctagccctgtcctgccagtatctcattcttccctggcccctctttacctggcttcctgtgtatgcctgggtaccgcgcctgtgcagtgtctggtgctcaggaatactgcatcaaaaggcagaattaagcccctgagcagccaggacaaggtctgacaacacgttttaaatcgagtaattgttgctcgctataaatgtgactattcacactgctgcccagtcacattttcaagtagggttggttcccagttcagcaccagaatgaaaactgcattagtcaccacccttcagcatccccagcagtacagcacgctggggagaagggtggagggtggcgattatacaactctgcggtaacgccatgctcttaagaacagcctaattggaccacaaaagaagaatgaaaatggatgtagatgtctgggcatcggaacgatcactctgcatttgagagcataagctcccagtgcagggttgacttatgcgtccttaagtgtcaccgcctatgatggtgtttgtcacggtgagtattaaagcagggggtgacgctgcaccttgccccgggggcaggtggtgaagctacgtgcatccggagtcagcaggtctgaggtcattcctcgccccctcccgcccgctccccgacgtcacgccgactccgtcctcggcggtgaagacattcctcccgggccctgcgccctgcagcgtggtaaccccactgccggagaccgtgcgcaacccagctgctagacccccggcgttgagcggcaaaaccccgccccgagcggcttgccccgcccccggctcgtcactcatgcaactcacccaatggtggcggcggggggcggggctaggactgagggcgccgtgcgccgaagcttgtggcgtcaatgcgcccgccgtgtccatggagagaagctgaggcggccgaccttcggcccgaggcaccggggcgccgggacggcgaagatgtcggcttccttagtccgggcaactgtccgggctgtgagcaagaggaagctgcagcccacccgggcagccctcaccctggtgagtgctcgcggcgcgcggcggggcccgtgacattgctcgtgtccgccccgtgcaaggggaggtcacggcggccgggagtggggccgcagggacgcggacacgtcagacctcggcgtcgctccgacccgccgcacagcctcgccgcctccttcgcctccggcccctctttgcaacgataaacaagtcccgggcggggctgctctcttggccccggaaactacgtttcccgtcaggccgcgcggcaaccgcgtgcgggccggaggggatcccgggggtgggcgtccccgggggccgatcgcctccacactcctgccggcctgcgctgttcggccgttccggttaagcagaggctgaacgtgcccggtggcgggggttcccggtggtggcccggagtcctagcctggaggtgcgtggggtggggagggaccaggctgtccgaaggaccgctgtgtcggggcgacagcgttcgcagagggcgagcacagcgacaacaaagcccccggctcctgccgaggtcacggccgcggcgcgcaaagcgttacttgccggtgtcctgggtgattgaggcctttgaaactccctctgtgcctctagcaagcctaggctcttaggacaaaagatgatttcccagagtgagtttacagccttttctgggtgaaaggtcaaacactcagagggcaccagagtgcaaccattgattacttagagaattcactgagctcagtgttccggccgcaccgttcagttttttagtggaaggaaaatccacataacataaaattagtccttttaaagggtacaattcagtgccatttaagacattcacagtgtcgtgcaaccatcacctctatctagttccaaaatactttcaccccaaaagaaaaatttatgatcacgttcctacatacactccccttttagtgaaggagacgactttatgcaaccattcgcttagagactgggaaaaaaaacgatttaaattgactcatcgattctgttgcatctaatgccaaaagggcctattaccagaaaataagtttgtagcaaagtagaagaaaattgtgatcaggtgagagaatttatttttataatcaattttttaggcctttgatattaccctgattatatatggtactactagtgtactgattatgtatcattctatattacctcttttctgtaggagcaagcttattttcatacaccgtgggatgtagaattaaacaaggttttaagaactagagggcacaactcattctttgtgtctctttcaatctcagtaagaattattcagaattcttccactggtaatggtagatccaggaagagccagaaggttcaggaacagtttttgccttttcttttttgctttttagcaaccctattaactgggtttttttttttttgttttttgtttgtttgtttgtttttgtttgttttgtttttggagacagggtctcactctatctcccaggctgtagttcagtggtgcaatcatggcacactgcagcgtcaacctcctgggcccaagcgatcctcccacctcaggctcccaagtcgctgggaccaccggtgtgcaccgtcatgcatgcacctagggtctccctgggttgcccaggctggtctcgaactcctgggctcaagcagtccactgcctcaggctcccagtgtgcagggattacaggtgtgagccaccatgcctggtccctgatgtctttctccatcaccatttgacatgttacctcttccttcagaatttcttttttttttttttttttttgagacagggtttcgctgggttgcccaggctggagtgcagtggcgtgatctcagctcactgcagcctctgcctactgagttcaagcaactctctgcctcagcctcctgagtagctgggattacagacgcccaccaccatgcccagcttatttatttatttatttttgtatttttagtagagatggggtttcaccatcttcaccaggctggtcttggactcctgacctcgtgatccactcgtctcagcctcccaaagtgctgggatcacaggcatgagccaccgtgccttgcccttccttcagaatttctatgtcagtccctttctctccattcctagtcattcagcagacatttatcaagatctgctgtgtttcaagacaaatgaatgagttatacagttcccagcctacggggcacagtcgcaggccaagcctttgccacctcttactaggagtaatagcactgcacattctcaggcttggtctctctccacacttgctcccctctgcttcagtacatgttatcatagcagttctcaaggtatccatgttgcctgactcagctgttttgattaacttgcaggagtctactgtctgtactctgttgtcctacttaagtatggctgactttagaagcttctcagaagctgtaccagagagaaggcacatcaatgctgttttccacacagcctgtgttggtgggcttgcagtcattttagttccagcattcgtgccctagtcaggacactatggcatgtattgctctttgtgcttagtttatcatcagcatgtatcgtcaagtgcaaaagtagtgatgccgtcaaaggcctaatgaatggagacagataagagagcaaacaaaagtatacgtaattcagtaaaactgattggaagaggtaaatgttacttgggtctaataagtagagacagataagagcaaacacaagtatacctaattcagtaaaactgattggaagggataaatgttacctggatatataaattttgatgttaggaatttgacatgttgcaacatttgaaaagtgctatatgtgtggagtctaccagatgtcaacaaaaggctaggaaaagtaactgataatataacacagttcaatgctgtcattatcagattatctacatcttccctatttccctacatatctagaaattgacaagtggaattgaacttgcaggagccagatgtgattaaagaatctgaagagtaaatagtgccctgcttgcagacagatttatttccatcattgtacaagtcagagcaactctaatttgtaggactggggtggatcacagctgtgcattaaaactcaaccaagttctatgagagaatgatggtgcacagccactatcattcttgatgaattcattgtgtacggaaggtgccttagggcttaactttctattggagtccagttgagaagctaggaaatgcttaatgctcagtaaggaactgtgtgttagttcattggactagaaccagaagtccttttgaacagtgaccaagcactaagatttctatacgaaggcagtttaggaaatactacacaagaagcactggaagtagcctagcagtctaacagtgaaagaacggttaagtacatgagagtagatcctgttggtgaaggatgtagtcattgtaaattatggttttttttaagtttcagcgttataaatcttcattctttgacttatgctgtgcaaattatttaatctttaatacctaaatcacaatggcaggaataaaaagatgttacgtttaaaccattaaacacttagaaggtgctcagtaaatggtgaatatatgtttattaccatgtatcaaatgaaaaaataatttgttaaattgtttcaatggaggctgcaaaattatgtatatatgccatgattacaaacctttttctttttagagacaggatcttcctctgtcacccaggctcatatgcagtggcatgatcatggcttactgcagcttcaaactcctgggctcaagcaatcctttcacctcagcctcccaagtaactgggactacaggcacatgtcaccttgactgctaattttttttttttaatttattgtagagacagggtcttgctctgttgcacaggctggtctcaaactcctggcctcaagccgtcctcccaccttggcctcccaaagtgctggcattacaggcatgagccaccacacctggcctacaaatatatatttgtatattatatgtattttggatgtgtatatacacatatacacaaataagaaaagacaaaagagaatgcttttgtcttttcttattttgacactctaatgccagccatggctgttaaagaatgattttaataaaatacactgtacttgttcactggctctatttatttaccatcttttgttcccccagaaaattgatatgttgacattaaaatgccatgtttgtagagaaattaagttgtagttgttggcacatgtttagtatgcataatcacagagttaactttagctttgaatttaatttaattttcttaaacagcaaaaaatgaaaattgcctggggagttacttaaagaaatacaggattgagaatgaaaagtttctcctacaaggattagaaagcgtgttgctatgaagtagtgataaaacattcatctacaatgccttttcccttaattttaacagcggaaacatcttggaaatatatttatttttcaattaggccaaaataccttacctcaaagataacctctcactttaaaagtcatattcctgtgatttgcatgtgagtaaaaaccatcatattttagtgggcttcaggaagctcttaaattttaaaacatgggccaaat

SEQ ID NO: 417 - DNA, 4100 bp, Homo sapiens
ctgtgtaaagtgagcgcaggaaatgaaaatgcttgtctgacaacaaagcatttaactgcccttggaaaactagaaccaaagctggttcctttggtgattgcatttaggtactgggcaaagctttgcagtatagatcgccctgaagaaggaggtctgccaccttatgtgtttgccctgatggccattttctttcttcagcagaggaaagaaccccttttgcctgtatatctaggatcatggattgaaggattctcattaagcaaactagggaatttcaaccttcaagacattgaaaaagatgttgtgatctgggaacatactgacagtgctgcaggggacacaggcataacaaaagaagaggcaccaagagaaacgccgattaaaaggggacaggtgtcattaatattggatgtgaaacaccagccttcagtaccagttgggcagctctgggtggaattgctgcggttctatgctttagaatttaatttggctgatttagtgataagtattcgtgtcaaagaattggtatctcgggaattgaaggattggcccaaaaagcgcattgccattgaagatccctactctgttaaaagaaatgtggcaagaaccctaaatagtcaacctgtgtttgaatatatacttcattgtttaaggacaacatacaagtattttgctcttccacacaaaattacaaaatccagccttctaaagcctctgaatgcaattacatgtatttcagaacattctaaagaagtaataaatcatcatccagatgtacaaacaaaagatgataagctcaaaaactcagttttggcccaaggtcctggtgctaccagttcagctgcaaatacctgtaaggtacagccacttactcttaaagagactgctgaaagttttggaagcccaccaaaagaagaaatgggaaatgaacacatcagtgtccaccctgaaaactcagactgtatccaagcagatgttaactctgatgattacaagggtgataaagtataccatccagaaacaggaaggaaaaacgagaaagagaaagttggaaggaagggcaagcatctgttgactgttgatcagaaacgtggagagcatgttgtctgtggcagcacacgtaataatgagtcagagagcactttggatttagaaggcttccaaaatcccacagctaaagagtgtgagggacttgccactttagataacaaggctgatcttgatggagaaagtacagaaggtactgaggaactagaagactctctaaaccactttacccactcagtacagggccagacatcagaaatgattccctctgatgaagaggaggaggacgacgaagaagaggaggaggaagaagaacctaggctcaccattaaccaaagggaagatgaagatggcatggctaatgaagatgagttagacaacacctacactgggtcaggggatgaggacgccctatctgaagaggatgatgagttaggcgaagctgctaagtatgaagacgtgaaagaatgtggaaaacatgtagaaagagctctcctagtggaacttaataaaataagtctcaaggaagaaaatgtatgtgaagaaaaaaattcacctgtggatcagtctgattttttttatgaattcagtaaacttatcttcaccaaaggcaagtctcctacggtagtgtgcagcttatgcaaacgagagggtcatctaaagaaggactgtcctgaagacttcaaaagaatccagctagaacctctgccaccattaacacccaagtttttaaatatcttagatcaagtctgtatccagtgttataaggatttttctccaacaattatagaagatcaggctcgtgaacatattcggcaaaacctagaaagtttcataagacaggactttccaggaactaaattgagcctgtttggctcctccaaaaatggatttgggttcaaacagagtgaccttgacgtctgtatgacaattaatggacttgaaactgctgagggattggactgtgtcagaactattgaagaattagcaagagtcctcagaaaacattcaggtctgagaaacatcttacctattacaacagcaaaggtgccaattgtgaagttcttccatttgagaagtggtctggaagtagatatcagtttgtataacacattggcccttcataacacaaggcttttatctgcttattccgccattgatcccagagtgaagtatttgtgctataccatgaaagtatttacaaagatatacaaaggtgaaaagaaacctgaaatatttgttgatggctggaatatttatttttttgatcaaatagatgaactgcctacctattggtcagaatgtggaaaaaatacagaatctgttgggcagttatggttgggccttcttcgtttctacacagaggaatttgattttaaagaacatgttattagcatcaggagaaaaagtctgcttacaacttttaagaaacagtggacctcaaaatacattgttattgaagatccctttgatttgaatcataatcttggagctggattatcaaggaaaatgacaaattttataatgaaggcttttatcaatggtagaagagtatttggtattcctgtcaagggatttccaaaggactacccctcaaaaatggaatacttttttgatccagatgtgttaactgaaggagagctggccccaaatgatagatgttgtcgaatttgtggaaaaatcggacacttcatgaaggactgtcctatgaggagaaaagtaagacggcggcgagatcaggaagatgccctgaaccaaagataccctgagaacaaggaaaaaagaagcaaagaggacaaagaaattcacaacaagtacacagaaagggaggtgtcaacaaaagaagataagcccatacagtgcacacctcagaaagccaagccaatgcgggcagctgctgacctggggagggagaagatcctcaggccaccagtagaaaaatggaagagacaggatgacaaagacttaagagaaaaacgttgttttatttgtggaagagaagggcacattaaaaaggaatgcccacagtttaaaggctcttcaggtagcctttccagtaaatatatgactcagggaaaagcctcagcgaagaggacccagcaggaatcatgagggaaggaaaatgcagcactctaaatggccactcaggcgttcctattcactcggaaaattaggttcatttcacaggacacagcagtgtagatcaggcttcaacttaacatttaagggaaatgtcagatttttttttaatttaatgaaattgttaatgaggaaaaatttttaatatagtcttatctaccacacatccccatagatttaaggattttaatagaaagtcatgatgtatgtatttaagccacgttaaaagaaaaaatataactatggaccggtattcagtgaatacagtttcatggtttttaattctttcaaagcacattaaaaatggtgtgctgataaaccccaagtaaattaaccctttttccgtataaatccattttttgttttgaagaggggaaattatatttattgttgtttactgaatcctggtgtgaaagcatatcagatatgtatgaactgctactgctgtacttccgatttacggacatcattttattgctatttgtagacgtgataacatgaacatgagtacctatttatgtgggccttcagtggatgggcagtgccactcaggtctctggggtttccctctctaattttaagtaaattgacatataactactatgcttataaaaatgaagtaaggaaaacaagtagtcctgtttgccactaaaaacattttcaaaggaaaaataaaatgaaagtactttttactttttatgatactcagaaattaggatgaagaacttttaaaattgctgaagatcaaagaggttatctctgccagtcacaagtgtggctggtgtcattctgggtctgactggagccctcctggactgtttctttaatttcaaaagccctgcagacatagtacctggtcagaactatgcctcggtttatttatcattttgaaataaaatcaaaatttcaacctg

SEQ ID NO: 418 - protein, 991 aa, Homo sapiens
MAIFFLQQRKEPLLPVYLGSWIEGFSLSKLGNFNLQDIEKDVVIWEHTDSAAGDTGITKEEAPRETPIKRGQVSLILDVKHQPSVPVGQLWVELLRFYALEFNLADLVISIRVKELVSRELKDWPKKRIAIEDPYSVKRNVARTLNSQPVFEYILHCLRTTYKYFALPHKITKSSLLKPLNAITCISEHSKEVINHHPDVQTKDDKLKNSVLAQGPGATSSAANTCKVQPLTLKETAESFGSPPKEEMGNEHVHPENSDCIQADVNSDDYKGDKVYHPETGRKNEKEKVGRKGKHLLTVDQKRGEHVVCGSTRNNESESTLDLEGFQNPTAKECEGLATLDNKADLDGESTEGTEELEDSLNHFTHSVQGQTSEMIPSDEEEEDDEEEEEEEEPRLTINQREDEDGMANEDELDNTYTGSGDEDALSEEDDELGEAAKYEDVKECGKHVERALLVELNKISLKEENVCEEKNSPVDQSDFFYEFSKLIFTKGKSPTVVCSLCKREGHLKKDCPEDFKRIQLEPLPPLTPKFLNILDQVCIQCYKDFSPTIIEDQAREHIRQNLESFIRQDFPGTKLSLFGSSKNGFGFKQSDLDVCMTINGLETAEGLDCVRTIEELARVLRKHSGLRNILPITTAKVPIVKFFHLRSGLEVDISLYNTLALHNTRLLSAYSAIDPRVKYLCYTMKVFTKIYKGEKKPEIFVDGWNIYFFDQIDELPTYWSECGKNTESVGQLWLGLLRFYTEEFDFKEHVISIRRKSLLTTFKKQWTSKYIVIEDPFDLNHNLGAGLSRKMTNFIMKAFINGRRVFGIPVKGFPKDYPSKMEYFFDPDVLTEGELAPNDRCCRICGKIGHFMKDCPMRRKVRRRRDQEDALNQRYPENKEKRSKEDKEIHNKYTEREVSTKEDKPIQCTPQKAKPMRAAADLGREKILRPPVEKWKRQDDKDLREKRCFICGREGHIKKECPQFKGSSGSLSSKYMTQGKASAKRTQQES

SEQ ID NO: 419 - DNA, 26453 bp, Mus musculus
  misc_feature (1)...(26453): n = A,T,C or G
tgaactcttactttgcatttcagctagnnnnnnnnnnnnnnnnnnnntagagcatgtagactttaggatgaagctcagaggcacttacttaaaccgcagtcacgggtctgaaacctatttagggaaaccacagctgttgctctgggaggctagaggagggacaatggagtcggtaacttagtaagacatcctaaggatatgtattagtcagggttctctagagtcacagaatttatggaatatctctatatgttaagggaatgtattgtaatggcttacagtctgcagtccaactaacccaacaatgggcaactgcaaatgtgaagtccaagaatctaatagttgctcattcccacaagagtaggtgttttgcctggtcttctgcataagctggaactctgaagaagtaggttccaacagatgtgctgcaagtaagtgctagcaggtaaagaaaaagaggaggaggatggagaggaagaggaggaggaagaagaaggagaagaaaaaggagaagaagaagaagccttccttcttccattgtccttatgcaggcccagattaccaccacatctaggtctaagctgctttttatttggaacttgctctgtcccagatctgcttgcttctgtctcttgagagtaaagtcgtgtgtatcaccttgcctgctcctaagcttttcatggccactatacctcaagatccaatcaacagcgtgtcttccagcctcaatatctggatcataagtgtgccctccatttctggattgtaattcattccagaaatagtgaagctgacaactgggaatacccatcacggccaaattttgggtagagttctttggctgagtttttgaaggaatcctggagagaccctgcgatgcttaactacatggttctagttagccccttttttgtgatctcaaaaacatataaaacattttatgtactgggctttggagttgttgaataaatgaaccccaagtttttagtgtctgagattctcactcaagcatggtacctaattaggcttcaaagcctgacctcgaatcatcctgaggaaggtgcaaggcttttgtctcctagacacannnnnnnnnnnnnnnnnnnncacaaattgtcccctgacttctatcatgtgtatgatggcccatgcatgtgcaactcatagaaatacaaaataaatgaagttattgataaacaaataaataaatggcaccaagaacctggagacacctggcccagaccccgaccaccggttatgcttgcttgggtcagactatgtattttatactgaactcttactttgcatttcagctagcatcttagcagtgaaccccaagaaacaatagcttccttattcagaaaaagattggttcttcaaaggcatggcttcttcgttagagcatgtagactttaggatgaagctcagaggcacttacttaaaccgcagtcacgagtctgaaacctatttagggaaaccacagctgttgctctgggaggctagaggagggacaatggagtcggtaacttagtaagacatcctaaggatatgtattagtcagggttctctagagtcacagaatttatggaatatctctatatgttaagggaatgtattgtaatggcttacagtctgcagtccaactaacccaacaatgggcagctgtggatgggaagtccaagaatctaatagttgctcattcccacaagagtaggtgttttgcccggtcttctgcataagctggaaccctgaagaagtaggttccaacagatgtgctgcaagtaagtgctagcaggtgaagaaaaagaggaagaggaggaagaggaagaggaggaggaggaggaagaagaagaagaagaagaagaagaagaagaagaagaagaagaagaagaagaagaagaagaagaagaagaagaagaaaaaggaggagaagaagaagccttccttcttccattgtccttatgcaggcccagattaccaccacatctaggtctaagctgctttttatttggaacttgctctgtcccagatctgcttcctttttttttttttttttctttttgcttgcttctgtctcttgagagtaaagtcgtgtgtatcaccttgcctgctcctaagcttttcatggccactatacctcaagatccaatcaacagcgtgtcttccagcctcaatatctggatcataagtgtgccctccatttctggactgtaattcattccagaaatagtgaagctgacaactggcaatacccatcacggccaaattttgggtagagttccttggctgagtttttgaaggaatcctggagagaccctgcgatgcttaactacatggttctagttagcccctttttttgtgatctcaaaaacatataaaacattttatgtactgggctttgaataaatgaaccccaagtttttagtgcctgagattctcactcaagcatggtacctaattaggcttcaaagcctgacctcgaatcatcctgaggaagggtgcaaggcttttgtctcctagacacacccaggaggcacaggggaaaatgccctcctgcagtctggtggggcaggaaggttcagatatcatccgggactcggtagcataccttctgcatggctcatctgtcttttcctccttccagggtgacaccagatgagctggcatctgcatcaaagtcaagagactagcccaggggagtcttaaagcttgatttcctatggccccaataatcacattctacttccccaggtgcccgggagggctccaagagttgaatttgctaagcaactgatgggggctggaagaagagtagacagcaaaagccttttctaagccatgctgccctctcttgaacttaagttacttcttcactttagggagggacctgacatgttgtcaatctacagcaccggcatcgcttaagaacttttttccctttggtgtgtgtatggtggggcggcggggagatgatggcccacaacttggtttttttgtttgtttggtttttttacttcttaaattttattatttatttggggtttgtttgttgagacatgttttctctgtatagtcctggctgtctgtcctgcagctcactctgtagaccagactagtctcgaactcacagagatctgcctgcctcagcctccagagtgctgggattaaagacgtgcaccaccactgccccccttttaaaaagcaaattctagagactagagggatgatttaataagtaaagtgttttctgttcaagtataaaaagttgagctcagatctctggcacccacataagagccagacacaggagtataagtctgtaaccctagagttaggttgggaaaagaggccgagacaggcagatctctggacctggatgactaacaaatctagccaaattgggagctccagcttcagtgagagagcatctcaaattattattattgttgttgttgttgttgttgttgttgttgttgttgttgtatgaaaagtgacttaagacctctggcttccacatgcacttacttgttcacacatacccatgtatgggcacctgtggacacacatacacacacaaaagcaaattctggagctctgtcccaagcctactgaacaggaatatccagggatgggtttcaactgtctgctcttccaggaagtttgagaaccatcagacagttgttctcagaatgacaggaggagcatgtgtgaagtgctcagagttgtgcctgaagcttcagtgttgctcagctgtgacaccacctgattcagcgctgccacaataagaatctcttctagtaatgctttcattgccctagtgccaggttctcatggtgatgttcttcccctgaaacaacacgggtcaggtgtgtatgcacctgactgtcacactacaaagattttcactgtctttgccatgaaccataatgagacacatggaatcgggggtgggggagtacaagtccttgcatgaataaggaaataattgatcgagtctattgtaatagagagatacccaagcctgaactggaaacactgcagaaaaaaaaaaaaaactgggtgagccatgctttcctaggccaagatcatgggacagatggttgtggaaggagtaaaggtcatagcagaaatttctgtgtagggggtctcgaaacttacttaaagcactgtgccaacagctggctgggagatggatcagtgagtatcagcacttactatccatcgcagtgaaatgagtttaattctcagaacccacacggtcaaaggaaaaactcagcttctgcaattgtcttctgacttccacacgcacaccatggcttgtgtgcatatgggtgcacacacgtgtgcatgcacatacacacttaaaatagtttttattaaaagagtttttttttttcaaaactttgggtcaaacattgcaagggaaagttgaggcagaaaatgcctgtagtaaaatacacaaggtgcaagtctgagacttacgtggaacagagaagtgccagtactgtgggaagttcccgcggagcctaggaagtgacctagttatgacagcctcaactaatagggagcacagagtagttcttcagttctcatcagagaaacagacactgaggctggcattatggtttggtagagtgcttgccgaggatatcctaccaccacataaaccaggcaggatggcacatacacacctatcatctcagcacttactggagaagcatgtgaagtcagaagacacaagaggccctttcaaggaaagaaaggagggagcgagaaagagagacaagagagagggactttttcttaggtcgcatgtggaagaatgaatataattgtcaaagatatgagatgtaaattcctgcaatcagaactttatcttctgcagcaaagtctttgcaaacgtggtggtaaagggaccttgggaggaagagattgtccctgactgattacctgttgcagtcccagacactgtcacacggtccatggaggacaaagagaaagataggacccagacagaagaagacagccttatcaccgagattagaacggtgttgctattagccaaagaagcagcacgggctgctgacatcccagcgaggacaattcagactcgtgacctccatatctgtgagaaaataaacccagttctggcccgctcagtgggtgagggaaacaaccgcacattgtttctttcattatccttttctgttagatccctggctggccttgagcttgctgtgcagcagaggatgacacggagagcctcattctgctccagctcctaagagatgagattccatgcgtgcaccattatgcgggttattcagcactcaggatcaaacccagggctcccagcatgctgggcaggcactctaccaactgaactaaatccccagtctggatagggtttataaacaataattcttgccaggcgtggcggcgcacgcctttaatcccagcactcgggaggcagtggcaggtggatttctgagttcggggccagcctggtctacaaagtgagctccaggacagccagagctataaagagaaaccctgtctcaaaacaccaaaaaataataataataattcttggctttgtgaattttaagattttttggaggggtggttggttactttggggatcattatataaagtgacagacatcatcatctcgaatatcactgcattcaacgtgccggttctacaacagcatatacacgtcagaaaaataggagttgggaaattcagccaactgaactttattaaagatggagctaaagcttagccacataaccaaaacatggctggtttgataattagcattcatcaagattattttaccaagaagtcaaaaaaataagagagggggaagaaaaagtgtttcgtgggttaatgcactagtctgttaattagaaatgtgctattagtaacggtggtgctctttttcctgtttgaaacattttatgggctggagagatggctcagcaggtaagagcactggctgttcttccaaaggacctgggttcaattcctagcacctacatggcagctcacaaatgtttgtaactcctattccaagggatccaacaccctcctactgacaaatatacaatcaaaacaccaatatacaaaaaataaaaataagttatttaaaaaacatttggttttagttattggtgtggatgatatttctaagtacattagcatggtatcagtagttagagacactctagtttagaataatagtggccttcactcctatttagtatctatctgtctcccatgtctcctacagtcaatattctttggctttagtttagatttgggaaccatagaagggcctgatgcttttctccagtgcaatcatacccacatacaaaaagacaagaggatgccttctttagagcacttctgcctggcctgctgccaggctgttgctcaaggcacaaagcttaaaatagaggcaggtttttccacccagtgcaatcttgggagccatggcccaaaggcagctgtaaaacccacgtgttaaaataacttagattgcttgtgatagactgagtaaacaaacatacaaaggaacaactaagcagccacagaatctgacccacagaagaaaagaaacaattgcctgggtgaatggctctgaattggcaggacttactcaatagctaatgacttcatttttcttcctctacttcctaccctggactaacctgagaacaccagagatggaagaccagagatattctccaaacccaagtccccaagtcaatcatatagatgttccatttctggtcactcctctctcaacttccaatcaatcagggcatatgcaaatggtttctcaccctcaccccaaagcatcagtttcttgtctttatggtgtcttcttgttatagcaagttctaagtgtgcttctccacaccattgcattgtgttgtgtccttattcccatccattaatgattattttgaaaattgtgattattgccatcaaaaagagtttaaaaattgttttcttttgttttttttgtttgtttgtttgttttttgtttgtttgagacaaattttctctgtagttttggctgtcctggagctcactctgtaaaccaggctggccttggactcacagagatccacctgcttctgcctcccaagtgctgggattaaaggtatacattaccatcacctggctgctaaagaaaacagatttttgatgtgaaaatataactcagtggtcttgtccaaaaccatgttctatcaacaacagaatttattccagctgagtttggtggtagatgcttgtaaggcctgaggttgaaacaaaaagatttttggcctgaggccaagcagggctacatctagtaagactgtctcaaaataaataaatggatagatagatagatagataattgcctgtgtttctagaaagtttgtctttttcactttgttctttttaaataagcacacaaaatgtatctatcttcttcacagtaagtccatttgcctgtgtgcctcttcctcacccgtgtgcagttgtttgcaggagccaggagagaacatcatatcctccaaggagttaaacgttactagcagtttgtaagcttcggtttgggtcctgggaactgatggtttcctctggaaaagcagggagggttctgaactactgagctcacctcatttttgtttaaaaaaaaaaaaaaactagaaaatagttatggaggagacaaggaatgcttattattttttccataataaatactcttttcattgttgtcttatgaaatgggtctcagtatatagccttggctggccctcactatgtagactgggctcaagaaatcagagatctgcttggcttgacctcgagagtgctagaatttaagcatctgccaccaggcccagtatgaatatgctttttaaaggttttttggggtttttttgtttgtttggttggttggttnnnnnnnnnnnnnnnnnnnnnnnnnnnnnnnnnnnnnnnnnnnnnnnnnnnnnnnnnnnnnnnnnnnnnnnnnnnnnnnnnnnnnnnnnnnnnnnnnnnnnnnnnnnnnnnnnnnnnnnnncactagggaggcagaaacagatttatttgagttccaggacagcccagtctacaaagggagttccaggtcagccagggaatcaaaaatcctgtctcaaaaaacaaccacaacaacaaaagcctcattttcggggaggtgtacatgtgccaacagcacatacaaaagacagagaacaacttttggctctcttctttcaccatatagatctctgagatagaacttaggcttgggttcaggcaactctttaacactaagcaatctcaccaagccctgaacgtgatcttttaaatcacttttaaaaaaatacttcttttagggccaggaggtagtggcgcactcctttaatcccagtacttgggaggcagaggctggcggatctctgtgagttttgaggacagcctcatctatagagcaagttccaggacagccaaggctacactgaaaaccctgtctcagaaaatattttaaatactattataaaagacattacaagtcaggcagtggtggcgcacgcctttaatcccagcacttgggaggcagagacaggcgggtttctgagttcgaggccagcctggtctacagagtgagttccaggacagccagggctacacagagaaaccctgtctcgaaaacaaaaacaacaacaaaaacaaaacaaaaaaaagacaatacaaatttttaaaaatcacatattgaaattaaccaaactcaaatattataaagcttctaaacagaatagccaataaaaaaaaatcttatatggctaaaaaaaaattacactttaccgaattattttctttcaatcttacctatacctgtatatatattttttctctatccaagtaatttcttcaagctacacaactacagccttctattaaatattactcttcttgagtgaggaagaggaaactaaagcggatagctcggagatagctttaatcccggctcttgagaggcaaaaccaggatgcctgtgattgcctggtctacattattaaaccctataacccctatctcaaacacatacttatatcttttccagcgaatttatcaaattccagaagtggcgcatgcctttaatcccaaaacttgggaggcagaggcaggcggttctgagttcgaggccagccttggtctccagagtgagttccaggacagccagggctacacagagaaaccccgtctcgaaaagacaaaaaaaaaaaaaaaaaaggaaaaagaaagaaaaaaattgaaagtaagaaaaacaattcataatgtaaagtaggaaaacagtctccatcgttctcaaccgctttttttcttttcttttctagccaccatcctacaaccccacccccacccccgcgtccccgcctgccacgaaaagaatttctaccagacttgagagaaatgctcctaaggaacaatccatgtataggtaaggcaggaagtgcggcgttagaagccacgtgctgatctaaattctatggacgcccgtccagccagaccctggagaggtgactctgtcctccgctctgtcttcttccacttacatcagcattgttgtgggttaaacagaaaccacgggttatgcaactctccaccctgcacattttaatctacaactttcatacaaaaggaaaggtacggctgaggtggaaattccacagcaggtcttttttttctacgcttttcttacagaaccaaggcaccacgctggcgtgaaccctccaaagtggatcagcctcgccccaaggcttgcaccacaggacaggttacgacccggcggcgtcacgcgcccggactcccgcaggctccgccccgaggcaggcatagccaatgacggggcgggggcgggccctgtcggggctgtagcctgagaggctttaaagcctgagcccggcgctgctcctccagattctcggacctcggcgacctccggggatccgagtttgcagacttcttgtgcgcagctagccgcctcaggtgagtgacccccgcgggtttaaaggcttcccgagcaagggcaggtaggggaatctagaatgtgggaaccatagcatctgcaacccggactggagacccccggatgggccaggatctcgaggatgtgtcctcggcctccccgaagtgataggcccttgttgtcgagcggggtcttcatcaggtcatgtgactccgggctgccgggacccgtagggacagcgggaccccctcaagctggtcacgggacccagggctccttatgccgccataacattcgcgggcggtggccgcgagcgcggagcggacgcccatccccctctcccccggacgggcccagcttggcccctaacccgaactgagatcgcataaggaggcatcgccttgaggcttcagttcgcctgatgtgcagctgtgcgttaaagtgtgtggtggcagcccaccctctgggtattcctgtatgcccacttggggtcactaatacttgtcaataaatgacctggacccagttgtcctcttaagattttgacgcatacaatatcggaagacttaagactaccgtggccctataataagagaaaggtggggagggggggggctgtcgagatggttcagcgggtaagagcactgaccgctctttcaaaggtcctgagtgcaaatctcagcaaccacatggtggctcacaaccacccataatgagatctgacaccctcttctagtgcgtcaaaaatcagctacagtgtacttatgtatgataataaatcctaataaataaaagagaaaagggtttatccctgttccaatgactactaggctgtttttgtttcagtagctagagtctagtaacctccaaagattaattcctgacttgtttttctccactcataatcacatttgttaacacgtgcaaggatgcttcaactcagaacggtttactgctgggctggtggctcatggatccctaaacttgagagatgggtcattgaaaaagtttaaagcctgaactacatgagaaactgtccttaaaagagaaagcttccgtgggattctcatttcctctttttccttccctaggtgtttgaaccatgaatcttttactccttttggctgtcctctgcttgggaacagccttagctactccaaaatttgatcaaacctttagtgcagagtggcaccagtggaagtccacgcacagaagactgtatggcacggtttgtagtgtttacattgtctagagagaatggtcttccttgcccttggaagtgttcggttggttggttgggttttgtttttgtttttctgagtcagtgcttctctgtgtgtccctggctgtcctggaacttgttctgtggaccaggctgtctgtgaactcagtgctgggatttaagtcatgtgccaccactgcccacctctttctccccccacaaaccccctctctaaccctcagaagtttatagccagagagtagtctctagaggccagctcttagcaggaatagcccaatcatacatccattgtgagcagagtagagcacatacatccctttgtgtgttttcgggaggagtggtgcctttcagagtgtgtagctcttcctgttccagtagatccatttggtcagatggattggtttttttatttaagatttatttagtgagatatatgtcactcgtgatatataccacacttatgcctgggtattgtgtacattctggagctaaagttagaaagtaccatatggccaggcagtggtggcacacttgggaagcaggggcaggcagatttctgagtttgaggccagcctgggctatacagaaaagaaaccctgtctcaaaaaaagtaacatatgtgagtgctgagaattaaacctgagtcttccacaaatggtcttaaacacagccatctctccagctccatctctgcctctggaattaaaagcctgtgccaacatctggctccccctgtctattaacaaaaaatgaaaactgccaattctgtgcttgctctagaatgaggaagagtggaggagagcgatatgggagaagaacatgagaatgatccagctacacaacggggaatacagcaacgggcagcacggcttttccatggagatgaacgcctttggtgacatggtcagtggggacatgatgcgaactcttgaactcttgagccctctcctccattttctttctacaaagtctcaccttttttactttttttttctcccttcccggaagaccaatgaggaattcaggcaggtggtgaatggctatcgccaccagaagcacaagaaggggaggctttttcaggaaccgctgatgcttaagatccccaagtctgtggactggagagaaaagggttgtgtgactcctgtgaagaaccaggtatgagggcttgagtttgatccccagggtccacacttggaagagactcgaggtgggggtgggaggggagtgcagcatcactaaagataatgatttgattaccctcccccagcagccatcaactgagaggagccaggccccacgagactctgtcctctgtgctttagccttgaccacagtgttttgtcttgtctgctcttttggagtgtgaatgagacaggatctcacaatactagcccagcccagcccagcctggcctcaaacccaggatcctcttgccttaatctctctagtggattgcgggcatacattgccctacccagattcctgtcttactgttttgttttttttttttttttttttggttttttcgagacaggatttctctgtatagccctggctgtcctggaactcactttgtagaccaggctggcctcgaactcagaaatccgcctgcctctgcctcccgagtgctgggattaaaggcatgtgccaccacgcccggcttggtttttttttaagtatgcatatatcagggggggggggagatgtggcacacacttttaaccccatcacttgggaggcagaggcaggaggatctgagttcaaggctatactgtctacagggcgatttctaggccatccagggctacatagagaccttgtttcaaacaaacaaaaagtgtgcatgtataaaggctgttgtgctgtttctcttactagcctttttctctcttcagggccagtgcgggtcttgttgggcgtttagcgcatcgggttgcctagaaggacagatgttccttaagaccggcaaactgatctcactgagtgaacagaaccttgtggactgttctcacgctcaaggcaatcagggctgtaacggaggcctgatggattttgctttccagtacattaaggaaaatggaggtctggactcggaggagtcttacccctatgaagcaaaggtaattggtttgttttatcctggctttgttttcagaaaaggaagcattaccagatgtggttttcagagttcatactttagtgggtaactcacagcattctagttcgagggatggtttctgagtattgacctcacaaggcgtgagctgcaagtcactgttttgtttctagagctcatgttctaagaggtaaacagttgtgatcaagtctcccccttaactttcaaaggacggatcttgtaaatacagagccgagttcgctgtggctaatgacacagggttcgtggatatccctcagcaagagaaagccctcatgaaggctgtggcgactgtggggcctatttctgttgctatggacgcaagccatccgtctctccagttctatagttcaggtaatggtcagaattagcacctccctgactttggcgatttatgttgggggaggggtgtgtgcagatgcccttgggagtcctgaagcatcagaccccctggtgctggaccgaggtagttgtatgccatctgtctagtatgggttctggaaccaaactcaggttccctgtaagagcagggaatgcacttaactgctgagaccgctctctccagcaccctctgcttttcagtgttttaatgcattgggggtggtgggcgtggttagagaaaaacttgcaggagtcatttcttctcggtgtgtgtggcttccagaatcagaccctgagccttgttaacaagttcctttccctgttgagccatctcaccatctgaaatatttcttttactattgtgacttactctatagatagaacatagcttacataaatcttctccaacatatggatctttttccaagagattttttttttattgctataattatggccttaaagaacctgtggttcagctgtaaggctgaagggggagggagggaaagagggagagcttttctgtctataaactttttctttagatttaagagtagcaaggattatggttattaatctggctagaaaatggatcctaccattataggctttaaaacaatagaatattttttaattgacgggagtggggatgtagctcaggtagtttttccccagcattctttaaaccctggttcagtcttggcactacataaaccaggcatggtattcattcctgtaatcccaacacttaggaggcagagacaggagggtcaggagtttaccccatccttggctacatggcaggttgggagaaaactccatcttaaatattgtgataggatttcactgtcaccttgcctagcctggaactctgtgtacggcaggctggccttgaactcaaagagagctgtctcctcctgagttctgagaatgagtcatgttgccaccacacccagcatagccactactggtttttgactattatcttcacagcttgggatctgtgaagctacagaattttgagatatagtcctgttgtgggggatagaatgggcttctgtcctgtggtgacaggaacctcttattcagtgttcatttttctctgccaggcatctactatgaacccaactgtagcagcaagaacctcgaccatggggttctgttggtgggctatggctatgaaggaacagattcaaataagaataaatattggcttgtcaagaacaggtaagagactctaaatgttatactttaattgaaaagagtattcattggggggaatcaatatgtagatgcaagtccacagatgtttaagttttaaaatcctggaagctgttctcagtcagcgtgaaagccctgcatttaagattctaaagtaagcttgttggggagacctacatgtatatgtaatggtgaatttccaaacttggctccaaaatttcagtaaggctgtatgatttcagcatgctctttttttttcctctagtttttcaacaagaaataaccagcagaaagtacagcttgtgtgcctccctgcattatctgcattttgctgtcatatctcagaaccttttaaagcctgtcagaattaattttcacaactatctttcattgagatgtaacgggaagtggaaacatactcttctattaagctccctagcttgcctcattttcctcttaaaagagggagctaagtctgtagcatagttggtaaagtgcttgcctacaatgcacaaaactctgggttcaattcccaggaccgcatacaacctggcatggttatcccaacactggccttagtgtcatgcttttagaaaattggtggcattaaccttggttacacacgaccctgtctcaaaataagtgaggggcttgggcaatgactcggtggataaggtacttgccactcagtcatgaggacctatgtatgcttggattcctaccactcacatatgtgctgcattacacaactgtaaccccagttctgggcactagggggctgtgagctccaggttcagtgagccacccctatatcaaaaaaaataagagcttgatagaggaaggtagcagtgtctgcctcctgcttccacgcagttgaatgagttgaagacccacaggaatgagtgcctctatatattctatgtgtagatcttagaaccctcagaggtaagtgcactcctattttttaagtataaactattaattctctcatatctccttggatctctttcagctggggaagtgaatggggtatggaaggctacatcaaaatagccaaagaccgggacaaccactgtggacttgccaccgcggccagctatcctgtcgtgaattgatgggtagcggtaatgaggacttatggacactatgtccaaaggaattcagcttaaaactgaccaaacccttattgagtcaaaccatggtacttgaatcattgaggatccaagtcatgatttgaattctgttgccatttttacatgggttaaatgttaccactacttaaaactcctgttataaacagctttataatattgaaaacttagtgcttaattctgagtctggaatatttgttttatataaaggttgtataaaactttctttacctcttaaaaataaattttagctcagtgtgtgtgtatgtgggacttcagtgtgtaatgtgttgaccaatgtttgggactaaatactgattcagggtgtcatggtacagcaagaaaaaggtggcaggtgctctggagccttcggatttcacctcagtgtcccatcagattaggcatgtgtaagtgaatctagcttggaataattgttttctttatgtgtgtgtacatggtaaatgtgtggagttcagagaacaactcagttccacagtgttggtcctacaggtcctagccatcaaaataaggttgtcaggctgggccacaggtgccttttactactgagctatcttgccagccccactagtttttaagtgacataattacgtatgtttatactataatgtgtttttgatatgatgtgtatactacaaaatgatctgatagggctaataagcttacctcaaatatttaattactttgttgaacttttctagctgtttttaaaatacacagtatattattgttggaaactgtcctgttatgtagaccaggctggccttaagcccatgatctcctttcctcagccttctaagggctaagataaacatgtaatgttatacccagtctcaagtctcatatctggcaaaacttgacagtccagaagaacatgagtaaatcgctcagcacaggagtatcaacttttctaattctgtgacctttcaatatagttcctcctgtgtgactcaaaccataaaattatttttgttactactttataactaatattgctacagttataaatcataatgtagatttttttttttttttttttggaaatagaggtttgtcaaaggagtcacagcgctgagaaccactgttctagaaacttgcaggttttacatattaggctgactggaagaaggttgaagtgctagtttcagtagtgcctgtccacattgccagtgaagaccacaatcctgctatgtagttctagaaagggccatacacaggtgggctgtaggctgacattattcccaattggcctgagaaaccccatgctacccaggaatgacaaaaaaataaatgaataaatacattaagcagttgtgattaacttcccaggtgatgacaatactggagatgggcatgcccctgaggtagaatgatccaggcatgggcgtagccagccttgaaaatgtcaatgacttagcagggttcttttcaaaactgaatttttacaagggagttcatagatggaccttgatggaaactgactaccagaaaagactcgatctctctgccatgttggggtcagcaaacaaataccacaagataaatgcacttcagcatttcaattataccatttgtatgccctctgccttgctactttcacaccagattgtctaaaatgcctgacggatgccgcttcatgaaggaaggaaggattcgtgttaggtcatagtggtcagaggggtacaggtcatgatggtgatggggcacgggaggaccagaacagtttgtttcactggtcaggaaggaaggtcaggaagcaaggtgaaggctgatgctcagctggcttttttgtttccaaatccttttattatctgagccctgagtatatgctatggtgccatccacaatcagggtagatcttcttatcttagtcttctctgaaaatgtcccactgaacacacagcatctcttagattatttttattttgggtgttgaagatggagtatgggtatgtgtttgcatagcacgtgtgtgtgtacttaaaaggtcaaagttcagtggctttaatcaccttcttcgtgggtgctaggagttgaacttgggtcctctacaagggcaggaagtactcttagaccatgaagtcatctctccagccccctgttgcatgccatgtggctgaaattgacatctgatgacatgaaggaacagatttacaaattggccaacaaaggcctgactccctcccagataggtgtgatcctgaggggctcatggtgtggcacaggtcagttttatgactagaaataaaaccttgagaatccttaaggccttgcctctgatgcccctgaggatctttcccatttgataaaaaaaagcagttgcagtccgaaagctccttgagagaaacagaataaggatgctcaattccacctgattctgatagcagaattcactggttggctggatactataagactaagcgggtggtacccacccaattgaaaatatgagttgtccacagtctcttttgtgtacacaagcaacaaaatcactttgagttaaaaaaaaaattcaggggactggtgggggctggtaggatgtgctgtacttcccagagcaaaggtggttatcatgaagctaaatgaaaacagccctgaccttatgttttgtgacagggtctagcactgaacttggagcttattactttggctagtcagactggccagtgaacatcagggctagagtacagacatgtgctgccgtttggcatttatgtcagttctagaggatccaaacttgggtcctcctgcatctctcccacttctaggtgatgtcaaacccttctgtcttagttagggttttactgctgtgaagagacatcatgacaatggcaactcttatgaagaaaaacacttagttggggctggcttacagttcagaggttcagtcccctatcatggtgggaagcactgcagcatgtaggcagacatggtgctggagaaaaagctgagagttctacattttaatcaacaggcattaggaagagaactggtgtgagcttttgagacctcaaagcccacctcctagtgatacttcctccaacaaagccacacctactccaacaaggccacatctcccaacaatactagtgccgatggggccatttttattcaaactaccacagtagaaactccttggccctgataggcttatagctatcatgcatttgatagttaaatgcattgtccaacttcaaaagcccttatagtccatcatagtctcaacattgtttaaaagtttgaagttcagagtctctttgagactcatgcaatctcttaactgtaaacccctggaaaatcaaagtaaaaaataaaataacatactttcaacatataatggcatgagatatatgttgctattacaaaaggaagaaaaggaagactaaagaggaaatactggattttccaaggcccagagcgcgccttcagttcagctgactgggcaaacagcactatcaaaagaaaccagtaagtatggttctttctatgacacctggttgtgttgggattccattttgaggatctaatgagacacatgaactcctgtccatagcacaagggaaacatctcacagcccacttggttcttggccccctgtgtattgttttgtgttttgtttgtctcctgtccagagcactagcaagaagttacactatttgtgtggttcttgggtactgagagccaagacagaaattacagttacaagaagatttttgagctgagccaaggaagcaaaagaatgaaggagcaggtgcaactgccagtgggcattacttgctaatgtttctctcagctctctcctgcattgtcctctgtctatgtccagtactatctctgaagctctggctgccacctgctcccatatggcagagcttggacaaggtagccaccctccacagcatgccacctttgctggctctgtctactcactatcacccatgccaaaatccaccacattcgctgcttctgctgcttgcattgccctgatcctgccccggccgctggattcagtttttagatacagataatattgaaatattgtttttttctgttatgatttattaaaaagctggctctgaaattgggtatggctccccacttctagactcaaacatgcttgtttaaaaattttctgtcctatgtcagtagagctacctgaatgaaaaaaaggcaaagcaaagtggctaaaacaaaatcagcattggtttcacttaattgcctaaaagttttgctaagctataagctataatcttaagatttgtaagactattatgtgaactttctgtacctcaatgtttataagtttattggagagatagctcagaggttaagagaactgactgttcttccagaggttctgagttcaattcccagcaaccacatggtgtggcccacaaccagctataatcagatctggtgctcttttctggcctgctgtatgcaaaataaataaatctaatgtttgtgtatgtgtgtgtgtgtgtacatagatatagatagatatggcttagagcttaagagcactgactgctcttccagatggtcctgagttcaattcccagcagccacatggtaaacatatataatggtatctgatgtcctcttctggtgtgtctgaaaacagcaactgtgcacacacatacattaaataaatatatctaaaagctttttttaaaatctataatatcattgggtggtagtggcacacacctttaatcccaacccttgggaagtagaagcaggcagatctctgagtttaagaccagcctggtctacagaatgagttttagaacaacaagggtgacacagagaaaccctgtctcaaaacaagacaaaacaaaaattgtgaaatctgtaacaaaagttgatttaaaacttacaacacagggttgatagctaagatttaaatataggcaaccttaccattcatgctgtaaaactcagcacatagcaccaccagacaaaatgaaaacaaagacctaatccatcaaagcccatagttctgggaaagtctccagatgtactaacccagcttttttacttctgcagttctgtttctggctaactgttcttgttaactgaagtatgccaacccatggcattgggtttttttgtgcttaaaaacctactctgagaaaggcttagggctaggctggaatccagaacacccagtggagtcatctgccaactaataaaggcctttggaaaaaggaaaaagctaaagagttagggccacagctatgagcaccaaacactaacactagaaactaggatattgctatcgtatgatgcagcctggcaaagtgtccatagaatgtctctcttcacctaaggtctagtcatgctaacagagcctgatgtaagaatgtctgtctagcttctttgtctactttgttaagcttgagctattttgataaactgagtcattcaagaaactctcctattttgtcatggagcactgtgaaagggacagaaaaataaaatcaccagcctctctagggactgtattcatgacttaaagttttattttattactaaaagagtgtcaatccaaaaaaaattggaattttttaaagggagaaacttaatagggataaaaagcaaatcctaactttataaaactatgtgatctaaactgttaaacattactaagacatgcaagttaatagtcaccttatacataatcaaattctttaatatgttcaggattatacttataatcatgccaagaacaaatatttacaaaagcaagttttatttggccatatttttttccatagtcaagcctaaagcaaaaaaaaacctaaaaagtttaaagtttatttaaaatcaggtatacttaatagatgaccctcgaaacttttcagagatctgcagaatccagcatttaaagtcgttagtggggaggtgagagcagaagggacggggatgtgagagacaaggtggccacattgtttccaggataggaagtccgcacagagtcacgtgagcaaggcaaggctatgagaagaccgagagggattcagcagtgatcctgaaatgcagccgcttggtttccagaagtaaagcaacttgctttttgaaacttgcctacttaacagattcagagactgcctgtgagcagtaactgggatgctcagcagtcatgagatccactcaatcatgtgacctggtcccctcggaaacctttaagaaaggacacaaccctggcacacagctcaagctcccagagccccctttatactgttgtctgcagtgtaagtattttagataagcctctatctaaaagggcagctggcctcaatatccctcttgaaccccaaagccaaaacctctcctagagaagctgtgaaatccgcaccaatctggataataaataatgaatggaggcaagtgggtttgtttttttgtttgttttttttaacaattttttattagatattttcttcatttgcatttcaaatgctatcccgaaagttccctataccctccccctgccatcctccccaacctacccactcctgcttcctgtccctggtgttaccctgtactggggcatataatcttcgcaagagcaagagcatctcctcccaatgatggctgactaggccatcctctgctacatatacagctagggacatgagctctgggggtactggttagttcatattgctgttcctcctatagggttgcagaacccttcagctccttgggtactttctctagctcctccacttgtgattgtgatccatcctatagatgactgtgagcatccacttctgtatttgccaggcactggcatagcctcacaagagacagctatattagggtcatgtcagcaaaatcttgctggcatatgcaatagtgtctacgtttggtggttgattatgggatggatcaccaggtggggcagtctctgcatggtccttccttctgtctcagcttcacactttgtctctgtaactccctccatgggtattttgttccctattctaaggagtgacgaagtatccacactttggtatttgttcttcttgagtttcatgtgttttgtaaattgtatcttgggtattctaagtttctgggttaatatctacttatcagtgagtacacatcgtgtgtgttcttttgtgattgggttacctcactcaggatgatatcctccagatccatccatttgcctaagaatttcataaattcattgtttttaatagataagtagtacgccattgtgtaaatgtactgcattttctgtacccattcttctgttgagggaaatctagattctttccagcttctggctattataaataaggctgatatgaacatagtggagcatgtgtacttcttaccagttggaacatcttctggatatatgacaaggagaagtattgctggatcctccggtagtactatatccaattttctgaggaaccaccagactgatttccacagtggttgtacaagctcgcaatcccaccagcaatggaagagtgttcctctttctccacatcctcaccagcatctgctgtcacctgaatttttgattttagccattctgactggtgtgaggtggaatctcagggttgttttgatttgcatttacctgatgattaaggatggtgaacattttttcaggtgcttctcagccattctatattcctcagttgagaattctttgtttagctctgtgccccattttttaatggggtgatttgattttctgcagtccagcttcttgagttctttgtatatattggatattagacccctatcggatttaggattggtaaaaatcctttcccaatctgttggtggcctttttgtcttattgacagtgtcttttgccttacagaagctttgcagttttatgaggtcccatttgttgattctcgatcttacagcacaagccattggtgttctgttcaggaatttttcccctgtgcccataactttgaggcttttccctactttctcctctataagtttcagtgtctctggttttatgtggagttccttgatccatttagacttgagcttagtacaaggagataagaatggatcaattcgaattcttctacacggtagcagggggtggggggtggggagagagcaagtgtttaatggataaaacctcacacaatagacaggaatgcccgctcctagtggcaaccctagggcctccaaagacaatggagcacagactaatccacctggattatgatcatgataactgctggacaaagagctgccctgtgcctttcctgcctctggagcccaaactgcggacactgttgggttgaatgctctactctacctcatcaaggtgggtcagtttcgccaagtttttccgccacaggaaaatgtctcagaccttctgggtctgacgggtgaagactactgctgtcctgtgcagcagctgaagatagaatgctgtcctatatggcagctggttacaccttacaggttatacttcctgctataatgccttcttctcggatctctgatgctgttggcaactaactgtagctttatcagtttaacatcagctgccccgtcaatgaattttgtataagaaaaccggacctcaatttttctagataggtctcctgctgagggagacaaactcataaaaggaagtttcaatgtaacttttttttttactatccctttattgagaaaaacttgcttcaccatggatgactgttctcaataatcagccacttatgttttatgataaatgattaattatttttaattttttaaattattttatttacatgagtacactgttgctgtcttcagacacactagaagagggcatcggatcccattacagatggttgtgagccaccatgtggttgctgggaattgaagtcaggacctctggaagagcagtcagtgttcttaaccactgagccatctctccagcacacaaaaatgtttcttatcatgctcaaaacatctctgttcaatctatccagccttctggacaaagaaaaaatatattaatttttttaattcaaaatcatttttgggtccctaagcttttactgtgactcaaaggccttagtctactccagaagtttactcatctcttctataacttaaaaagttcacatgagcttcaggtcctttatgatccttaaccttaacttctgtgccactctctgtcttggcagatttcctctcagctgacagacaccatccagaaattgacggcagactacaaactactccaaagttgacctacacacaccagctctgagtggtcctaaaaaccagaaaactctgaacttcatgaaagctgatgtgaaccagtctagctgatgtgattgctccctgtctctccagctgggtcagccaaccagatgtttctgatgcatgctgcagtgcctgagtctgaccccagcctttgactagcattccagcctcctgacacctgactgtgacattctaatttcagttgagaagcagttacagaagacactatgccaccccttatcctcaacaagaaactggaatgttagatctgaaggaagctccctggcaaagaggacaaaatgagtatctatagtgcctatgggcacactaggacttctgcagccctccagagacctcattatcaaaaatgtacctgctaaaaccaaatagatcaaggcctatcaacaggtagattcattagctgaagtaggtctaccatatgatagggcgctggacctgcatgaggaggatattgtgcagctttaaaagaaaattgttttcttgtgagatggttcagtgaataagagcaccgactgcttttccaaaggtcctgagttcaaatcccagcaaccacatggtggctcacaaccatccgtaatgagatctgacgccctcttgtctgtctgaagacagctacagtgtacttattatataataaaataaacaaatatttacaaaataattcttaaaaaaacaaaacaacaacaaaaaaggggtacaaatggttcttgaggtattatgacacctgtggttgtatttgacctccatatacatgaacacacaaacacacacatatagtcacacacatatatatacatagacagacatagacacacattcacacttacacacagaaacacacacatacacacacacacacacaaaagaaaattgttgtttctatgcaaatcacttggaaatcattagagataatttggctgtacttcagaaaatataaaagtctcagaagagaaaagacccaa

SEQ ID NO: 420 - DNA, 1374 bp, Mus musculus
cggcgacctccggggatccgagtttgcagacttcttgtgcgcagctagccgcctcaggtgtttgaaccatgaatcttttactccttttggctgtcctctgcttgggaacagccttagctactccaaaatttgatcaaacctttagtgcagagtggcaccagtggaagtccacgcacagaagactgtatggcacgaatgaggaagagtggaggagagcgatatgggagaagaacatgagaatgatccagctacacaacggggaatacagcaacgggcagcacggcttttccatggagatgaacgcctttggtgacatgaccaatgaggaattcaggcaggtggtgaatggctatcgccaccagaagcacaagaaggggaggctttttcaggaaccgctgatgcttaagatccccaagtctgtggactggagagaaaagggttgtgtgactcctgtgaagaaccagggccagtgcgggtcttgttgggcgtttagcgcatcgggttgcctagaaggacagatgttccttaagaccggcaaactgatctcactgagtgaacagaaccttgtggactgttctcacgctcaaggcaatcagggctgtaacggaggcctgatggattttgctttccagtacattaaggaaaatggaggtctggactcggaggagtcttacccctatgaagcaaaggacggatcttgtaaatacagagccgagttcgctgtggctaatgacacagggttcgtggatatccctcagcaagagaaagccctcatgaaggctgtggcgactgtggggcctatttctgttgctatggacgcaagccatccgtctctccagttctatagttcaggcatctactatgaacccaactgtagcagcaagaacctcgaccatggggttctgttggtgggctatggctatgaaggaacagattcaaataagaataaatattggcttgtcaagaacagctggggaagtgaatggggtatggaaggctacatcaaaatagccaaagaccgggacaaccactgtggacttgccaccgcggccagctatcctgtcgtgaattgatgggtagcggtaatgaggacttatggacactatgtccaaaggaattcagcttaaaactgaccaaacccttattgagtcaaaccatggtacttgaatcattgaggatccaagtcatgatttgaattctgttgccatttttacatgggttaaatgttaccactacttaaaactcctgttataaacagctttataatattgaaaacttagtgcttaattctgagtctggaatatttgttttatataaaggttgtataaaactttctttacctcttaaaaataaattttagctcagtgtgtgtgt

SEQ ID NO: 421 - protein, 331 aa, Mus musculus
TMNLLLLLAVLCLGTATPKFDQTFSAEWHQWKSTRLYGTNEEEWRRAIWEKNMRMIQLHNGEYSNGQHGFSMEMNAFGDMTNEEFRQVVNGYRHQKHKKGRLFQEPLMLKIPKSVDWREKGCVTPVKNQGQCGSCWAFSASGCLEGQMFLKTGKLISLSEQNLVDCSHAQGNQGCNGGLMDFAFQYIKENGGLDSEESYPYEAKDGSCKYRAEFAVANDTGFVDIPQQEKALMKAVATVGPISVAMDASHPSLQFYSSGIYYEPNCSSKNLDHGVLLVGYGYEGTDSNKNKYWLVKNSWGSEWGMEGYIKIAKDRDNHCGLATAASYPVVN

SEQ ID NO: 422 - DNA, 25667 bp, Homo sapiens
cagcaaggaagggcggggcacggtggctcacgcctgtaatcccattactttgggaggtcgaggcgggtagatcacttgaggccaggagttcaagaccagcctggccaacatggcgaaaccttgtctctactaaaaatacaaatattagccaggcatggtggcacgctcctgtaatcccagctaccggggaggctgaggcacgagaatcacttgaacccgggaggcagaggctggagtgagccgagattgtgccactgcactccagcctgggcaacagagcaagacagagcaaaaaaaaaaaaaaaaaaaaaaaaaaaaagcagcaaggaaggcaaggaaggaaggaaacaaaagagagagagaaagtgggaaggttacagtcctagaataattaacattcctttcaatggaataacttaatcttaggggaaaaaaattacccagtgctcttcatttttctccatttccctggaattgtgaaaagttcaccatgggcaacatgactctaaaggtttattgctgtgttttgtttgctcaggagcctttgctctttgctatgcatagaagttcaggaaaagccctcaggccccgtctcatgacatatttcatgacaatgtttattccatcccctgaacactgaaacttacccaaggtccctgcgggagggccacactttaggaagcacagtatttctggttgctcttaacataggggcataggatccaacagtcaggaggaaatgggatgtctcgaagttcagccagagcatcacccgccatgaaatatgagggtcagtcggtctccgctcaaatggtcccagagatggaggattggaaaagcagattttaattcctacgtgagctgacacttaccacctgtatttctcatcccttgttctgtcttccaggctataaagacgccttgaatcctcctccacgatacccgccccactatttgttggcacagctatgatgctgcttatggattgttttcactcctaaagacagtggcgcaaggcaaggtgacctggagcgaggccatcctgagtgcccacccagcttcccaggagcctgttggaatttggaaggacatttgcctctgtttataaagactggctttttgctgaaagccagggtctcaaaaattttgttttattaatagaagctaaaccccaaacatttggctctttttcattccatttcccctttcacaatcttaactattcccaagacaatggatacctctgcctgtatcaagggcagattgtcaataagaaagtcaacaggaaataaacattattatttcaaaaatactatccttatccattttaaattaaggggctaggagaaaaggatatgaggatttactgttgaatgggttaggagtttcagtttgggatgaagagaaagttctggagatggatggcggtgatggtggcacaacaatgcgatgaacttcatgccgctctcaaaaatagtgaaaatggtcaagtttatgttacgtctattttactataataaaaaaaaaattttggttttcagtgggcaggtgaataaggagaccctcttgccacctcttggcaagagcaagaaaggagattggaatatcagcagtgtgagctcttccaagggcagtggtgacagcctgggagactggtcagcgtagcaagggcaggtgcaggtccctggtcctagaatgtgagtgtggcaagccagccttaacttctgcctgcctaggaggcatcctaggaggtgagccttagtgagcaggggtgagctctgtttgtcctgtatgcagcagcagattatctgtctgctcatgcagactatgtagattgctcagagttgctagagggagggcctgtggggcctgaacttcagcctgcactcagctcatcaagccatgggctctctcagggccatgtctgtccaacccttgcaaagcctctggatgggtgatcctgggcactaaaccttgaccattctaaaatactatttggcacagcctggatgaggtctgtacatagagtgtgtagatccctcaagttccctgaacactccgccatgcaagtgatgcagagaagtcagctaggaggaagacaaggtgtggggaagaacagcaccagccaggaagcatcatcccaaatctgagttcatgaggctgatgaagagaatgtccacaccattaaagagattctagcattccttttctatgtttgtcaacctttgtccttgttagtgcctgaataaaactgaacatgagaatgtggccatgggaattatagtataggcctaaggagaggttgtaaacttcaggcttcatcaacacttgaccatttcctcccattttctgggaactaattagcccctttctgtttcacccatgcagtaccccggctattgggcttcattactccagtatgctttccagaactatcatattcctttaatcttcttgaaataaatttggcttggatcgcactcccctaaatctagtctctttcattgtccagggagccacccctcctcccatggttgtgcaagtgtctcggggtcttctgagcagtctgcgtttgctgcctttggtcatcccaacctgtctgacctgccttctcaccctccatgcaagcctgagtgtgggaatattccagagcccacatgctctaagctcagccatcccaggtatgagtgcaaggaggctacagccctcagcctcttgcagaaaacccctgttgctccccaagtttgggaggtgactcttctctcctctttctccaactccaccaagctatggacaattaattccttgatgacactgacctctaggttcataagagaggttttcagactggctccaggaattgagaaaatcttttcctctctcttcagccttggcttttggatcattgtgaactcagaaatctatcgggaaagtctaattctgaacactgattcttttttctctttacattcctattgttaaaattctgattatctgtgagaaaacaatatccctgtctgtataggggtgatgtccttgaaaagggaacacaaaaaaggaaaaaaaatcatatttgcacaataaagtatcaccccccttgtgttatatacaccacaggtctgcaggcatgagactgaggtcagactgtgagtattctcccctccatcccaccctccacctgctctgtgacctgcgtcagaaccccagggacaagataagatttctccaaaactcaatggagagtcacagaaaacaggaagtgcttttgaggaagttttgaatggaagcaggaggtgagagttgggaactgtatgctgggaaatgacctctcggctgggactcttgggagggtgtgatgtcttggttgctgctcctgtgaactgtggagaaggtcaggtttagcgtaaactgtcccctgtggtcctcctgcaattctcctaatgactgtcagccctcagtaccagggtcccatacacccctgcagcactgcatccccatttgttggagttccacctcctgagaccaaatcctggcttcctcactgactagccctgtgcccttgggcaagctccgtaacctctctaacctcactgtactcatctgtaaaatggggatgagggttattctgataatcaaatgccataatacacaacaaggcgaatgtggtgcttggcacgtaagtcagcagtgtgttcccagttgaccactggtttcaggaggccaacaaggacagtgggattttaggtgagtctttgggtattttccccccatttgtcttgcttatctgtattatctatgtttttcataatgatcacttgttttatttgtttttcacctaaaaaattattgaaaaataacagatgaaactgctggaaggataaaaggctaaggtcctctgagaatccttgaaaacggccaccagcaagttattcattagaaatttcaaagggaaatttccaaaccaagccacctcaatgacaggcttagtgctctaggaacaaggtggaggggatgtgggccattattgtttataagccagagagatggtgggttacttgctctatctggtaattaaacattcacatattctacattttttaaataaatcaatgcctttttcatcaaattacgaacaggccaggacactgaagtttgaaggcaaatgttcattcctgtctgctccacatctggctttccaggacaacacaatggtcagtccactaaaagtcaaggaagtcctgatttttctggctagaaatcaagaaaagtcattttttgatgtgcttattatgtttctgagaatatgcaagagaagaaggagaaaaacacaagccttccagatgggccactgccggttaagcttgcattttagggagaggtgatgcccacctttaacctctttcgaggcatcacacacttttgggctcaacaaccaaaaaacaacaggggagaaagcaatgatgatgggagctgttttggctgagaaactccaagggcccaggagctccttcaccctacatcaaaccatggaaaagagctcaccagagatagtgggttggcatagctccaggtcatgcttatggccctatatccctaatccatctctctctgctctgtcctaagacttcagttgactggccttccccaggtctcaagggcttgtcacattcttcattacttttctgtgtttttcgacaattctatctaacatcttcagtaatatgtgttaaggtatggctctcataagagtgtttcaatgattcaggggcactctaaccttccaaaacatttgtaagaagaatagtagctgtgtgcttggaactgccttctaagcactacctaacctatctgcttcaatcttctcaatacccacatttttaattcccctttacaagtgaggaagtgcaggctctatacatttaagtgtctcacccaaagtgacatggttgtcaaaaactgaactatgacttgaactccaaattatttaattccaaaataagcggacttaattactctttacttgtgtacttgattattgcctgtgtctgcctgtcagccatcatgctcaccactcaccagacaagtggtacatcctaaataagtattttcagaatgaacgaatactatcttccctcgaggcccagagattggaggcatcatggtggaacagcagcgggtcagtgctttgtttcacagttcactgaaacatcacggccagtggccttgtggcccctaaggagtccagacaactatggagtccttggtacaaaagcaggaattccttgtttacttgcagaaacacttcatgttgagacttttgtagtcttcttccttccttctttccttttttttcttttactgtttctttccttccttccttccttcttttccctcctttcttccttccttcctgcctgcctgcctgcctgcaaagctagatcaaccagcttaagttgttacaaaactagaaaatctgaattaagtagaaatcatgaattgaacatgtttcagagggaaggaactaaatctagcctcaaatgagaagcttatttcccaaaatatgaaagcctttaaaaattatggctagcattgtttttgtttttctatcaggacaccaaaatcaagtctacgggtgtctgattttcagacttcaaagactttggggcatgcctcagcacccagcctcatccctcctcttctcctcttggattcagtcccttctcctgagttgggaggttgtctggacagtgtctttgctatctgcgttgctcctctccccaccacccatgtgcatttgcccctctgtccctcagtgcatttcccccaggatgctctggccaaactgaccaggtgtctccatctctgccccttttctttcccctgaatgctgtccagtgttttctggaacctgtgaacttcccgtgaatgataaataccaagagcttctcaaaatgagaccccatgttctaaacagaacctgcagtcaggattccagggaaggtcagcaggttcccacccccagaagcactttgccgtgtaagacattgtctatggaacatcaatgtcacttagggccttggaaagacattcaggaagggagttactacgcctgaatttctggagatgtgtttagtagggaagaattcactataatccatgaatgattgattgatttctagaaaggctcacgcatgtttctttttgccactcaggactggacctctgaatcagtgcggaatatgaatgagagcggtcaggggagaactggaggatgctggtggaggctggaaggcttgcagtcacctgcctgtgcttatctaagtgatgagaatgtaggagcagcaggacctggcccatcactaccctatgtttgttacaggagagaggaccgtcctcccacaggtcagagctattgttaatcaaggtgacagtgcaagatgcattcccactcctgacttctcgctgtaaataggtttcctgagtggtgttggtttattttcaatttggaagccagttcaatcaaatgtttcactagattcaagtttgatgaaaatactagcaaatcccccaactaacgagtcactataagtaactcaaggcatcagtcctgctccccacataagggagtactggtcctgaggaaatgggaccacatatatagggaacaaaagtgatacaatgggccatgagggtgtgatgagtatcccagtgattgctttgggtaaattttgctggccacatcggtttcagttcctctacatagacaaggaaatgctcctcatgaccgacaacagctcctcctgcaccgaggctgtctagtcattagaatggtctctagaagacaatatcatcagcaatcactgctagcaaggagctggcttctgtggtactatgttgttgctaatagtttttgttagagcaactgcattgtgggagacctgatccagggaagggagaaaccaaagcctgtgctcccaaggaggttatggaaaatgaagaaaaacaccagcccctctgcaggaggaagctggaaatggttggaaggaccacccatggctagagccccagcacttgggtcatgactcaccctgggtaggtcaagtacaggccccacttcttcaggccttggttgtggatcagaccctggattcttcccctccgggtacagcccagttgccatgatgctccttgagtcaatgagctctttggtctgatcttctgctcaagcaaagaaagggtccggcttcagttctcagaggctgataagtaccaaggtggcagaatatgggagtatcctgcaggtgctcccagcatctgccctggctcaggtgccagaggcttgcgattttctagctcttgacctcacaccctcgattgtttgttttccaattccttcctgaataacggggtgaacatgccacccctcctggtggcgaatggggttcctcagaactgggaggccacagtccagattctgaggctcttcactaagcaagtgctggagagcaaagccactcactcacaactctctctctttctctttcaaatttggggaaggggaggccatctgagcagtttctctcacactccccagtaaggaactcatgaaggaccaagtgagctctaagcccccggtagaaacattcagctgttccaatgaacttcttgtgatcctgaaatctgcaaagttagaaccaaggcagacgtaggtactccagttacctaacaccacagaaatattgtttttatttcataaaataataaatttaaatactgctatggtttccttgtttgccccctccaaaactcttgttggaacttatctccaatgtggcagcattaaaatgtggggcctttaagaggtgattaggacatatgagctcttccctaatgaatacattaatctattcatggaataatgggttcatagaccaacaggttatcttgggaatgggactgatggctttttttttttttttttttttttttgagatggagtctcgctctgtcacccaggttggagtgcagtggcgtgatctcggctcggctcattgcaacctccacctcccaggttcaagtgattctcccgcctcagcctcccaagtacctgggattacaggtgtgcaccaccacgcctggctaatttttgtattttagtagagacaggatttcaccctgttggccaagctggtctcaaactcctgacctcaagtgatctgactgcctcggcctcccaaagtgctgggattacaggtgtgggccactgcgcccaggcaggactgatggctttaaaagaagaggaagagacctgagctaggacactcagccctctcgccctgtgatgccctacaccaccttgggcctctgcaaagaatccccacaagcaagaaggccctcacaagatacacttcctggacctcagacttcccagcctcgaaaactgtaagaaataaatgttgttctcataaattacacagttccaggtattctgttattagcaacagaaaagagactaggacagatatcacagttagattgtattctacacattgtgactggttctccagagaagcaatgcataaaaagaggaataatcggccgggcacggtggctcacacctgtaattccagcactctgggaggccaaggcaggcgaatcacgaggtcaggagttcaagaccagtctggtcaatatggtgaaaccccatctctactaaaaatacaaaaattagccaggcgtggtggtgcgcgcctgtagtcccagctcctctggaggctgaggcagaggaatcacttgaacccaggaggcagacattgcagtgagctgcgattgcgccactgcactccagcctgaacaacagagccagactccgtctcaaaaaaaaaaaaagaggaataatctccaaaatagtaaacaaattcctgcagacaggaaatataatggtagatacctgagctaggagagggggaatggggaactattattcaatggatacagtttcagtttaggaagataaacaagctctgggaataaacagtagtaatggttacacaatgtgaaggtacttaatgctactgaactcaaagttggttaaaatggtacttgctatgtgaggtatattttaccacttaaaaaactataggtgattgtgcttctaaaagagttatcagtttaatcttcaatagaaatcaatggactttgttcatttttaacaaagtcaaaatatgcatacgaaaaggttatggggtaaaggcagaggtaattatttttttccccgaaaggtattttctacaatgaatgtttttatgtaataaaaaatgaaatgacaaaagtttagaatgtttgtgggttttgttccttaaatccttaattacataaattaatatctacattatacagattaagatacatatttttcctctatctacaacatttctccattctctgtatcttaaatcctgacattaaatgtcattaaatttcttaaatctcaagagaacgacttggttaccaaggaagatataatccatagcctagagagtgggcgaataaaagcagcttctaatgttctcaactgcttttctcctgtcaaccaaatgtttctgtaaataactcatttctgttggttttgggtaagacgtgggagaaggaagaatccctgaatggaggagtctggaaaggatgcttgacaaaacgcccgcgctctctggagacgcagccagtctcctccctcctagggtctggtcttgacgatagcatctcgtgttttggggatgcctttccttaccagattcttctaaagcccagctgcacccacccttaagtgggagataaggcttctgcccgcgggctctgcgttcgtccacccggccccacgtttgctgtggactaaacaggagccactggactagagtacacttgactctcggctctgcggaccaaaaattccaggactaaggaatagcaaggttaggctgaaacagtccacacagggcttgcggtaaacgtcttttcaggagccactcgcccagtgcagtaagtcgtgtacttagttgactcgagcgctccagggagacgcccgaccctactctgcgccgccccggggcaccagctctgcttcctccaggtccactgaggcaggcacgcccagctctgggacagtcagtaaacaagccacgaaccgcgccagggatcagagcacccagagtccccgcccagctgccggcacagccaatcgcagcgcagccaggcggcggggcggtgccggccgaacccagacccgaggttttagaagcagagtcaggcgaagctgggccagaaccgcgacctccgcaaccttgagcggcatccgtggagtgcgcctgcgcagctacgaccgcagcaggaaagcgccgccggccaggcccagctgtggccggacagggactggaagagaggacgcggtcgagtaggtgtgcaccagccctggcaacgagagcgtctaccccgaactctgctggccttgaggtggggaagccggggagggcagttgaggaccccgcggaggcgcgtgactggttgagcgggcaggccagcctccgagccgggtggacacaggtaccgcagccaggccgcgccgcgccgactcagggcctggcccggccagacagggaagctcagtccccgcacgccagacagcggtactcctgctggcgtcaccgcaaacatcctctgaccgctacagccagtgtgtggcgcaggcgtcatgtccccggccctgccacgcctggagccctggaagctggctgcagggcgctggcttcccgcgtgcggccatatgaccccgtccctgatttaggggagcagtttggggtgtcggcagcacaggcccaagtgaatgaaggagggagcagtgcgtgctctccttcccagtttttcctgggaaagcatttcagaaaggtttcatttaaggagaggttggggcggcgcggtggctcactcctgtaatcccagcactttgggaggctgaggtgggcggatcacctgaggtcagtagttcgagaccagcctggccaacatggtgaaaccccgtctctactgaaaatacaaaattagacgggcgaggcggcgcacgcctgtagttccagctattcaagaggctgaggaagaatggcttgaacccgggaggcagaggttgctgtgagccgatatcgcgccgttgaactccagcctgggccacagagcaagactccatctcaaaaaataaataaataaataaataaataaataaataaataaataggagagattggaaaacttatctcagcttttggtgtttgttagtcaggaagatgtgtgaaggcctcctaactcttggggatctctttgtccctacttgggaatcccaccttatcattagtgaggttttgcctgggcacgaaacctggattttttgcgattggtacaaaacctggatcaaccgtttcccggtttcctagttgttgccttaagcttctcacacacaaggtagtttcataccgttctcataacctaaattgtcatcgcataaactgtttcagctcctacagctctggacaggctgcttttcattttggtgagtccatccagtacctccacgtgccctgtttttctccaggcacatccttggcctcttccacagtccttgggtaaatgcttgggagaataatttaaatatttttattctaccatggtggccctaatttttcagggggcagtaagatggctttttaggattggtctaatcagatcctcatttttgttcccttcctaggttttaaaacatgaatcctacactcatccttgctgccttttgcctgggaattgcctcagctactctaacatttgatcacagtttagaggcacagtggaccaagtggaaggcgatgcacaacagattatacggcatggttagtgaaacttccccagaaagaatagtcttggctgttgagaagttttagtcagagagtagcttctagaggccagcttttaccaatagcctaatgtaataacctaatggcgtggattatgagcacaatgtggacattcatccttgttgtgtctcagtttggagaacagcatccccagaggtgtcaagccttcccttgccatggtttctcttccatctctgtctgcagattcacttggtgaggatgagttgggttttaggtagaagtaaagagcatcagttacatgtttgcctctagaatgaagaaggatggaggagagcagtgtgggagaagaacatgaagatgattgaactgcacaatcaggaatacagggaagggaaacacagcttcacaatggccatgaacgcctttggagacatggtaagtgtgctgtggactgccgagctctgtgcttcctctcttcggttctttactaaggtaatctcttgcttttcaacattttatttccttttccttgaagaccagtgaagaattcaggcaggtgatgaatggctttcaaaaccgtaagcccaggaaggggaaagtgttccaggaacctctgttttatgaggcccccagatctgtggattggagagagaaaggctacgtgactcctgtgaagaatcaggtgagacagtgtcaggttcagacctcccatcttcccaggaaagccaagaagtgattgacatctttgttttggtagactttaaagtgatgtacagttcactttttaacagtattcagatgtgtgagctgttgtcaaagtcttattattttttttttgtggatgacagctttttttaattcccttttcagggtcagtgtggttcttgttgggcttttagtgctactggtgctcttgaaggacagatgttccggaaaactgggaggcttatctcactgagtgagcagaatctggtagactgctctgggcctcaaggcaatgaaggctgcaatggtggcctaatggattatgctttccagtatgttcaggataatggaggcctggactctgaggaatcctatccatatgaggcaacagtaagtggagctccttgtcatcattccagctcagcttttggaaggtggacactttaagagataacagatacctttttcggaattcatatattagggctgggtggggtggctcacgcctgtaatcccagccctttaggaggctgagccaggcagatggcttaagctcaggagtttgagaccagcctgggcaacaaggtgaaaccttgactctatcaaaaatacaacgaaaattagccggctgtggtggtgtgcgtctgtggtcccagctatgctgaggtagggcgattgcttgagtgtgggaggtggttgtgcaaatgcactctccagtctgagtgacagaatgagaccctgtctccaaaaaaaaaaaaaagttcacatattagatggcagaatatatatctgcaaattgtcagtactgtcattataaattattagcctttgcacaatcctgtgattagatgggtaacatatagctgttcttgcttctatgtaacgtgaagaatatacaagccattctaaatatacacatttctctattgtgaaaaatgtcttatggaagtaaacccagaggtctcattgaagagactggagtcaattttcagtttcagattaactaatagcatttcacttcctgggatgatttataacagtggtgacttggaaatactaagctgcacactgctgagtgttgtggttctaactcatgttctccaggaggaggacagcagtaatcaagtcttttttttccctttacctttgaaaggaagaatcctgtaagtacaatcccaagtattctgttgctaatgacaccggctttgtggacatccctaagcaggagaaggccctgatgaaggcagttgcaactgtggggcccatttctgttgctattgatgcaggtcatgagtccttcctgttctataaagaaggtaagcatatttttctttgtagaaattgatgcagaaaaagagtatcatgacatacgagcatgatagactctggtttgcaagtaaagttcagtgtagatatttaggtgcttagcatcatagttgttcattctgtacatgcaatatttatacctgatgtttccatttgacattatgttgcgtatatctccatgaatataagtacttcataactttttataaatagctatatttactgtgtagtttaatatacttaaaatattctgcaattgttggatttttataatttttccaaagatttttacttctattattaaatccgaaaagagccttttgattcaaggattttagtgttctgtgctatttttttagattgatatcctagagtagaattacaagcttacaaagaggggtctttttttcctctaggaaagcttttttttaatgaaggatttatgctgatttctatttctgctagttgtaaatgagagcttaaatccctggccttcttattgttgttaagtactatctggaatgtgtgtcacttcactgaattcagagatgcctcattccctgtgggtgacaggatgggttactgtcatgtgtcctctggagcttctcaccccagccctcattttaccatcccaggcatttattttgagccagactgtagcagtgaagacatggatcatggtgtgctggtggttggctacggatttgaaagcacagaatcagataacaataaatattggctggtgaagaacaggtataaattgccagaaatacttacatttgaaattcaaaagagaatacttatttgcaaacagtgtttggatacagttccacatgcccttaggcatacttctgaaatccccagaagtctaagttgaacatataatattaatgtttgattataaaagtaagaaactgtcacaaatatcttgggagtatgaatatagtatttgttccattgtataaaggtgtatctaaatctgaacagtttttaaattctgaggcatatctggctgcaaagacatcctattgttttcctgtctctgatctgtagttctgtgaaaggtcacagtttggaggctgggatggaaattatgtccaggttatgtcaagaattttttaaggataaacaggaacattgcctgtcctgattctttctgttaagtctatggcctctggcacagtgtttaagttgggtgttcctgttaataaccctttgggctttattctttctctgaaatggaaaacctgctcttttttcagctggggtgaagaatggggcatgggtggctacgtaaagatggccaaagaccggagaaaccattgtggaattgcctcagcagccagctaccccactgtgtgagctggtggacggtgatgaggaaggacttgactggggatggcgcatgcatgggaggaattcatcttcagtctaccagcccccgctgtgtcggatacacactcgaatcattgaagatccgagtgtgatttgaattctgtgatattttcacactggtaaatgttacctctattttaattactgctataaataggtttatattattgattcacttactgactttgcattttcgtttttaaaaggatgtataaatttttacctgtttaaataaaatttaatttcaaatgtagtggtggggcttctttctatttttgatgcactgaatttttgtgtaataaagaacataattgggctctaagccataactgctgtgccagtggctcactaggaggaagagtgggtggccttctgggtcttctagtcacagatgtacagatctcatgtcagctgcccagtggctatgtcttaaccaatccttgattgcagcaaaatttgaaaatgatctatgaggacaaaggaaaattgtttgaataaagaaaaatattcactttttagaaaagtgaacatacatatatataattttaatactagaaaaggactttagtgatcgtgtttatttcacccaaagtggttgcatctcagtcaagttacagggcaaaggtctcagcctgtttctggagcatcttcgcccactgctggtgaaggccctgtggacactttgcagtcaaggtgggttaagaactagtgcattgccaaggctgtttgtttttgggtcctcaagggatgaggaataaacttcagggtttgaggctggggttcagaagtggtgctctggcctcagaaaataaaagacaagtgagaggctagaaatgacaatctgttgccctatttagagcaagctacctgaaaatacctgatttatttttttttaaatagaaaaacttcccacatcgcactagctaaacagcccatacttccatcacctgtgtgttttcagaagtctcttgttccaactgaaggaaatataaagaacagatgagaatgtccaatgaatagactccatatcacagaggagggtaaccaggtgtacaatggagtctcagcttacaaagcccccgggaggttctgtccaagtccatctcgattggaccacatgccttgctggactctcatgtgcccttcccgagtagttgctaaaatttcaaactttttgacctaaaatggcaaatgtggcatctgtgaaattctttgggtattgtaataaaagtcaccaggggtagcaagatttggggaggttcccaggctaaatccctcgtgcaggttggggcttagatttgataaactggaatttatatacaacacccactacatgctggtcatcaccactgtggaagagacagaccctgacctcaaggagctgaacagttagggagagtgaggttagcagggagggcttccaggaagaagttaaagcagatggctagagcagctagtcaataagggaagatgaagaggtgagcatcttagcagagactagcacatcagcaaccctgagaaaagaccctgtggttacagacccagtaaaagtcactgggtccaggtgttgggagatgaagctggtcaagaggtagattttcaggataaaggagccactgggagtgcagtgaacagactgttttggttctgttactgtaaaacaaaccacccagaaacccaatggctgggaaggaacatctttcacatgattctgcctggacttggctgtgtggttttcacgtggaggtctatatctgtgcttgagacatctgcaggtttgagtgaactggacatctgcaaaggctcactcacatggctggctgcagatgctggtgctggctggacgttcaacttgggctattgaccagagcacctgcccggggcctccccatggcttgggcttcccacagcattgatactgggggaaatacatatatagtgcaattcagtgttttaagtttgccaacttggaaggtgtatatatacagctttaaaccctgaatttcacaaatgttcatgattatctctttgttaataagttaataagaaaaataatttccaggagacttggtctcttttctccagtaatacagcttaaacattccataattcacatgtttaagattgttttatttacactttcaacaagtattcattgggcaccatttatgaggcagtgctgtgctgccaacacaaaagtgaagcaaatactcatgaccccttcctctgtagctcatgttcccattgaaaaatcaaagcctggcacagacccatgggtaagtgcagcactagggaggtctcaaaggagcccagggacagtcagggcacacaccagggacaggccaccctccacggtcagagtaggtataagcaggggccatctgatcccaatttcaagcgttcatagctgtcatatcttggaaaaggcatgagagggcagtttctctttgcgctgtattatttcaatttttaggtaatggaccttcattattttcacaagataacagattccaaaagtatgcagttcaagaaaaaagttaaagaattgacaagaaggaggaggaggaagaggtggagaaacagagggtccttagataacttgatgaaggcgagtctcccatttggggactgatgttcctgagatctgtgcagatgctgctcagagggtccatcacacagcacaggcgtggggaagcagcactgcccagctggactccagggtgctccatgcacctctcagtcacacagaacctctctgaggatggtggctgttggctccaattgaccattccctggcaagagaaacagggaggggggtttgctaagcgcttaaggagggatggacaatgaggggatagaccagggacagtgttctaatgagactgctttagtgaggacgcagagtgactctgctcagaactccagaacacttgctcccttcagctgccccactccccacaaccatgcacactcccctcatcccaacctggggcagcatgttgagcacttaacagaactgccatttctgtggctttttcatccctttccttttcctccatattcaggaagaacaacagattactaatcacccacactcagggaagtccaatataagtaggagcaagagcaaatcccgagctttgggtggttaattcttctgaaaaaccatagcagagacttcctgtttccattacaacgtggaaggagttttgaagttgtaaccatccactcacaagtaaaaagctgaacaaattgaaaaatcaacaactcttcttagaatcatcagacaagtgaagacacacagcaaaccactgccttaataattagagaaatgaatgtcaagaatcacagcttacagaaggagaaatttatgagcagagatttccacaggaacaagtgcttagtaaggaaaaccaagctgtaactgaggaattgccacaggtccatgtggacaagtctgagagttaaaattctaggagttgtgccttagaggggctcctcaagttgtagagctccaatagctctaccaggttctcaaagtagaaatctaagacaaattccctcatgattcaggtatgtgtggtggggcgggagggggcgtcatgatttgaaaatatgccagagcattctgttcttcttaacgaggcctctcctcaagaaaaactttttttttttttttttttttttttttttttttttttttgagacggagtcttgccctgtctcccagtctggagtgcagtggtgcggtctcggctcactgtaacctctgcctaccggtttcaagggattatcatgtctcagcttcctgagtagctaggattagaggcgcgcgccaccacacttagcaaatttttgtatttttagtagagacagagtttgaccgggcttagtagagcttagtttgaccgggctttagtagagacatgttggccgggctggtcttgaagtcctgacctcaagtgattctcccatcctggcttcccaaagtgctgggattacaggcatgagccaccacgcttagccattttttttttttaagtcaaagctgacctattggggtttcatcaaaacctaactgaactgggggatggaaatacccagctgcagcctgcttcagccttccatatggagaagggtaataatcaactccagttcactctagccatcctgtctcacctaaaaatggaaaacccgagaagcacttgtgaattccacagcccagggacatggttaggttgattaaaagactgcgacccactcataggactaaggaatacttctcctccctctacatatttccagcgcattcccaaaggcttatttaccagtgtttcttttacctggtacaccataaccctctttctaaagaatattaaaagctatactaaaaggcaaaagtcacaactagaagaggcaaagcaagcatcagaaccagaatcagatatgtcatgaatgtcagaaacatcagaccaggaatttaaaataactatgactattatgataagggctaatagatcaaatgacaacatgcaacaacagacagagaaggtagagagtaagtggaaaattccaagcatccaaaagtcatgctaattcggccgggcgcgggggctcacgcctgtaatcccagcactttgggaggccgaggtgggtggatcacgaggtcaggagatcgagaccatcctggctaacacggtgaaacccctgtctctactaaaaatacaaaaagttagccaggcgtggtagtgggcccctgtggtcccagctactcgggaggctgaggcaggggaatgaacccaggaggcagagcttgcagtgagccaagatcgcaccactgcactccagcctgggcaacagagcaagactccgtctcaaaaaaaaaaaaaaaaaaagtaatgctaattcttagcaaactagtaatggaggggaacttcctctccttgataaataacatctataacaaacctgtagataacgtgattttgacaaaataaaatctttattactaagatcaggagcaaggcaaaaatgtcccctttcaccactccttttcagcatagtactggaagtcttagataatgcaataaaacatgaaaaataaatatatgtctatagattagcaaggaagaaataaaattgtctttgtttgcagatgacctagagaatccagaagaatcaacaaaaacctgttggaactaataagtggttacagcaaggttctaggatacaagattaatgtccaaaagtcatttcctttcctatatatcggcaatgaacaagtggaatttgaaattaaaacacaataccatttatgcaagcaccacacaaatgaaataattaggtatcaatctaacaacaaatgtataagatttatatgaggaaaatgacaaaaccctaatgaaacaaatcaaagagctaaaaagatatctcatgttaattaataagaagactcaatattagcaggactttattttttttcccatttcatttatagactctgcaatttcaatcaaaattcttgcaattagtttggcaattagttctgctgtttgcagaacaaactgattctaaatttgttatggagaggtaggaatctagaataactaacacaacactgaaggagaacaaattcagaggacatagactgcagggtttccagacttcctataaagctacaataaacaaaaaagaatgattttggagaatgaatagacaaatcatccatgggacaaaagtgagctcagaaacagacccacgtaaatatagtcaactgatcttttactaaggagcaaaggcaatacaatgaagaaaagatagtctttttttttttgctggaacaacttggcatccactttcaaaaacatgaatctagacacagacatttgcatgcttcacaaaattaatatagatcatacatccaaatgtaaaacaccaaactataaaactcttagaggataacataggaggaaatctagattaccttgggtatggcgatggctttttagatataatactaaagtacaatccatgaaataaataattgataagttggactttagtagaattaaaaactactccatgaaagacagtcaagagaataatcagacaaacctctgactgggagaaaatatttgcaaaagaaacatctgggccaggcacagtggctcacgcctgtaatcccaggactttgggaggccaaggcgggtggatcacgaggtcaggatatcgagaccaccctgggtaacatggtgaaaccccgtctctactaaaaatacaaaaaattagccgggcgtggtggcaggtgcctgttgtcccagctactcgggatgctgaggcaggagaatggcgtgaacctgggaggcagagcttgcagtgagccgagatcgtaccactgcactccagcctgggtgacagagcgagattcaatctcaaaaaaaaaataaaataaaataaaaattaaaaaataaagaaacatctgacaataccattcaggacataggcacgggcagagatttcataatgaaaacatcaaaagcaattgcaacaagagcaaaacttgacaaatgggatctaattaaactaaagagcttctgcacagtaaaagaaactatcatcagagtaaacagacaacctacagagtgggagaaaatttttgcaatctatccatatgccaaaggtctaatatccagaatgtttgaagaacttaaacaaatttacaagaaaaaactaacaaccccattaaaaagtgggcaaaggacatgaacagatatttctcaaaagaagacatttatgcagccaacaaacatatgaaaaaaagctcaacatcgctgatcattagagaaatgcaaatcaaaatcacaatgagatatcatctcatgccagttggaatggcgattatcaaaaagtcaagaaacaacagactctggcgaggctgtggagaaataggaacacttttacactgttggttggaatgtaaattagttcaaccattgtggaagacagtgtggcgattcctcaaagatctagaaccagaaataccatttgacccagcaatcccattacctaccgggtatataccccccaaaatataaatcattctattataaagatacatgcatgcatatgttcactgcagcactattcacaacagcaaagacatggaatcaactcaaatgcccaccaatgataggctggattaaaaaaagttgtacatatacatcatggaatactatacagccataaaaaggaatgagatcacatcctttgcagggacatggatgaagctggaagccattatccttagcaaactagcacaagaacagaaaaccaaacactgcatgttctcacttataagtgtgagctgaacaatgagaacacacggtcacagggaggagagcaactcacaacggggcctgtcaggggggtgggaggagggagagcatcagaaagaatagctaacggattctgggtttaatacctaggtgatcagttgataggtgcagcaaaccaccatggtacacatttacctatgtaacaaacctgcacatcctgcacatgaatcccataacttaaaataaaataaaactttttaaaaaaggaaataaatataggctaggcacggtggctcacgcctataatcccagcactttgggaggccaaggcaggtggatcacatgaggtcaggagtttgagaccagcctagccaacatgatgaaaccccatctctactaaaaatacaaaaaattagccaggtgtggttgtgggcacctttaatcccggctactccaggggctgaggcaggagaattgcttgaactaactcaggaggtggaggttgcagtgagccgagacagtgccactgcattccagactgggcagcaagagtgaaactccatctcaaaaaaaaaaaaaaaagaaaagaaaagaaaatataaaaagggctctcgaaattcagccataagaagaacaacccaattacataatggacaattgtcttgaacagacactttaccaaatatatgggtggcaaatgagcatatgaagagatgctccatgtcatatttcatcatggagatgccaatgaaaacaacaatgagataccactacacacataccgtgatggccaaaatccaaaacaccaacaatgccaaatattggtgaggatgtggaggaaagacagtctcatttatcgctgtttggaatgcaaaatggtacaacctttttggaagacagtttggaagttttttaaaaaaataaatcttaacatactcttaccacacaatccagcaatcccactcattagtatttacccaaatgaattgaaaactgtgtccacacaaaaacctgtataatggtgagtggtgactatctgggccatggcacaggtggtaaaagaatttaccaaggcaattgtaggtaaagaaaggcagatttactagagaaagtaggaacacatgttgcaagggtgcaacaggcagggcagcaagagaggagctgactgccaggagacaaaagcttaccacggattttgtggaatggtgtttgtgctgggtgctgaagtgggctttgtgcagtgctgataacgccaaaattgcagtgagctcatttgcatttttctatcagccaagggtctggtgatagctgggtgcaggaagattgtaagttatttgtgcaggaggactgtgcgtcctggaccatgaagaaaaggcaaactcatagcttatctgctttctttttttgctttccctccatcctgccagcctgactaccctttcccaattaggactccacaatctgcacaagagcatttataacagctgtattcataattgcccaaacttggaagtaatcaagaagtccttcagtaagtgaatggataaataaatgtagtaaatccagccaatgaaatattattcagccataaaaagaaatgagttcttaagtcatgaaaagatatgaaggaaacttaaatgtgtattactaatgaaagaatccaggctacatactgtattccaactatatgtctttctggaaaaggcaaaactatggaaacagtgaaatcatcaatcgttgccagagattaggaagtaggaagggctgaatagggagtgcacggaagatttttaggtcagtgaaactattctgtgtgatactataatggtgaatccatgtcctcatacatttgtcaaaacccatcgaatgcacaacaccaagagtgaaccctagtgtttattatgaactttggatgataatggtgagtcactgtaggttcttggactgtaggaaatggactactctggtgcatatgttgatagtggtggaggaggagaggttgtaggggtttggagaagaagggcatggaacttcctgttctttccacccaattttgataggaacaaaacttagctcttaaaaattatgtttattaattttaaaaacaaacaaagaatacctaatttttttacaaattgctctaatttcatagaattgcacattaaaaatatgagatactacacaaaagaaattatagcagtgctttagacaggaaaggggcatgagagaactttctggaataacagtaagttgtatgtcttgatagggacttgggtcgtactgatatatgcaattgtcaaaactcaaagaacatacacctcagatttgtgcatttcaatcaatgtaaattttatggtaaaactaggattttaaaacaagtattaaacccttgttaatgatatgcgcgctaaagtatttaggaggaagcactacctgcaaatttcttgaaaacacgtgaaaaataacatgaactaatggacagatagaggcaaaaatagatctacagatgtgaattaaaacaaagattaaaatgttaatgataaaatcttggaggtagatatatggtattcactgtaaaaattctttcaactttattgtatgtttgaatatttgcataatataatgttaggggaaaattgcagcagagataatattctaaatagctaaaaaaaaatttgactttcagaagaccagactcattgagagcgaaaaaattatttttgttttgttgttcgtttgcttgttttttaattctggcaacggcagaggaactctgactcctggggtgcagaaaaattgtctgtggaagccccgtgaaggaggtgggggaccgctgcaaaagcaaggaagaggacgaggatgaggacgtctgggataactgggatgatggtgatgacaggaaaaagaaaaaagaggaagcagaaataaacattttagaaaagaaaaaactaacagagaagataaaagaaagaacggcaacagaagaaagggcagg

SEQ ID NO: 423 - DNA, 1398 bp, Homo sapiens
gttttagaagcagagtcaggcgaagctgggccagaaccgcgacctccgcaaccttgagcggcatccgtggagtgcgcctgcgcagctacgaccgcagcaggaaagcgccgccggccaggcccagctgtggccggacagggactggaagagaggacgcggtcgagtagaaggatggaggagagcagtgtgggagaagaacatgaagatgattgaactgcacaatcaggaatacagggaagggaaacacagcttcacaatggccatgaacgcctttggagacatgaccagtgaagaattcaggcaggtgatgaatggctttcaaaaccgtaagcccaggaaggggaaagtgttccaggaacctctgttttatgaggcccccagatctgtggattggagagagaaaggctacgtgactcctgtgaagaatcagggtcagtgtggttcttgttgggcttttagtgctactggtgctcttgaaggacagatgttccggaaaactgggaggcttatctcactgagtgagcagaatctggtagactgctctgggcctcaaggcaatgaaggctgcaatggtggcctaatggattatgctttccagtatgttcaggataatggaggcctggactctgaggaatcctatccatatgaggcaacagaagaatcctgtaagtacaatcccaagtattctgttgctaatgacaccggctttgtggacatccctaagcaggagaaggccctgatgaaggcagttgcaactgtggggcccatttctgttgctattgatgcaggtcatgagtccttcctgttctataaagaaggcatttattttgagccagactgtagcagtgaagacatggatcatggtgtgctggtggttggctacggatttgaaagcacagaatcagataacaataaatattggctggtgaagaacagctggggtgaagaatggggcatgggtggctacgtaaagatggccaaagaccggagaaaccattgtggaattgcctcagcagccagctaccccactgtgtgagctggtggacggtgatgaggaaggacttgactggggatggcgcatgcatgggaggaattcatcttcagtctaccagcccccgctgtgtcggatacacactcgaatcattgaagatccgagtgtgatttgaattctgtgatattttcacactggtaaatgttacctctattttaattactgctataaataggtttatattattgattcacttactgactttgcattttcgtttttaaaaggatgtataaatttttacctgtttaaataaaatttaatttcaaatgtagtggtggggcttctttctatttttgatgcactgaatttttgtgtaataaagaacataattgggctctaagccataa

SEQ ID NO: 424 - protein, 278 aa, Homo sapiens
MKMIELHNQEYREGKHSFTMAMNAFGDMTSEEFRQVMNGFQNRKPRKGKVFQEPLFYEAPRSVDWREKGYVTPVKNQGQCGSCWAFSATGALEGQMFRKTGRLISLSEQNLVDCSGPQGNEGCNGGLMDYAFQYVQDNGGLDSEESYPYEATEESCKYNPKYSVANDTGFVDIPKQEKALMKAVATVGPISVAIDAGHESFLFYKEGIYFEPDCSSEDMDHGVLVVGYGFESTESDNNKYWLVKNSWGEEWGMGGYVKMAKDRRNHCGIASAASYPTV

SEQ ID NO: 425 - DNA, 1541 bp, Homo sapiens
gttttagaagcagagtcaggcgaagctgggccagaaccgcgacctccgcaaccttgagcggcatccgtggagtgcgcctgcgcagctacgaccgcagcaggaaagcgccgccggccaggcccagctgtggccggacagggactggaagagaggacgcggtcgagtaggttttaaaacatgaatcctacactcatccttgctgccttttgcctgggaattgcctcagctactctaacatttgatcacagtttagaggcacagtggaccaagtggaaggcgatgcacaacagattatacggcatgaatgaagaaggatggaggagagcagtgtgggagaagaacatgaagatgattgaactgcacaatcaggaatacagggaagggaaacacagcttcacaatggccatgaacgcctttggagacatgaccagtgaagaattcaggcaggtgatgaatggctttcaaaaccgtaagcccaggaaggggaaagtgttccaggaacctctgttttatgaggcccccagatctgtggattggagagagaaaggctacgtgactcctgtgaagaatcagggtcagtgtggttcttgttgggcttttagtgctactggtgctcttgaaggacagatgttccggaaaactgggaggcttatctcactgagtgagcagaatctggtagactgctctgggcctcaaggcaatgaaggctgcaatggtggcctaatggattatgctttccagtatgttcaggataatggaggcctggactctgaggaatcctatccatatgaggcaacagaagaatcctgtaagtacaatcccaagtattctgttgctaatgacaccggctttgtggacatccctaagcaggagaaggccctgatgaaggcagttgcaactgtggggcccatttctgttgctattgatgcaggtcatgagtccttcctgttctataaagaaggcatttattttgagccagactgtagcagtgaagacatggatcatggtgtgctggtggttggctacggatttgaaagcacagaatcagataacaataaatattggctggtgaagaacagctggggtgaagaatggggcatgggtggctacgtaaagatggccaaagaccggagaaaccattgtggaattgcctcagcagccagctaccccactgtgtgagctggtggacggtgatgaggaaggacttgactggggatggcgcatgcatgggaggaattcatcttcagtctaccagcccccgctgtgtcggatacacactcgaatcattgaagatccgagtgtgatttgaattctgtgatattttcacactggtaaatgttacctctattttaattactgctataaataggtttatattattgattcacttactgactttgcattttcgtttttaaaaggatgtataaatttttacctgtttaaataaaatttaatttcaaatgtagtggtggggcttctttctatttttgatgcactgaatttttgtgtaataaagaacataattgggctctaagccataa

SEQ ID NO: 426 - protein, 333 aa, Homo sapiens [sequence omitted]

SEQ ID NO: 427 - DNA, 854 bp, Homo sapiens
tgatatcctagagtagaattacaagcttacaaagaggggtctttttttcctctaggaaagcttttttttaatgaaggatttatgctgatttctatttctgctagttgtaaatgagagcttaaatccctggccttcttattgttgttaagtactatctggaatgtgtgtcacttcactgaattcagagatgcctcattccctgtgggtgacaggatgggttactgtcatgtgtcctctggagcttctcaccccagccctcattttaccatcccaggcatttattttgagccagactgtagcagtgaagacatggatcatggtgtgctggtggttggctacggatttgaaagcacagaatcagataacaataaatattggctggtgaagaacagctggggtgaagaatggggcatgggtggctacgtaaagatggccaaagaccggagaaaccattgtggaattgcctcagcagccagctaccccactgtgtgagctggtggacggtgatgaggaaggacttgactggggatggcgcatgcatgggaggaattcatcttcagtctaccagcccccgctgtgtcggatacacactcgaatcattgaagatccgagtgtgatttgaattctgtgatattttcacactggtaaatgttacctctattttaattactgctataaataggtttatattattgattcacttactgactttgcattttcgtttttaaaaggatgtataaatttttacctgtttaaataaaatttaatttcaaatgtagtggtggggcttctttctatttttgatgcactgaatttttgtgtaataaagaacataattgggctctaagccataa

SEQ ID NO: 428 - protein, 92 aa, Homo sapiens
MGYCHVSSGASHPSPHFTIPGIYFEPDCSSEDMDHGVLVVGYGFESTESDNNKYWLVKNSWGEEWGMGGYVKMAKDRRNHCGIASAASYPTV

SEQ ID NO: 429 - DNA, 1114 bp, Homo sapiens
tatatatctgcaaattgtcagtactgtcattataaattattagcctttgcacaatcctgtgattagatgggtaacatatagctgttcttgcttctatgtaacgtgaagaatatacaagccattctaaatatacacatttctctattgtgaaaaatgtcttatggaagtaaacccagaggtctcattgaagagactggagtcaattttcagtttcagattaactaatagcatttcacttcctgggatgatttataacagtggtgacttggaaatactaagctgcacactgctgagtgttgtggttctaactcatgttctccaggaggaggacagcagtaatcaagtcttttttttccctttacctttgaaaggaagaatcctgtaagtacaatcccaagtattctgttgctaatgacaccggctttgtggacatccctaagcaggagaaggccctgatgaaggcagttgcaactgtggggcccatttctgttgctattgatgcaggtcatgagtccttcctgttctataaagaaggcatttattttgagccagactgtagcagtgaagacatggatcatggtgtgctggtggttggctacggatttgaaagcacagaatcagataacaataaatattggctggtgaagaacagctggggtgaagaatggggcatgggtggctacgtaaagatggccaaagaccggagaaaccattgtggaattgcctcagcagccagctaccccactgtgtgagctggtggacggtgatgaggaaggacttgactggggatggcgcatgcatgggaggaattcatcttcagtctaccagcccccgctgtgtcggatacacactcgaatcattgaagatccgagtgtgatttgaattctgtgatattttcacactggtaaatgttacctctattttaattactgctataaataggtttatattattgattcacttactgactttgcattttcgtttttaaaaggatgtataaatttttacctgtttaaataaaatttaatttcaaatgtagtggtggggcttctttctatttttgatgcactgaatttttgtgtaataaagaacataattgggctctaagccataa

SEQ ID NO: 430 - protein, 98 aa, Homo sapiens [sequence omitted]

SEQ ID NO: 431 - DNA, 1970 bp, Homo sapiens
gtaaacgtcttttcaggagccactcgcccagtgcagtaagtcgtgtacttagttgactcgagcgctccagggagacgcccgaccctactctgcgccgccccggggcaccagctctgcttcctccaggtccactgaggcaggcacgcccagctctgggacagtcagtaaacaagccacgaaccgcgccagggatcagagcacccagagtccccgcccagctgccggcacagccaatcgcagcgcagccaggcggcggggcggtgccggccgaacccagacccgaggttttagaagcagagtcaggcgaagctgggccagaaccgcgacctccgcaaccttgagcggcatccgtggagtgcgcctgcgcagctacgaccgcagcaggaaagcgccgccggccaggcccagctgtggccggacagggactggaagagaggacgcggtcgagtaggtgtgcaccagccctggcaacgagagcgtctaccccgaactctgctggccttgaggtggggaagccggggagggcagttgaggaccccgcggaggcgcgtgactggttgagcgggcaggccagcctccgagccgggtggacacaggttttaaaacatgaatcctacactcatccttgctgccttttgcctgggaattgcctcagctactctaacatttgatcacagtttagaggcacagtggaccaagtggaaggcgatgcacaacagattatacggcatgaatgaagaaggatggaggagagcagtgtgggagaagaacatgaagatgattgaactgcacaatcaggaatacagggaagggaaacacagcttcacaatggccatgaacgcctttggagacatgaccagtgaagaattcaggcaggtgatgaatggctttcaaaaccgtaagcccaggaaggggaaagtgttccaggaacctctgttttatgaggcccccagatctgtggattggagagagaaaggctacgtgactcctgtgaagaatcagggtcagtgtggttcttgttgggcttttagtgctactggtgctcttgaaggacagatgttccggaaaactgggaggcttatctcactgagtgagcagaatctggtagactgctctgggcctcaaggcaatgaaggctgcaatggtggcctaatggattatgctttccagtatgttcaggataatggaggcctggactctgaggaatcctatccatatgaggcaacagaagaatcctgtaagtacaatcccaagtattctgttgctaatgacaccggctttgtggacatccctaagcaggagaaggccctgatgaaggcagttgcaactgtggggcccatttctgttgctattgatgcaggtcatgagtccttcctgttctataaagaaggcatttattttgagccagactgtagcagtgaagacatggatcatggtgtgctggtggttggctacggatttgaaagcacagaatcagataacaataaatattggctggtgaagaacagctggggtgaagaatggggcatgggtggctacgtaaagatggccaaagaccggagaaaccattgtggaattgcctcagcagccagctaccccactgtgtgagctggtggacggtgatgaggaaggacttgactggggatggcgcatgcatgggaggaattcatcttcagtctaccagcccccgctgtgtcggatacacactcgaatcattgaagatccgagtgtgatttgaattctgtgatattttcacactggtaaatgttacctctattttaattactgctataaataggtttatattattgattcacttactgactttgcattttcgtttttaaaaggatgtataaatttttacctgtttaaataaaatttaatttcaaatgtagtggtggggcttctttctatttttgatgcactgaatttttgtgtaataaagaacataattgggctctaagccataa

SEQ ID NO: 432 - protein, 333 aa, Homo sapiens [sequence omitted]

SEQ ID NO: 433 - DNA, 1596 bp, Homo sapiens
gttttagaagcagagtcaggcgaagctgggccagaaccgcgacctccgcaaccttgagcggcatccgtggagtgcgcctgcgcagctacgaccgcagcaggaaagcgccgccggccaggcccagctgtggccggacagggactggaagagaggacgcggtcgagtaggtgtgcaccagccctggcaacgagagcgtctaccccgaactctgctggccttgaggttttaaaacatgaatcctacactcatccttgctgccttttgcctgggaattgcctcagctactctaacatttgatcacagtttagaggcacagtggaccaagtggaaggcgatgcacaacagattatacggcatgaatgaagaaggatggaggagagcagtgtgggagaagaacatgaagatgattgaactgcacaatcaggaatacagggaagggaaacacagcttcacaatggccatgaacgcctttggagacatgaccagtgaagaattcaggcaggtgatgaatggctttcaaaaccgtaagcccaggaaggggaaagtgttccaggaacctctgttttatgaggcccccagatctgtggattggagagagaaaggctacgtgactcctgtgaagaatcagggtcagtgtggttcttgttgggcttttagtgctactggtgctcttgaaggacagatgttccggaaaactgggaggcttatctcactgagtgagcagaatctggtagactgctctgggcctcaaggcaatgaaggctgcaatggtggcctaatggattatgctttccagtatgttcaggataatggaggcctggactctgaggaatcctatccatatgaggcaacagaagaatcctgtaagtacaatcccaagtattctgttgctaatgacaccggctttgtggacatccctaagcaggagaaggccctgatgaaggcagttgcaactgtggggcccatttctgttgctattgatgcaggtcatgagtccttcctgttctataaagaaggcatttattttgagccagactgtagcagtgaagacatggatcatggtgtgctggtggttggctacggatttgaaagcacagaatcagataacaataaatattggctggtgaagaacagctggggtgaagaatggggcatgggtggctacgtaaagatggccaaagaccggagaaaccattgtggaattgcctcagcagccagctaccccactgtgtgagctggtggacggtgatgaggaaggacttgactggggatggcgcatgcatgggaggaattcatcttcagtctaccagcccccgctgtgtcggatacacactcgaatcattgaagatccgagtgtgatttgaattctgtgatattttcacactggtaaatgttacctctattttaattactgctataaataggtttatattattgattcacttactgactttgcattttcgtttttaaaaggatgtataaatttttacctgtttaaataaaatttaatttcaaatgtagtggtggggcttctttctatttttgatgcactgaatttttgtgtaataaagaacataattgggctctaagccataa

SEQ ID NO: 434 - protein, 333 aa, Homo sapiens [sequence omitted]

SEQ ID NO: 435 - DNA, 1704 bp, Homo sapiens
gttttagaagcagagtcaggcgaagctgggccagaaccgcgacctccgcaaccttgagcggcatccgtggagtgcgcctgcgcagctacgaccgcagcaggaaagcgccgccggccaggcccagctgtggccggacagggactggaagagaggacgcggtcgagtaggtgtgcaccagccctggcaacgagagcgtctaccccgaactctgctggccttgagctcctacagctctggacaggctgcttttcattttggtgagtccatccagtacctccacgtgccctgtttttctccaggcacatccttggcctcttccacagtccttgggttttaaaacatgaatcctacactcatccttgctgccttttgcctgggaattgcctcagctactctaacatttgatcacagtttagaggcacagtggaccaagtggaaggcgatgcacaacagattatacggcatgaatgaagaaggatggaggagagcagtgtgggagaagaacatgaagatgattgaactgcacaatcaggaatacagggaagggaaacacagcttcacaatggccatgaacgcctttggagacatgaccagtgaagaattcaggcaggtgatgaatggctttcaaaaccgtaagcccaggaaggggaaagtgttccaggaacctctgttttatgaggcccccagatctgtggattggagagagaaaggctacgtgactcctgtgaagaatcagggtcagtgtggttcttgttgggcttttagtgctactggtgctcttgaaggacagatgttccggaaaactgggaggcttatctcactgagtgagcagaatctggtagactgctctgggcctcaaggcaatgaaggctgcaatggtggcctaatggattatgctttccagtatgttcaggataatggaggcctggactctgaggaatcctatccatatgaggcaacagaagaatcctgtaagtacaatcccaagtattctgttgctaatgacaccggctttgtggacatccctaagcaggagaaggccctgatgaaggcagttgcaactgtggggcccatttctgttgctattgatgcaggtcatgagtccttcctgttctataaagaaggcatttattttgagccagactgtagcagtgaagacatggatcatggtgtgctggtggttggctacggatttgaaagcacagaatcagataacaataaatattggctggtgaagaacagctggggtgaagaatggggcatgggtggctacgtaaagatggccaaagaccggagaaaccattgtggaattgcctcagcagccagctaccccactgtgtgagctggtggacggtgatgaggaaggacttgactggggatggcgcatgcatgggaggaattcatcttcagtctaccagcccccgctgtgtcggatacacactcgaatcattgaagatccgagtgtgatttgaattctgtgatattttcacactggtaaatgttacctctattttaattactgctataaataggtttatattattgattcacttactgactttgcattttcgtttttaaaaggatgtataaatttttacctgtttaaataaaatttaatttcaaatgtagtggtggggcttctttctatttttgatgcactgaatttttgtgtaataaagaacataattgggctctaagccataa

SEQ ID NO: 436 - protein, 333 aa, Homo sapiens [sequence omitted]

SEQ ID NO: 437 - DNA, 986 bp, Homo sapiens
gttttagaagcagagtcaggcgaagctgggccagaaccgcgacctccgcaaccttgagcggcatccgtggagtgcgcctgcgcagctacgaccgcagcaggaaagcgccgccggccaggcccagctgtggccggacagggactggaagagaggacgcggtcgagtaggttttaaaacatgaatcctacactcatccttgctgccttttgcctgggaattgcctcagctactctaacatttgatcacagtttagaggcacagtggaccaagtggaaggcgatgcacaacagattatacggcatgaatgaagaaggatggaggagagcagtgtgggagaagaacatgaagatgattgaactgcacaatcaggaatacagggaagggaaacacagcttcacaatggccatgaacgcctttggagacatgaccagtgaagaattcaggcaggtgatgaatggctttcaaaaccgtaagcccaggaaggggaaagtgttccaggaacctctgttttatgaggcccccagatctgtggattggagagagaaaggctacgtgactcctgtgaagaatcagggtcagtgtggttcttgttgggcttttagtgctactggtgctcttgaaggacagatgttccggaaaactgggaggcttatctcactgagtgagcagaatctggtagactgctctgggcctcaaggcaatgaaggctgcaatggtggcctaatggattatgctttccagtatgttcaggataatggaggcctggactctgaggaatcctatccatatgaggcaacagtaagtggagctccttgtcatcattccagctcagcttttggaaggtggacactttaagagataacagatacctttttcggaattcatatattagggctgggtggggtggctcacgcctgtaatcccagccctttaggaggctgagccaggcagatggcttaagctcaggagtttgagaccagcctggg

SEQ ID NO: 438 - protein, 225 aa, Homo sapiens
MNPTLILAAFCLGIASATLTFDHSLEAQWTKWKAMHNRLYGMNEEGWRRAVWEKNMKMIELHNQEYREGKHSFTMAMNAFGDMTSEEFRQVMNGFQNRKPRKGKVFQEPLFYEAPRSVDWREKGYVTPVKNQGQCGSCWAFSATGALEGQMFRKTGRLISLSEQNLVDCSGPQGNEGCNGGLMDYAFQYVQDNGGLDSEESYPYEATVSGAPCHHSSSAFGRWTL

SEQ ID NO: 439 - DNA, 585 bp, Homo sapiens
gttttagaagcagagtcaggcgaagctgggccagaaccgcgacctccgcaaccttgagcggcatccgtggagtgcgcctgcgcagctacgaccgcagcaggaaagcgccgccggccaggcccagctgtggccggacagggactggaagagaggacgcggtcgagtaggttttaaaacatgaatcctacactcatccttgctgccttttgcctgggaattgcctcagctactctaacatttgatcacagtttagaggcacagtggaccaagtggaaggcgatgcacaacagattatacggcatgaatgaagaaggatggaggagagcagtgtgggagaagaacatgaagatgattgaactgcacaatcaggaatacagggaagggaaacacagcttcacaatggccatgaacgcctttggagacatggtaagtgtgctgtggactgccgagctctgtgcttcctctcttcggttctttactaaggtaatctcttgcttttcaacattttatttccttttccttgaagaccagtgaagaattcaggcaggtgatgaatggctttcaaaaccgtaagcccaggaaggg

SEQ ID NO: 440 - protein, 118 aa, Homo sapiens
MNPTLILAAFCLGIASATLTFDHSLEAQWTKWKAMHNRLYGMNEEGWRRAVWEKNMKMIELHNQEYREGKHSFTMAMNAFGDMVSVLWTAELCASSLRFFTKVISCFSTFYFLFLEDQ

SEQ ID NO: 441 - DNA, 25800 bp, Mus musculus
  misc_feature (1)...(25800): n = A,T,C or G
ctctttaagtgatgtactcataggaagatagacacccaacacagtaacatgggtcgacatacgatagacaaacagatatacaacatgtctgtggtattgtaatgtcaggatgaggaaaggttagggggaaattatctactccttggggcacagtggttcagggagaaaggttgaaaaatactgccctaaggactcaaatgttgggggtagatactccagtgaaaacaaccacttaggcccttagcccctctcctttctcagtctggcccttggtgacaggtatggaccaatgccctttgttaaacaatctaggttgattcagatctagatgagagttggttttcatgcaaaggaggaagactttttaaagtaagacaattgccattgaaatcagaatgctcttattttaatgtctgactatagatagctttcactataaaaaacaaaatcctatcttatcattacatattataggacggatcacaactcttgtagcatggggtaggactcagagagcacaaaggagttctgatgaacaggggagagcaacaaaaccacatgaaccaagaaacttctaattttcctaaagtcaagggaagaggagtctccatgtgaaaaacagacccaacattcacaagctccatgaaagggaaacaagggataacataacctttaggttgattgggtctctaggaagggggcactgcaggtggagggtctacattataatctcatttctttcaagtgccttggcagaccatggcaatctgtagtgtatatgcaaatcaacaactctctcacacctctcttgaatgtatttttccccttaagtactagagtcttaggagcaacttcaaagttcctaagggcataaaagcccaggtcagaaaaaaaataacacttttttccccccaggctaaggaaataaagtccagatgttccttacagatcctccacatctggggaggaagactaagctgttcccacagcactctgtgacctgataggatggcatggagtctaatcatgccaggtgtctaatatatactttttgggagtctcattcaactttgtgttagggaggctggtactgtatcaacttagaagccatctcagattcttctttgataatagaggtataaaacacaacacaaattttgatcctttgaattactatgtggggatcttgcttatggcattccagaatggggcaaccaactataggttgtattaggcaggttcactggatcccctgagagggagacccaaccaatcacctgactttcaaaagccctcactctgggcagaaatggtgacattttggatctgctgggattggggttcattcagagccagcatcactttaaaaaaaaaatctactaatgtctttcatgtaccgcccatccccaatgacctatgggtccttctgagaatcaggttaacagtactattttctggcagtgaaatgaaatcctgtctcaaagagatttggcccatccttcattcacagaggctgtacatttgtcaacaatatgggactttgggagccagaactattttcatgatttaagtttgatttttctcttaaggttttttttcttacatatatttatttatttgtgtgtgtgttcatgcacacacatggagaatggaagacaacttatgggagtgtgctttttaccatgtgggttccaggaatcaaaccaggttatcacacttagcagtcagtaagcacctttacccaccaaaccatttcactggcttactttctttttataggacttagagatcttccatctatacagctcaagagaggatttcatagccaccagtcagcttcaaagataaaagatcatgaacaactaactggccaaatccatcagtctctgattgagactatttcagagtcagctatcaggtgctaccacccccatctgcccttggtgattaagagctgataccagtccctgtgagagtctgaccctgcactttccactgcctgcttcctccccctcacccaccctccactccccgccttctggtctgattctgagaaaaacttctaacaatggaaagcataaaaaattcaaatagacatttattgtgtacaaacagttttctatggataaatgggggtgggtgctaacattcagactaaactccatcccacagttacctagcaacagccaggtaggcctgacctactataaaaggggatgcttgccccctcctctctctcttgatctcttgcttctctcctggtcttgttccccctctcttccattcccttccacctctctccacgtgatcatggtcaagcctctacttctctactctctccctctctctgcctttctctgcctctactactttcttaactcccctccccatgccctgaataaactctattctatactatattgtcatgtggctggtccctcagggggatgggatgtcttggcatgggcccgctgaggcacctcctcttccatacctcaccacatccccatagaacatatcttatatctctttattttttttataaacacatgggggtgggggaaggattcaacttaaacataaaatttcagtctgtaaaacatttttgctgtctagattttttttttttttttggcaacactgtcagatttcgttggcgataacacctggttactgggaacagggcaactagctagtgacatgttggtttagatatgcatctgagactggaaacagaaaagcattcagatttctccagaaattccagtgaatgacttcaggtttgtacccacgtttaaaaaaaaaaaaaagccaggcaggtttgacaagcaaaaggtgagaggtgaggacttacattgctttgctctgttctcatccacattggcctcatcgatggcttgctgtatctcatccagccagagaactttagaaacattcttaggatcctggaacagtggcacagaatcagagaacggtgaatcctgatggaactggattaacactgctcttcaggagtcattttatcatcacctcctacttcttattcagcaagcactaggtagctccaccatgcagcactagctggtagcaggcaggccacagatgctcagccagaccatcccctagctcagtgggtctcaacctgtgggtcatgaccccactggggttgcgtgtgcatagcagatattctgcatggcaggtattcacatgatgattcataacagtagcaaaattacagttataaagtagatacaaaataatgttatggctggtgggggggggggtcaccacaacatgaggaactgtatgaaagcgtcacagtgctaggaaggctgaggaccactgctgttcatggacagctgtgctgctgtcctatgcagactcactgcttccaatttggtctgcatcatagtcgatctctagtttagagaacccctgctcatttaaaaatggacgtctcactacatccctcctctgtttaaccttagaaagaaacacaggctctcttctcaggaccatagatctaggactagtgatgaggaccttacatggctctttagcttctcagtccctgttctaggacctccctcaggccatagctctctgacctagctggctcctgccatatcccataactcaaatgccacctctgttaaaaagccatccatggccatgcagttaagcattccagcaccgtggttggcaaactaagtgccaagctgccccagtgtgtcaggggatgctttaaacttgagggaaacagtgatacccaatgtttgtcagacacccagacaaaacagaaacaaaggtatggtaagtggtctgagggagctaaggatctcttggagaagccagaagcaatcagaacacacagtgctgttcacggtgatattagctctggcacatggttgagaagtaagcaagaagggtatagtggtttgaaaaggtttggccccctgtagactcatgtgtttgaatgcatgaccgacaaggaatggtactattaggaggtatggccttgttggaggaagtgtgtcaccatgggggtgggctttgaggtctcctatactcaagttcagcctaagtgtggaatgagtctcctcttggctgcctttaaatcaagatgtagcactcttggttcctccagaatgctgccatgcttcctgccatgacgataatgagcagaacctctgaacctgtaagccagccccagttaactgttgacctgtatgtataagagttgtcttggtcatgatgtctcttcacagcaatgagaccataactaagggttaatatgcaggataaagaatctaagtagttaacaatggcttaagaaagaggtgatggcagcagtgaaaatgcacagaattcgttttagtgtcatacatttgggcgaattctgaagatcttgctacaagcacagtgctggcagatattaaatgggacttcaagtcaattttatgagcagacattaaatacgttcaggaaagatttagaagcccacattttaaaaggtttaccttattctaattatttgtgcatgtgtctgtttgtgtgtgcacaaggctgcaagtgcccttcaaatccagagagggtgtcttgatcctggagctggttataggcagctgtgagctccctgatgtgaatgctggcaactgaactcaagtcttgggtaagagcagtgtgcactctcagctgctgagccatctctctagcctctggaatgccgttttcaaactgtgagcgctcatttatacggagggataagtgctgggctctatacctggaatcaagacacctaggggaagctgtggagatggctcagctggatgcccaaggactgagtttgaatctgtgaggcccattagaaaaaaaaatagaaaggaaggaaggaaggaagaaagaaagtaagagagagagggagggagggagagagggagggagagagggagggagggaaagagaggagagagagagagagagagggagggagagggatannnnnnnnnnnnnnnnnnnnnnnnnnnnnnnnnnnnnnnnnnnnnnnnnnnnnnnnnnnnnnnnnnnnnnnnnnnnnnnnnnnnnnnnnnnnnnnnnnnnnnnnnnnnnnnnnnnnnnnnnnnnnnnnnnnnnnnnnnnnnnnnnnnnnnnnnnnnnnnnnnnnnnnnnnnnnnnnnnnnnnnnnnnnnnnnnnnnnnnnnnnnnnnnnnnnnnnnnnnnnnnnnnnnnnnnnnnnnnnnnnnnnnnnnnnnnnnnnnnnnnnnnnnnnnnnnnnnnnnnnnnnnnnnnnnnnnnnnnnnnnnnnnnnnnnnnnnnnnnnnnnnnnnnnnnnnnnnnnnnnnnnnnnnnnnnnnnnnnnnnnnnnnnnnnnnnnnnnnnnnnnnnnnnnnnnnnnnnnnnnnnnnnnnnnnnnnnnnnnnnnnnnnnnnnnnnnnnnnnnnnnnnnnnnnnnnnnnnnnnnggcccgtttcctgagtcatcaccagctactgctgtcacatgggaaccataggcaggcagcttggtaattgcttaggaaatgaaatttcagaagagctttaagtaaaaccagggaaagaatatgaggcttgaagaagaggagacagaaaagcaggattaaaaaaaaaagatttaattagtgtgtgtgtgtgtgcgcgcgcgtgtgtgtgtaaatatgtggcacatgtgtagggtcagaggataatgtgtggagtcagttttctccttccaccttgagttttaagggttgaacctgggacagtaggctagagtagcaagcaagtacctttatcctctgtgccctctcactggccctaggaattttttcccatttccaaatccaaagaaatgccacactccccgggaatggttttaaatctatcactgcacaagttccttccatctcagccatcttctgaagaggtggcttccctgcaggggagagactgcacacaatgtcgcctggataagaaaatggtggctgtcccatgctaaagattaaagtattagtctcagaagccaaacgaaagcccagactttgcaaaaccaaacaaattgaagacaacagtttcgagaccttgttgtactaaaagaaagctaaacacaagaccaaaagtgaaaacaaaaaatattccgatgtgagatgaaatcccttttacagtcattcaccagaaaattggggatagcaatgcaagggctgggcctccaccaggctccacagggattcgagggaatgagaaggctaggccttcacccagctgcacagggatgcgatggctggacctcaaccagactccacagggatgcgagggctgggcctccactcagctacacagccacgctgtgcctaagtgaacagggataaaaccagcaaccaggccacatgcaaattacaccacaccttcctgaacttgggtgatgccaagaaataactgccccccctcccctgtaaattttctgggtttcttgtttctatagtattagaacattctaccttagtttatggtaccatagattatgcagttgaagtacttaaatctgacctttggaaattatgcaatttggcgaaatttaatcaagatgagaaaagttaatatagatctctattatttcctagttgccccttcatctcattttaagtctcatgtgaaatttgaattttctgatttctttgctgcattttagaggtggaattgcctgccttggaatttaaaatatatcaaggcaaatgaattataatcaagttttctttttttaaaaaatactttgttaaatgtacttaacactagtgaactgcacattctgaaggctaagatataaatgtgatatatatatatatatatatatatatatatgttataactaaggacctgtacacatcttaggagagtcagatcagtagcttggtttggaatggtcaagttccccaaaagggatctcatttatgccattcctggttttggcaccaaatgaatgaaaaaaagaaaaacaaaagggaaggagacatgactgctcctaggtttattgtagataagggagagcataaccagactcagagctatttgggagaagtcagagtatatatggccatactgagtatatatggccatatgagggagaagccagagtatatacagccatactgagtatatgtggccatatgagggagaagccagagtatatacagccataccgagtatatatggccatatgagggagaagccagagtatatacagccatactgagtatatatggccatatgagggagaggtcagagtatatacagccatactgagtatatatggccatatgagggagaagccagagtatatacagccatactgagtatatgtggccatatgagggagaagccagagtatatacagccatactgagctgtaccatgtagggagagggagaggggtggggaaaggggagagaggggaaccaggtgaagtagccaggaggcctaaggctataaagagagtatgtaaccaaaatagttggattctttaagggatgagctgcccagccccctggactggaaaagtttagggtagaaggcagggtagaaggccagataggagggacctgtaacaggtagggactgagggatgctgggagagcctggtagtcagtgtccactctggtctgttaaataggcacctcagacaactgtctcaggtgtgaaactaacataacactaacgaacggtactttatgatagttaagatatctctatctgcctatctatctacctatctatcatctatctatctatctatctatctatctatctatctatctacctatctatcatctatctatctatctatctatctatctatctatctatctatctatctatctatctatctgcctacctacctatctatctatctatctatctatctatctatctatctatctatctatctatctacctacctatcatcttaaagtacttattatagacctgttcattcatcaagattcatggaataacaggctggctatggtggtgcacacctttaatcctagcactcaggaggcagaggcaggtggatctcagttcaaggccagcctggtctatagatagagttccaagaaatcaggtcacagagaaacctggtctcaaaacaaaacaaaacaaaacaaaaaacaaaagttcatggaataaagcaaggtcttgttcttcggtattttattatgattttaatttagttcagttcaaatatgtttttttggagggggtttgcatctatcctgttatcttatcctatagagttatcataggacacattgatcaatggcaaatgaaccttcttcccagacacaataaaactaagttcctgacaggcactaagggctgtcagggcattggaaggcaggtagagaattgtcttctttctccctctgagacagactttcactgtgttcctgaggctgggctagaactcacaacatggccaaggccggctttcaactcattacagtcctcttgctatggcccgtctgtcaagcgctggggtcataaataagtactatcaccctcaggtgaaatttagaaacaatctaatccctctgatacaatttgaacttcttaaatatttgccaggcctgaggatgtaactctgttggtagagtcctagaagccctgggtttagtctccagctccacagatcccagcagcccagaggcagcaggaggtggcccaggcgctcaactacatcctgagttcaaggcaagccagactatatgaaactctgtctcaaaaaacaaaataacaaaataaaagatggaggagggagggtgtattcgcttctcatgattaattcagtttataactacgtgatcagtttaggaactaaaatttgaaataaagcacaatttcattttgatttttgaaaaagaaatttcatgttatattttgatcgcttttccctctcctcaactttcagatccttcctgcctccctaacgccataccctttctgtctatatttaaacaaataataaaaacaaaaacaagaaatgcatacaccaaagcccacaaaagcataacaaaatggaaacccaaatatacaaacaaaaagaccattaaggcagaaaaaaaagaaaaaacaaacaaacaaacaaacaaacaaagcagtaggagatgaaaagtctgcaaaaatcccactgaattttctttgtgttagccaactactcttgggtgtagggcctaccttgacatgtgcctagggcatccaggagattccattggaggaaaccactctttcctttgccagcgggtatcaactgcagaactttctgggttagtggtgggagccccagtccccttcccctctcagctctgggaccctccttggcttgaacctgtgcaggccttgtgcatgctgccttctctttgagttcatatgtgcaccagtcctgatttatccggaagacactgtttccatggagctatcgatcccttttggctcttaacaatctttttgccttctcttccgcatagatccctgagccttgaggggaggggcttgatgaagacattgcatgtaggactgtgcgctccaaagcctctcacgctctacacaccatggaactctgtgtttgttcccatttacggtaagaagaggccgttctgaccatggcggagtgaatgtctgactgttacacaggagtgtaatgtctgactgttcttgtgttaaatagaaggtgtaactctggagctagggttttggcatagggaaaagaaccggggcagtggaattgattcaaagctaattgcttcccagcacctgttctcagctttgttttgcaagggactctgcagtctctgccattattccaagcccctgggagaactacagcactggctctaaatgaaataatggagggggtgaggaagagataaaagggatatggcaactcctccagagaggctcagcctgagtcatgcacacagacagaaacatcaagtggccacatcctttctctgtagaggcaaggacgagtccctgcccacacagtccaggctggcagagttctcagctttccacttgctgctcatacatggagctgaggggaatctacgctgtgactttgtatacttaacaacatcctgtaaccgggtctcaggacatcaagatgaaaatccttatcttggttgcagctgggctgctgtttctgccagtcactgtttgccaaagtggtaagtccccttcttgtggtctagcatgggggtgagagagtggtgagtggatggtttctgctgtcagagtcaaatgccctaattttcttgttaactcctagaaactgtgaacccaaagacacaatttgatctggttttagcctggggtaatatagcgtggaaatattcaagcttgttcccaagtcaaaccttgtcaaagaccaagcgttcttctctactagtagtgtctctacatttgtgacagagtcaagactttatgattaagtcaaaaaccactttttttttggcgtgagaagtgtttgtatgtgtacgatgttcagatgtagaaaagattgcactttttcaaggcattaaaaaaatcttttcaaatttctaaatattataatttctgttgaggcaccggtgggaaaaaaatactgccaggaaaagtaatttggtttcagcagccagtgacattaatcagggatgtgacgtgtttccaaggtgaaataccgtcttttcttaatgtttcagaaccaaggagttctctctgtccctcacatatatatgtatatatgtctgtgtgtatatatgtctatacggatatgtctgtatacgatatgtttaggcataatttggttatgtataattttagaaataagctttcccaaatataattatttcactttgaacatgtcttctattgtggtagcttatataacttcctcattgttctgaaatgaactactttgagacaggattgtatgcaggactctgtcaggccacagggcaatcaattaggaggaggaactgggaagaaaccaacttaaacaaaaggcagccgtctgcaaaaggaacgatccttaaattgagttccctgcttaaggggacccatggcaggggcggtacaagcacgggttggctaggtttatggtttctctgagaggagaagccacaaagctgagccatggttgcaaggaaatgagttatgagagggagttccttcctgatgctagcctgcttgggagactgagaagtgggacttaaggagaggtgggacagtgggttcgaagtctgccttggagagatgtgaggtggggtgtgtgtggctgagggccattctctttggattagactctctgaagccttctcccaggcggggagcatttcagaaacactgcaccaaatggaaaccaaaaaaaaatcctagtcagttgtgtgtcgttttataaataacattgaacaaggagcacttattctgaaggaaagacagtttctaacgaatagaagatctaggtggtgcccgatctgaaatattcggggagcagtctcctttctctgtgtttgtagacacgtatcttgcccaagcacaggactctcctgaaagctgactaatgcttggtttcatcagctttctcatcagaccttggagggaagaaatttgtatacatggttctgccagcttcctttacaggtgttgttttgagtgatatcagacttggctttacccaaatgtgcacgtgcagaaggatttaagtggctgagctcagacgtaacaggacattccaataatgctcgcatctaaactcaggcacatggaatgctaccttccaaagtagtctttccctggaggacacagcgtcaccttcacttaccagttgttcggacaacaccgattctgcccgctacattgaattcagcctatgcaaactcccaagtctgggagagcaagggccagagataaaaatcagaaagagaacatgggtcagtctactgaacatcaccctggaagagttaaaatgggggatgcaggagttttgtgtccagacctcagtgggagggcactagcttttcgaatgggaatgtaaaaggcttctattggcatttgaagaattgattaacgggaactggctgagctgtgccaagcatctacaacacatagctgatatgtttctttcatttaaaaaattcattttgctgggtggtggtggtggtgcatgccttcaatcctagcactagggaggcagaagcaggcggatctctatgagttcaaggccatcctgttctataggatgagctctagtacagccagggaaattacacagagaaaccctatcttaaaaaaccaacaaaacaaaatcattttaatgcctcaggttatcacagtgagttcatcttttgtttcttttctcgttgtcttaaacctggcatttcccttaagcccatcttgtttggcttcttcccatatttctctatcggccctctctctactccccaagttaaactacagccactgtgaagactaagaaagtcacacttcacaattgctcttggcttttgggaatgccacatccagtcattccattttgaccacatggccaatctaggattctgctcccatctcctgattcctaactaaataacccctttccccatgggataacacatcatgggttctaggagccggcacatggaaccttgggtcgagtgaaatgttattctatctaccctggtagccatccctttgcaaattctgtgcacaagggggagggggcagtgtggctcagtggtaaagcagtttaattaccaacatgtggtggcgaggagacgggtggcgtgtatgtgccagaatgtatgaaaagatggtggcttccgaggacagtttagaggccctttgggagttaattgggtgacctactttctaaaattcatctcttagatataccaaattagcagaagacagtgcatgcccacgcaccttctgccctggtctaagagttactggtagatagcagtggaggttagcacgttcacagcactgccatggaggtatgcaaccaacattttcagaatctactgactggcctttcccatacgtagctgatagacaataaaacattttcctttatgttccagtgtgtggttttgtttcacctagcaaagtggttctcaactttcctgattctgcgaccctttaattcaattcctcatgctgtgatgaccccccccccaaccatagcattactttcgttgctacctaactgtaattttgctactgttatgaatcataatgtaaataattttaagagatagaggcttgccaaagggccactgacctagcactattataaacgcctgacactcagagacctgtcatctagtcgtccccacggagaagcacagtactggagcatatgacacatactatatatacatattacatatacatactatacatacatgcctgtgggttgcatcatctatactgatttttaaaatatgaccccaagttctataactatagaaatcacatagcgtcaaacatttcattttatttttttatccaaaccacaggtgggacttgataacaaaccatatgctaatatttcctttcaattacaggcataaatgtttcagacaactcagcaaagccaaccttaactattaagagttttaatgggggtccccaaaatacctttgaagaattcccactttctgacatagagggctggacaggagccaccacaactataaaagcggagtgtcccgaggacagtatttcaactctccacgtgaataatgctaccataggatacctgagaagttccttaagtacccaagtgatacctgccatctacatcctgctgtttgtggttggtgtaccagccaacatcgtgaccctgtggaaactctccttaaggaccaaatccatcagtctggtcatctttcacaccaacctggccatcgcagatctccttttctgtgtcacactgccatttaagatcgcctaccatctcaatggcaacaactgggtatttggcgaggtcatgtgccggatcaccacggtcgttttctacggcaacatgtactgcgctatcctgatcctcacctgcatgggcatcaaccgctacctggccacggctcaccctttcacataccagaagctgcccaaacgcagcttctccatgctcatgtgtggcatggtgtgggtcatggttttcttatacatgctgccctttgtcatcctgaagcaggagtaccacctcgtccactccgagatcaccacctgccacgatgtcgtcgacgcgtgcgagtccccatcatccttccgattctactacttcgtctccttagcattctttgggttcctcatcccgtttgtgatcatcatcttctgttacacgactctcatccacaaacttaaatcaaaggatcggatatggctgggctacatcaaggccgtcctcctcatccttgtgattttcacaatttgctttgcccccaccaacatcatactcgtaatccaccatgccaactactactaccacaataccgacagcttgtactttatgtatcttattgctctgtgcctggggagcctgaatagctgcctagatccattcctttactttgtcatgtcgaaagttgtagatcagcttaatccttagtcagcaatggcaagaccaccttagagaccaaggagagatatctgggaagacgtacatgcttggctgacttgtgcatggcaccatcagctcaatttttaattttttaattttaatttaatttaattttatgtttttgagacagagcctcactgtgtagtcctggctggcctggctggttctctatttagaccaggttagccttgaactcacagagatctgcctgcttctgcctcccaagtgctgggttcaaccaggtctggcaagcgctccatttttcagctcctctgcaacagtgctttatacttccaatgtgaagtcatgaggattaaaagaatactttgtatttagagagtgtcttaattgtaagcaacattagcagtattccgatggcaatggatgcatttctacttgccttcctgattctccaagctatacatgtccccttccctcctgtgagcggtgtcggcagactgggaggttgtcactacccatggttctccctcctcctcaagcaggtatcctgtctttgttgtgtctctcactggggtcccatgttcatgccacctctgtccaaagatggcagccctcactgccagctgagcctcatttccacagattgggttaaccttccctgaacagctttctgaatacatcatgcaatacttcccttgaccctgcagtgctcctgaaatgacaagcccttgcatggctttcctggtggagctgtgcctgcgattccacacaccttcacaccgactgtcttccctcccatccctgtcgccccactgaaaccccttctagcatctttgctttagcctgtccagcttttcaagtcgttaaaggcccgttcttcccttattctcaaactagaagcatcattttctttatctggatttctaaagcactttcttatctttatggcacgtctagacaaacaagcctgctaagctcatttgcatatagatattacttccataaggaattaagttctctgtgtggtcagctctctgtccctgcaagtttcatacctgcagattcaaccaaccacagacccaaaacacttgaaaaaccttgtatgagctgaaaacgaacagagttcattattcattattcagagtattttcattactccctaaataatactgataataaataataataaacaatactctttgcacagcattcacactgtattaaatatttctaagtcatccagatgtgatgtgaagtatatggaagactgtgcagaggttgcagccactgctacagggatctgggatctgtggaggttagtgtctgcaggggtcctggaagccacctgggagatatgacagacaaggaggcatctgtcctccctcctttgaggttcttgtggtcattcccaggccatgttctgtggggctagctgcactctttgtatagcatgtggctcaatgaaagaatacaatcccaaggcatctaaacaatgtgggggcctggtcagttcttactgacaaggcagcataccctgtatgacataatttatgattgggcttatttaaaaaggagaggtatgagacttaaacagcaatatactcataaggtcatttagcaagtatttctatccctgcttgttttaatgggaagtggtattgtattataagcctccagattattcctgtaggtaaaatgatttcttagctaagggagccaatgggagatgtaatattaagcaaatacagatagggttgagggaacctctgcaaacacagcattactgagacaaaactgtaagtaagcagatacacacatctgacaaaacattatagtcaacaaaacaatacaaacacatgttaagtgacactgttgagtgtgtgtgtgtgcgtgtgtttctggttcattaaacttggacatagaagttgcacacatagttaccagaaggcctccaaatctatacctcacagagacacttgctcagccatgtttcctgcaacaccatgttcactggctaaataaagaacctggcaggatcccaggggcagaggaacaggtacggcaagtgcttttgaaagctttcctttctagcaaggctccttagccttaaaggaggagtcaagccatttgtggggggaaatgagcacatctggagatcatcgtgttaagcaaattaggtcatctcaaaaacatacggtatcttttttcacccttggtggtgctttgattttatacaaagaaacagaatcgtgtacatgtgcattggaatgtctgagcaggacaaaggacaaaggggagtgtcaaaggtagcagctatggggagcaggagtatgcaatggacagtggatacttgtataaaagcattaattaaaaagactttacaaggttccataaaaaggaaaagtcagggttgacaggatagctcagtgggtaacacttgtgaccaagtgtgacaacctgattggtctgtctgtctctccaatccacactgtggaagaagagacgtgacacctgcaaggtccccacctccacaggaaaactcactcactcacactctaataaaatacacaaacaaatggaataaagtaaaagtcagataacccttttagacaagtaattaaaataaatctaaagcaagttttaagattctaaacatttcagtaaaaggaactcattttgaaagctaagtcattaattgtagcagtttgtccatgaaatacagcaatacatacaacttagaagcacacataaatccagtagcatatgactttaatcccagcgtatgagaaacagagacatggaagccagcttggtctatactgtgagttccaggacaaccagagctttagcaagagagagcctgtctcaaaaacacacaaaaccaagaaattcaaaccaaccaaccaaccaaccaaaacaaacaaacacccaaataaaaaacaaacaaacaaaggcacactaaaatttcttggtgtaaccatccaagaacaaacctagattttaatgggatttagttcacatgacaatggaactgtaaattttaaatcagtcttgatttactttctccactgggcacagcagaaagtgtgctctgttcagtgtgtgccaccatgttctttactcagtgttggggcatgctggatatgcagcatccggaaccctcacgagccccgcccccattctcactctgagaaaccttagcgtccatcccaggatgttgtccactataccctttaatggctgtctactttggaacaatctctactcgatactataatgccagcaatatgtttttattcctactatttcccaaggctaggctgtgggaaggcaattatagacatgccaccaagggtgtacactggaatgttctaggaatctagcagagattaggagaaattaaaagcataccacaaggactctggtgaaaaacagaattaggtttccttactttcagttaaaaatatcaggttgagaaaaaaaaatattatatagttacttaatatatactacaattatataatacatattcttatttgacccttattataatactattcaataagtattcttttttaaatttgtacatttatttatttatttatttatttatttatttatttatttatttttatttaaggcctggcctttatatgtagttctggctgtcctggaactcattctatagactagactggcctcgaactcacaaagatccacccacctttgccccgagtgctgagattaaaggcatgagctacaatacctagccacaataggcagacttacaattttacttttcatgggtgaaaataaatgtatagacacatggtagcttcactaaagtctcatagacaggacctgaaccatacctacctacctacctatagcagaagcaagcaacttgcagacccaacacaagctctcagctactgctttagcacggtatctacctgctgccaggctccccaccatgatggtcacggactcgccctctgaaaccatgagtcccaaactaaacattttcttttaagttgccttggtcgtagtgtttcgtcatggtgctagaactgtaagacggcgtctttaccttccctgtattaccctgagccccgacctcattctttcagataaggctgcatccactgtgttggctaaagcttggctgaacaagacctttgtaaagagcagtccctgggaaagcacaggagaaaagcaagccggctgccagtgctgaccgaaagctctgccttgagtcacagatctatggacttccaacgaggccacttcttagtgttacgcaaacacagtttacatttaccaatggaaaccctacattcattctttagaaatcttaaacatctaatcagtggaaaaacaggtttaacaacatctcccatataccacacccttgaagtctgctttctataagtttcttcttctttagaaatatttcacaaacatttaagagcacgtctcaccctcccaaggatgtatatcataatttttatgtatactaaagtatgttatagttgtcttctaggtcttttgtttgtttgtttgttttaaacatttaggtcatttgctggactgggggttttcccagtggttagtatacttgtttgctgcacaatatcttaggtttgatttccaggattcccaaagggaaaataatttattaaggtccttttttctgtcttttctccttgctgtacaggatgtctctctccccttgtcttaacacaccattatgtaagtttctcagccaggtggacacagtcatggtcccagaaccaatcacctttcagaagagggctggggaggcagtctcaggaggcttgagtcatcttagctataattttgctgtccgttttggtgttggtgttcacagtttatgctatagctatacacatatacacaagaatcataagtgctggagagatggctcagcagttagaagtcttgtcttccagagacaagagttgggttcccagcacccaacaccaggcagcacacagctacctgctgctccaggtccagaggatccaacacctctgatctccaagtacacgtgcactcatgtatacatatccacacaattaaaaataaatctcttaaaaacccacacatgcatatacttataatgccagtaagatgttgagatataaaagcacatttatttatatatttcatattctggcttaacggtcattgtaatattacagggcaggtgttattctcattttatgcatgtgaaaataaacatatggagatgtggcagctgaggctacagagatcggaatggtgcctgactgtctcccaagcaagcaacttttcctctcaatgctgttatttcgctgtctgccacagagacagttatttaactcctagatcattatctcagaactcgtgatgatggggaaatgatttcagggctattatgggaattaaatgagagatgcttagctaccgctgccgtgcctgcaaacaggaggtgctcagtccacacctctaacctgtgctgtaaccacagtgcttctcctgctccagaggaggcagagcctgggttctgagggtggtggactcagggagctaccattccttccagctgggtttgtacctgaggatatgggtgacaactatggccactgaagcaggagccatcacttccactcttgagtgctaggtcctacaagccttagcattcaaccccgtatcttactaagaataataagtcttcctgagaccccctcagtataagtccagatgcaaataacatcactgctcttcaagaggactccaggtgagtcccttcccattgcctagaacagagagtactgcctgtactatgctgaccccttcacccacctgctcaaccaccgcttccttctccttcagacatggcttctgttttatctccatggcaacctctcttaagattctggaacacaatatctccacatgtattccctccggctctccctccgctccataagaaatagctgttgcattagtaagttcctgaccatcttgaccataaagacagagaactttcagatagcatcatgtgccctctgcagcccatccccctctgcagcccatcccccctacccacaccagacgctaggcactgcatgggaacagaagatatagacaggaaatgcccaaggaaccattctctggataagaatctgcctaccgttgagttttcaatagaggagaaacagtaatgccctttgggtctggatctttctgtttgataccaggtaagcaaccttgtttcatttccattcactgatatacaaaactcatgaaatttatgaaaaatggatcaagggtcttccctcttccaaagttaactcaagaaatgtcactaaaacctaccccgagtttctgggattttgtatagaacagaacatcctggtagtgttgggcgcagtctgggtccacatctctgatattagcagtgggcagcagcaaggtatctaaagtcttcagagggttccctgcgtcgatggcttcattgatgtacccgagaactaccattcctgcagagagaggagcaagggttctaagtcacggcaccatacccacttctccgtcgtgctacgggctccaaggagctgaagatagatgcggtgctgctggaggtaagaggtgaatgcagagaatcaactgcctttctgtatgtgaatgatgtgcaatagatccccatcacaaatccactccagggggaaagtaatgcacacttaggaataatttaagaagcatgacacctataaaccaagaactaggaaacaactcagtggcaaccaaaacacaggggaaggcatctcgtggttgtagacgtaagacaatgttgtaaaggtagaggtactcctcaaggggggttgaggggaaccgggaggcaaggttgtggtaacaaagaaaaaaagaaatactcctcaaattgacaaattgataaattgacatacagttccggagaaactcctgcaaaacaaaacaaaacaaaaacaaaacaaaacaaaacaaacgctggagccttttcataaagcaaaatgtgataaatgacccccggatgcacagaaaacacagggagctcaaacaaccaatgcaaccctgaaagaaggaaatgccgggggactttccccatttcaaaagtcattacaaagctacagcaacagcgactagttctgcagagtgctggcatgaggaaagccatacagatgagccaaacagaactgggattccagaaattgtcccttttgcttatgctcaactgcttttccctgacaaggttgccaaaacaattcaatgggcagaaatagtctataaagactgttgctatagagcaactggtgctgggtcaaccatatgcccacctgtacgaacacacttggacctatatattaaaccctgcacacaaatgaacttaaaatagaaccaaggcctaaatgcaaagacccaaacgaaaagttagaaaactcttagaagaaaacatagggatattatcttagtgacttcaggctgagtaattagctttttgactatggtatcaaaagaaaaaaaaagaagaaaaaaagaaagaaaaaggaaaaacagtaagtacacaggactttgtcaaaatcagaccttctgtgcttaaaagttcgctatcagagaaaatgaaagggaaatttaaagactaaggcaaacttcagttatttatattcaatgcgactagtatactgtattcataaagagctcctataattcaacaattaaaggacagtgacatcaatttaaaataggtacagcatttaaatacacatttatttaatgatgatacacaaattcagtcagtataggatacacacacacacacacacacacacacacacacacatatatatatatatacacacacaatatattagtaattaggaaaatgcaagccaagccacagtctgatgatgtcattttgtaaccactgggactgctgtaacaaaaaggatcatccgtaataagtgttggtgttactggagagaaaaagaacctgtgtgcattattggtgaagatgggaaatggtgcacacactggagaacaatcccgcaggccctcaaatactaaacataaaacctccatgtgatctagccactctgcctaaaaacacccaactaaaaacccagcttcacatagaaccttgaaggtttgtagcagcataatttataatagctaaaaagcagagataacccaaatatataccaaataatgaatggataaacaaatgtatttttatagactagaaaattttttgacctagaaaggattataaatacatcaatacactatgaatgagtcctgaaaacatactaagctaaaaaaaaaacagacacaagaggccactatgcacttaaaacaaagtatacatatggggtgttttgcctttatttatgcctgtgtaccacatgtgtgcctggtgcctgtggaggctagaagtcaacactggagaatctggaccaagagttaaagagggccatcacctgccttgtgggtgagatactgggaatccaactggggtttatccagaagaggagccagtctactgacatatctctccagcctcacctctaaaaggcaaatattatggctatgtaatttatattttaacaaatgtatatttttagaagaggtatacttttacgtatcaacagcaagaggggagctattttaggctgattctaatttagacaataggtgacaggagcaatggataagacctagataaatttaatgcagatgttcagaaatgaaaatgcaaaaccagagagttttggacatgcgttctagtctttgtatttattttacttctctggctgctaaatggtcttaaaacagacagctcaaaatcaagcccttttctacaatattaagaaaaagtagactggataaccacacaactcggaactgttcggtggaattctgggtagtgatggacatgcttgctttggttttgtgcaatatggcagccattagccacatgtgactatggagcaattagcatgaggctatcacaaatgaagaacaaagtgtaagtgtgcttagctgtaattattgtgaatagtcacatatggttgggagacagacaggctccatagagataaacaagggcaaatttgtaggacagctttaaggcacaaatgcagataatgcatttcttacattgtttacctaagagtagacattattagccttgaaccctgattcaagtatgtaacaaaggggggccaagcagacgttgtttaattggtataatgtctaacatgttgatgggtcatagagcacagatgatataagggcttagaatcaaaagcagagaaatctatgcagcggagtctgaacattttatgtgccttagagaaaaaaaatggatctgtttgaagaaggtcccttcttcaaatattaccatattgtgaaaaaaataaaccagcacccagtaagagatacataacaccgggtagacatacatacatacatatacatacatgcactcatatatgtgcactaacagggcaggggctgactttctcctcctgtgtcagtgaacacatcctgatagagaaactaaacattaaggagcaggaagttagaagacacactgtaaaggccagacgttctcatcatgtgtgttatggttcatgaaaaatgaccacaaggcccttgacaaatacaataagccataaaaaccccgaacacctccaagtttaaaaaaaaatgtacctctattttggcatttaaatgaggctaacatttttctaatagttgactttacactgctctaggaatgaagagacttagccatgagggaaaagagttatcaaaaactcttaagagatcattccaatgggcctctctttccactgatggctgactaggccatcttctgatacatatgaagctagagacacaagctccgggggggtactggttagttcatattgttgttccacctatagggttacagaggctcattggtcgtgcaaactttgtatgcctcagtacaggggaacaccagggccaagaagtgggagtgggtgggtagggaagtggtggggggtagggtatgggggacttttgggatagcactggaaatgtaaatgaagaaaatacctaataaaaaattataggaatgtattgtcctacaccatgaggcccaaggacaaggtgcgagctggtttggtgtctgtaaaggcttagtctctactttcaaggtgactctttccttacctcatttttgtgtgaagaaacacacccattatcctcatattgtagaagagatgaaagagctaagaatcaatattgaggcctttattcccaattagggaggctgagttgttcctaaatgtgtacctttctgaaagtgtatattcaaaagcactatctctaaacaccatgaccttggggttaaagtttcaatacatgaatttttgataggatacaaatgtccaagccctagcaggtaagacataagatgaaagtgaaaaataagtgaaaatgaaagtgaaaacataagtggaagatgaaaaatctaggaggcagaaggcactaatcaacagagctggaccaagaatctgtcttccttcagagaagaggccaagaagtgtgcactactaggaaccaaggccataacctaattccctgccttcagacctatcaagcctccacacctctaggttttgttgaggacaagaaatagcttccccaaaaggctgttgcaattcagaagaggcaatgactacacaagagttctaaaacatctgcccatttgggtgtctacaccactgtcatctttctacaccagatcacatgcttagatgaggatgtcaggtagcttcaattaaaaaaaaaaaaaagagatcattccaggttaccagacttaaatgtgtttgaagtttataaaagcaagtctatttctttaacattcaaattaaatgagtttcaaatatgaagtgagccgtggaagtttgtactatccacaccctctcctacttattaaactggagtgttcgggagatgttagatcattcactagacatccccgtggtcaggttgctctaaataccttcaaacacccccatccaagaatgatcttagcataaccaagtgtgagaaagaagatgtccacatatccctagggctggtcac

SEQ ID NO: 442 - DNA, 2388 bp, Mus musculus
ctgtagaggcaaggacgagtccctgcccacacagtccaggctggcagagttctcagctttccacttgctgctcatacatggagctgaggggaatctacgctgtgactttgtatacttaacaacatcctgtaaccgggtctcaggacatcaagatgaaaatccttatcttggttgcagctgggctgctgtttctgccagtcactgtttgccaaagtggcataaatgtttcagacaactcagcaaagccaaccttaactattaagagttttaatgggggtccccaaaatacctttgaagaattcccactttctgacatagagggctggacaggagccaccacaactataaaagcggagtgtcccgaggacagtatttcaactctccacgtgaataatgctaccataggatacctgagaagttccttaagtacccaagtgatacctgccatctacatcctgctgtttgtggttggtgtaccagccaacatcgtgaccctgtggaaactctccttaaggaccaaatccatcagtctggtcatctttcacaccaacctggccatcgcagatctccttttctgtgtcacactgccatttaagatcgcctaccatctcaatggcaacaactgggtatttggcgaggtcatgtgccggatcaccacggtcgttttctacggcaacatgtactgcgctatcctgatcctcacctgcatgggcatcaaccgctacctggccacggctcaccctttcacataccagaagctgcccaaacgcagcttctccatgctcatgtgtggcatggtgtgggtcatggttttcttatacatgctgccctttgtcatcctgaagcaggagtaccacctcgtccactccgagatcaccacctgccacgatgtcgtcgacgcgtgcgagtccccatcatccttccgattctactacttcgtctccttagcattctttgggttcctcatcccgtttgtgatcatcatcttctgttacacgactctcatccacaaacttaaatcaaaggatcggatatggctgggctacatcaaggccgtcctcctcatccttgtgattttcacaatttgctttgcccccaccaacatcatactcgtaatccaccatgccaactactactaccacaataccgacagcttgtactttatgtatcttattgctctgtgcctggggagcctgaatagctgcctagatccattcctttactttgtcatgtcgaaagttgtagatcagcttaatccttagtcagcaatggcaagaccaccttagagaccaaggagagatatctgggaagacgtacatgcttggctgacttgtgcatggcaccatcagctcaatttttaattttaatttaattttatgtttttgagacagagcctcactgtgtagtcctggctggcctggctggttctctatttagaccaggttagccttgaactcacagagatctgcctgcttctgcctcccaagtgctgggttcaaccaggtctggcaagcgctccatttttcagctcctctgcaacagtgctttatacttccaatgtgaagtcatgaggattaaaagaatactttgtatttagagagtgtcttaattgtaagcaacattagcagtattccgatggcaatggatgcatttctacttgccttcctgattctccaagctatacatgtccccttccctcctgtgagcggtgtcggcagactgggaggttgtcactacccatggttctccctcctcctcaagcaggtatcctgtctttgttgtgtctctcactggggtcccatgttcatgccacctctgtccaaagatggcagccctcactgccagctgagcctcatttccacagattgggttaaccttccctgaacagctttctgaatacatcatgcaatacttcccttgaccctgcagtgctcctgaaatgacaagcccttgcatggctttcctggtggagctgtgcctgcgattccacacaccttcacaccgactgtcttccctcccatccctgtcgccccactgaaaccccttctagcatctttgctttagcctgtccagcttttcaagtcgttaaaggcccgttcttcccttattctcaaactagaagcatcattttctttatctggatttctaaagcactttcttatctttatggcacgtctagacaaacaagcctgctaagctcatttgcatatagatattacttccataaggaattaagttctctgtgtggtcagctctctgtccctgcaagtttcatacctgcagattcaaccaaccacagacccaaaacacttgaaaaaccttgtatgagctgaaaacgaacagagttctattttcattactccctaaataatactgataataaataat

SEQ ID NO: 443 - protein, 380 aa, Mus musculus
QHPVTGSQDIKMKILILVAAGLLFLPVTVCQSGINVSDNSAKPTLTIKSFNGGPQNTFEEFPLSDIEGWTGATTTIKAECPEDSISTLHVNNATIGYLRSSLSTQVIPAIYILLFVVGVPANIVTLWKLSLRTKSISLVIFHTNLAIADLLFCVTLPFKIAYHLNGNNWVFGEVMCRITTVVFYGNMYCAILILTCMGINRYLATAHPFTYQKLPKRSFSMLMCGMVWVMVFLYMLPFVILKQEYHLVHSEITTCHDVVDACESPSSFRFYYFVSLAFFGFLIPFVIIIFCYTTLIHKLKSKDRIWLGYIKAVLLILVIFTICFAPTNIILVIHHANYYYHNTDSLYFMYLIALCLGSLNSCLDPFLYFVMSKVVDQLNP

SEQ ID NO: 444 - DNA, 26354 bp, Homo sapiens
tttaaacttgattaaaaggaaagatacccatgtacatggatcagaatattgttaagatggcaagacttctcaaatttacctacagattcaatatgatctcagctgacaaaagtcttgctgccatttttttcttcccagaagaatgaatctaaagcacttcctaggtttctgaattggatacacagggatttgactatagtcacccaaatatgacatgtgggaaacgacatagcaagtttaggagacagaagatgaactaagttttttccaggatgaatttgaaattaggatagctcatttatacaattatgcaattctttcccaatgaaggatgagacaggggacattacagtaattcttgatgaagagatctgaatggaacagagagggactcaagggtgaccagatgccaagtaagagagtggtcatttcattaacagaaaattaactgaattttaaggtggaatctccaagttggaaatatatgaaacttgaaaacaagtacatagggtactactagacaaacatcaagttggactaaaaaagtttttttttttccttaagctctacttctaaggccacacactgtcacactagtttcttaaagatgaatagtatcctgtagatgacctacaatgtggtacaaataaatactagcctagaagttgacagccaccttgatccttgacactaggaaatagtaggtgcttaataaaaatctactaaaggaattctggaataaaaattaattgtccttgggtctaccattctttccctctgtctgaaatcttaccaatgtgaacttccaaatctgaaaaatgagtatcaaactgtgtagtctcaaagattctttccagagctaacaatgtaggctctgccattggattgagtaggcataactagttgcctagctttgccaactgatcccttgcaggctggctcattgtactttatttcatatattcagaattactctttacccctacttaatactgtgcaatcacaaaggattaggtgagagaaaatattagtgtaaacatctgtttatatcactggtctactcacacgaataaatgaatcaataagcatgacctgtataaggcacagactcctcaaatatgacattttcttaatgccatccatatattgccactgagctcatcatagctttctaaaactaaaaagaaacatctaaaacttttcctaatttccttagccatagatgacaaaaaattacagaaatgttaatttgaaagcaatacttgtcttaaaattaagaaaatataataccacagaaatgatatttaaaatacttagtttgtgctaaagtaacaaaccaacttacctctttcagatttgagctcttttgccttcacaagggcatcatagtatttgtcagcacactccgggattatgtcatttgcattagaagtggaagacttcaatacagacaaaatatcacttgatttttttccttccaaacactgattaacatcaaccaccagagtaacccctgggtaattgaaaaaaaagtttcttgttaatggttatcttccacttacttcaaggcatgcaaatatataattcaacgttttaggaatgcattagtatcaaacatttttaccctttgagaatatttaccacatatgcccaagacaatcacaaattcacagaccagtttagtccataagaagaattagataccatgggagtatggtttattaaaaacaatagtctttcctggttactcatatgtggtatgaaggcactaggttttgcttgctgtagtaatctatgaaatggggtgaatacacacgaacatagatatgtagctgtaacctagggcattagcatgtatttgagaactagttttacaaagacatttgtttactttaggataagcaaaatcctttttaagttacagaaatcctggtattctcttgtatagtgctaatatatttagcaagattgtcaaaaacaacctaaacaagtgttctagaaaggcagagctggtggatatgtgcaacggagtcctaaaacttaattctggaaccattttagacctaacaagcattttatcccattgcaaatttctacccctcctcattaacaaaacacattaaactcttggttgcctaaggaaagttaacttagtgaattatttcccactttaattccaggtaagaatgtccaatcgataggactagagttttcacaaccagtaaatgcactgagttagaaaagtagaaccagaaaaatgaaagaggccaagttaaaatacttcctacatgaaaaacatcttgaggaaaagagaagggagacacggatgctttctctttttttcttacacgtacatcaaactctacaaatattaaattacaattcgttgtcatcaaattatgttcacatgtgcatagcactatgagggttaaaggagaaagaaaaacagagattgactttcaacaacctggagtcaaagtcatgcaaatctggaggggcacatatagatgaagggagaacttctcaggcaaactccagtggttgttgaacaaaaggtatggcagcatgttcttatgctaacagaggttaatagaacatgggtagacatagccctttcctcttctccaggaaagctttgtaggatagagaaaatagagtactggcaattgagaagtttgtggtccaagaaaagtaataggaacaagaaaatgacaaaaattatcacatgaactacatgtgacagtgtcatctaacccaataaaatgcaattttccttaaaagatattacaaaagacacacatttcttggatatatcatcattgagtatcgatgagctggttcacaggtcaatttccagataactgaagctaattcctttatggatcaactctcatcttaatagaaccattttcgatgaaactctaaaacatgccttagagaaaatcctaacaggacagctgctattgctccttattttacccaaagtctatggtataaagtaggtgcttaatgtctgctgagagctgccagaagagtccttgtcattaaaattgtgctgtgctataatccggtgagtgttattttcaaggactgtggaggtgtttgggcttactggctcctgcacgaaatagccttaataactcctatgcttcttagtttttccttcttccttcactgtcagctgtcactttttactgacattggtgtgcctgcctatggcagcttaagcactttactgccttgtgacttgtggcttctgatgtgctctaagtcacaaccaaccaggaaaagaaactaccaagataatagagttttgcctaagaaaagaatcaacaggctcaaagtgtctatctgaggggtgctcagtgaataaagtagattaacttcaatgcgcttgctttgagatatctattttgattgctttttttcttaatctgtgagttgtagctaagttccagatagttgaagatatcagatagatgactttcactccagaaagtcaggtatgtttctgccaaggaacaaattaagaaacctccataaatctcctaagagatccaaaaaatgtttgctttacatcttaagccatataccagcaggctctcttaaggcacacattcacagtggaggtgatagaacccctaacggggcaaaaattagttcctgcagggagggagtgaaaaaaatctctttatgtataaagtacaggtctacatatggcacataaacaggtatacaaaatatctgtggcattaaaatttcatggtaaggagtgattagagaaaaaactgtctaaaaagattccttagggtgccataatgagaaaaaggtagagaaagactgctctaaggaatcaaaagtagaggcaaatctactttaagcaagcaagatactccagtgaatgtgaacactgggccaaaatgaaagggacttgagttactctgccctttcaaattttgctggtggtaacatatttgggccaacacattttcttttatcatattatctgagagtgtgtgtgatgcttatagtgtgtgaccagaatctatttcaagtcttcatgcaaataatgaagaatgtttttaatcaaattcttgttgaaagtcagaaaattctcataggtagcattaactttggaaaatcttttttgctgtttaagatatagtaaaagaaagtatatcagctctttaagggacaggacagagtgaaaagataggattatagatgtgcaatacagagtacaaaattatacatttgagaaatcctcttacttttatagtcaatagaaccatgagtctcaatgtgaaaaacagaatcaacttgacatttgcaggccaaatgtaagaacaatgaatataagaacattttaaaaaccttctaaattggtttgatttctaagagacaaatcataaccatcttaggctatttgaatgtctaaattacaatctactttctcaaaactgtctcttcagaccatggcttccttcagttttatatttaagttgaaatttcttatatacacacctccacttcattatttttttcttaaggcgtgctagaaaggaaagacttcaaagttccttagggaataaaagttcaggttagagaaatacacacatttttctaagctaaggagataaagcccagatgtttctcacagatgcttccgaggttgaaaagcccatctgtggagtaagacaaagtcatcttaagaaccttctctgacctgatacaacagaatagattctaattatgccatcagttggcaggttagtgaaatatatttttaggaatcttaatttatatatggagaatgttagtatagcaatttagaagctatttcagactatcatgtgaattttcatgttattcttccttaaaaacagagggttaaacaattttatcatttgaaccaatgtggggattctgccagttgctgattatgcctattccgattatgcactccagaagtggggaagtaaccacagaaagagtttagggacccactgtgagatggatctgagctaatattctattcatcacctgacctccacaaacccctacattgactggtggaccacagttatgttttgggcctcttggaattagtgtcagttcagagcaagtgtccactaattcccaaaagtctgattatgtactttctcctaagtacagtcaccctggtaaaaggccattggtccctttgggggaggggtggaagaaagactaacagtataaatttttggtagagtagctgagtttttcctcaaggggcctggccttcccttcatttgaggggttctgggtttgtaaactggccccattctgggatttgattgagggtccatgactgtttttatgattcaaggtagacttctgtttgcttgacccaaaactcatccagttgtacagattaagtaagaattgagtagactgccagtctatttcacttctagttgcaccatgatcagctagccaactccataggtctcctattggttctgtttctgcggaaaaccctggtaactataaaggccatggaaaggagaaaaaggcatttattaagtagaaatggtctagttctctaaaaatcaagagaaaaaaagaattttattcaattatacaatttgagagcttaaaaactattttttaccttctggattttgttcagcaacattgttacattttgttggagatagagtcaaatcactgacaatagggcaaccaactaatttcggtataattatgtgtccaagaactaaaacttggtaagaatccaaatctttcagaaattaaaaatcacatgacttcaggcacataaccaaatccaaaaaggcaagtttcaagagcaaaggaggtgagggcttacattgttttgctctgtcctcgtccacgttggcctcatcgacggcttgctgtatctcatccagccaaagcactttggaaacactctcagagtcctggggacaatgtcacagaataaaaagaaagaagagtgaatgatgaggaaacagaattaataactgcttttgaggagccatttaatcataattcccacaaattcttaatcagcaactatccagctctgccatatactgtacacactcctaatgaagcagaccccaaacccgaccacttcctccttcttccccaccactctttagtccagccccccatcatctcccaactggacagctgcatcagccccctagcagcttctgctgcatctaagcttgccctcaccacagtggccctctacagagggcccagaggatcccttcaaaatagatagctcagtgcaccactcctctacttaaagcttccccaaaggcttccccccggcagttagaaggaaacacagggtgccttctcagggatggcggggctccaacggcatggccctgcctactgcctctctggctgcacctcacacccgtttacttcccccttcctgttctagaccttcacacgagtctctttcagaccacaatactctaccctcactgtgtggctgttggctttttctcaccattcaggtctcaactcaaatgctacctactccaaaaagtcttcccgggctaccctagtcaaacactctctccctcaatcaattattgtggttcccaaactaagtgtcaaggtgtcccagggtaccatgggatatttttaatttgagagaaacacagggatcatcgatatttatcagacacagagacaaaaattaaaaacaaacaacaacatggtgattgtcctcaaggacctaacaatgtagtgtaagagacagatgtgtcaagacatatagctgggcatggtggcttacacctgtaatcccagcactttgagaggctgagggtggtggaccacttgaggtcaggagttcgagaccagcctggccaacatggtgaaacctcatctctactaaaaatacaaaaattagccaggagtggtggtgcatgcctgtagtcccagctacttgggaggaaggcgggaggattgcttgaacctggtgggtggaggttgcagtaagccaaggtcaggccactgaactccagccttgggacagagtgagactctgtctcacaaaaaaaaaaaaaaaaaaaaaagaaaagaaaaaaaaaaagaaaaacaattataatacaatgtgatcagggcaatatatactgcagacacatgatccagacataggtgagaaagggttaacctatggtaaaggtgtcaagttgcagggggagcaaagactaagtagttaaagatagctttagaaaggaagcaacagcagcaatgaaaatgtattgcattattcctattataggtaaatattcctatttaactttgggttgattctgatggtcctgctacaaaagcagccctgacagatattaagtggaacttccaggtagcaattgtgttttataaaatcttttctgagatggcaagtaaataattatcagcagagatattttcaggaaacatgtgacatttaacaaatgggaacattttacctatgtgtaggaataagtgtcgtgttctaaatcctaagtcaagactgtgatgaatgaaaggtaatggatctggcaccgactccgtcatttaaaacttaagatggatgggggcaggaaggagaggaaatagtcactggttcctctggcaggcttctaacactattttcctcagaggttaacgtgagataatgcatgtggaaagggctctgaaaatgagataaactatctgttatttcatcgtgcaacatctgggctaaaggagacctctggggaaatgttggtgcctgcttccacaatcacctctagctatgcggcagactacaagggaagcatcagcaagattttccatttctttcaagaatggatgggggaggctcaaacaggaagccgggtggaaaggggaagactagaggaggaaaaaaagagacagggaagcaggagctaatttttctctgtttacaagatctaagagaacccaacactccccagctataacctaaaaactaagctctatgagttcatttatgtgtctcagttcttttgaagggtatttgccttccttcataacttatcactgtagaagatacaccacacagatttctacccagatgagaaggcagtaacaatcttacttcaaagcttaaagtattagtcttataggccaaactgaagagagaaattacaaatcagatgaatttaagtcaacggtttaaattatgaaacattgaactaacgattactagagttaaatgtaaaaccaaaagtaaaagctgaatcttatcaatgtaaagtctgctttttcttatttattttatttttgagatggagtgttgctctgtcacccaggcttgctcactgcaacctccgcctctcagggtcaagctattctcctgcctcagcctcccaagtagctgggataacaggcgcccgccaccacgctcagctaatttttgcatttttagtagagatggggtttcaccatgttggtcaggctggtctcaaactcctgacctcaagtgatccccccacctcagccttacaaagtgctgggattacaggcatgagccactgtgcccagccaagtctgctttttcagttgttcaccagaagactgaaaataatagtatatttatgggacggccacacctccacttcagttaaacagccaggttcaacataagagttacaaatgaattaaatgaccagaaactaggccatgtgcaaatcaagtcataaattcctgaatttagataactcccagaaaagttctaatgaaacaaaaaaaacctttgtcaatattttaggttttatatttctgcaatataataacattctatctcagtttgtataaccatatattatgtagttgaagtattaaacactgacctttgtaaaaatcttggtctaatgtaatttaatcaagatgtgaaaggtttccgcagatcaatttcttcctagcatatccctagcctttaagtctcatgtgaaatttgtattttctgattcttgctgcattttgtaaagagcaggctgtgggatggtcaggcttcaagtttaagttttattaactacagaaaaatgtgttataatgcatttttttactgtatattaagtcatactctacagaatataacaattcataaaagcttatatgttgtacaacaatgtgaatgtatttaacattactgaactgtacacttaatactggttaagatagtaaattttatgttacgtatattttaccactattaaaaatatcttattgtagacttattcaccaacactcatggaataaagggagtcctcattttcatgatgtgctatgattttagtttaactgaacagcgttgtttgggaggttcctccagttatctgaccctaagggttattgaatggctcaaaacacatcaagataaggcaaaaaaaaaaaaaaaaagcctgaacaaacgccatcctcacccggcgaagaaaaaccaccaccactcaaaagccaggttctggccaggcactgacgacaaactgaaatcaatattacactgatagaaaattttcaaagtgattcactgctcaatttgaatttcttaaaagtttgttttccatgattaatttataattatgtaaagtgtttaaggattaagatttgaaatagctgggaagataaaggaaaggataatttattaagtagaaattacactctggaactgcatttttaaaacggataagaaatgaaatgtgggacagattcaaaacttactgctgttcaacatctgtttttggcttagttctgtaaaggcctgtgtaatttctgccattctttaaaagcaaatctactaggggagaattacagcacctattcagaatagattgttgggggtgggtaagagttaaatgcctttctccagggataacgtaacacgttcagaggcttggcctgagtcatgcttactgaagcatcgagtggattacatcctttccctgcggaggaccagggcaagtttcctgcctgcacggcacaggagagcaaacttctacagacagaccaaggcttccatttgctgctgacacatggaactgaggtgaaattgtgctccatgattttacagatttcataacgtttaagagacgggactcaggtcatcaaaatgaaagccctcatctttgcagctgctggcctcctgcttctgttgcccactttttgtcagagtggtaagcaattttctcagggggtaggatggggatgtgggtttctgttacaaattaagagtcaactgaacctaggtttctttgcatctcacacaaactgtaaaccccaaaggcagtttgatctttattattaaaaggtagaatcatggaaatgaacatctatagttcattcactctattcaaacctggtcatagactaagtgttccctcctgatgtttaaaaatgtgtggcatattcaagattttagatgtctacaattaagtcagggagcaattttgaaagtcgtttttgtgtttgtaagaatttctcttctggttaagcaaagatggcactttttctagggattaaaatatatatcctgtgtttaaacctcttggtgagacataaatgggagaaacaagaatactgccagaaagagaaagtcatctgctttcaatagctggcaatgctaataagtcagtatttccgaaatgaatgaccttttttgactttaagtggggagttctccctaccctcatatatgattttttaattttaaaaataaggtctcccaaatactattattcaactttgaatgtactttccactttacccatcacaatgttagcctgaaacctcctgctttttccaaaaataacaaatttgggataggtctgtacctgttactctttgttaggtcacacactccagtcaacattgttaggagtgggagaggcaaagactggacatagcaagggaaacaaaaacagaaatcaatgctttctaaaggaacattgcttaaattcacatttggaatccctgagcggttgcagagagctctaagagaatctgtggtgattagcagtaagcacatgtgggatttatgaatataataagtgcacgctctttctgggagtagatgggccaatatgttgagaagcagaattgcaaaagaagcaaggttttcgggggtggttccttcaagacgctaatagggtttgatggaggtgaaaacgggggcctctgaaggaaacaaagaggcagtgaatttgctttcttccatggggtgggggagaaatgtgaaggaagaatgaagcaagcttgtccaacctgccttatttcgttgtggttttgttttgttttaggcttttagcagcctgaagccatggtttttagtttctgtctctagaggtaaatggaaaagagggatgaggaaggggctttactggctcaactagaaacagaaactatgaatccatgactgtattctctcccttggacacccctgagaggccggagttcattctctttggattagttcttcaaggccttttcccggatagaaaaacatttccgaaatattatgcccaatggaagcctctataaagaattaaaatacaataaaaaaatttaacaatgagtacaattcataaggaaaaccaggctctgaggaataaaagccttatttaagtggacccagatctggcattctcacggaaaatggaatcaaatcaacttttccacaaaacacaggcactgtttggcatgtctggaggcatgatgtcttgctaaatcccagaaactttctgaaaacggacaaacacttggttttaacagctttttaaaatcaggctaataacttgtacggcatgctcttcaggcaccattctctaactttgtgcctatctttaaaggcacttctctttgggtgaagtcagatgcaagaacttttccaaaatgcaaaagtgagcagaagggtttgtgtgtcacacaacacagcttctaagatcacctctaaatacaggcatagaagaatgctgcctcccaaatttttctttccttttctttaatctaccttttcttaaatgatacctgatcacctccatacccctcagttactaggacacacctcctctattttacaccgtgaattcagcttgtgcaatctcaggtttacgtggagggtttccatttcacccgggagctaactgctagagattaaagcaggaagagaaactggctctgaatgaaacataggttactaaacactaacttcaagtattcaatatggaggaattttgaggccatgggacaagacataatggcgcagtactggcattttaaatcgataagaatgaggtttatatttggcatagaagtctatcttaaaggtaacattagaaatctgggagaatctattttctatacatgtgaaagggttacaaaaagttatataataataaatgttcaggtttgagctttaagattttgtttttgaaattgcaggaattaggattattaacatcaacatgccaagtaacaccaaatattgatagcatatagttgatgtgtttctatcttttaaagaattcatttccaacttcttaggtcctcataccgatttcatcttccgatttttcctcctttgtttcctcttcccttaaaatctgtcattacccctaaagtccacctttggattctttcttctcataactccccctaggccatctcaaccactcccattaaattaaacgagagcctccatgcagactacaataaatcatgcctctaatttgggctcctggaattttggacccacatccagtcttctaaccagttgctggacattttacacactaatattccaccagcaactcatcctcagtcagactaaaaacagattgtagcttctccccgatcctgtctccttgtctccctccaactcagttaatggcatcctctccctccaagtcatctagagtagaaacctgagtcattattgcttcctgcctctccctcactgcaccccaaagccaatcagaaccaagtccctttaagccgccatcagagtctcacgtgttcgcctctgcctttccataaccactgttctagctcagtaactcactgagctatgaatgatgacagtagcctccaaatcaggtccccttgcctgtaatttcttacctttccaatctgttctctacactattacctaagtcatcttaaaaacaagtcaaaataacggctatattcgtttcctactgctgctatatcaaatcattacaaactgagtggcttaaaataacagattatatttctggagatcagacgtcttaaaatcaaggctgttggtggggttgtgttcattctggaggctctaggagagaatcggctatcttgcttttttcagcttctagaatctgcctgcattccttgggttatgaccctttcttccatcttcaaagccagcagcatagcatcttcaaatctctgactttgacaaccctcttaccttccccttatatggactgttatgattatatttgacccacccaggcaatccaggaaaatctcattttaagatccttaactggccgggcgcggtggctcacgcctgtaatcccagcactttgggtggccgaggcgggcagatcacgaggtcaggagatcgagaccatcctggctaacatggcgaaaccctgtctctactaaaaaaatacaaaaaattagccaggcctggtggcgggcgcttgtagtcccagctactggggaggctgaggcaggagaatggcgtgaacccgggaggcggaggttgcagtgagctgagatcgtgccactgcactccagcctgggcgacagagtgagactgtctcaaaaaaaaaaaaaaaaaaaaaggaagatccttaactaagttagatctgcaaaatcccttttgctaggtaaaggaatatacttgtaggttccaggaattagcaggtagaatctttgcggggggctactattctgcctaacacaatggtcattcctctgttcaaaattgtgtgtgcaatcccatcatctgtgaatagacatatgatttcttaggacagtttagaggcccttcaggaatttagctgtcacccactctttcaatttcctttctcagctgcactttattcgcataagacaatgcatttttatgcatcttctccacgagtagcattacttacagatagaaatggattttatttaaaactttacaccactgacacatcaatgtacaataaaaatttgctaaatcaacttatctggcattcccagatcccatgatagcccacactatgcttctgtccattcatcaccagcagaatcttactcattaaattccatctttttaggaaccttgctagtctttgctcaagttcatcttttccttgacattttgctcaaacatctgaatctattaagtattgtctgaatgcctgtatagtttgtagtcaacatgcctataatgttctgatgggctgtttttgtttcttctaatagtattataaacactttacatacaaggactgatcatttagtttttgtttccgcacaagatagtgttgttctggggcatatgatatgtattaaatatatgcttgttgactgcctaatctacaataactttttaaaataaaaatgatcttaaattctacaatcacagaaattatttacaaataattaaacacactttcttttctcttgaactatacatttatgttaatactttctttcaattacaggcatggaaaatgatacaaacaacttggcaaagccaaccttacccattaagacctttcgtggagctcccccaaattcttttgaagagttccccttttctgccttggaaggctggacaggagccacgattactgtaaaaattaagtgccctgaagaaagtgcttcacatctccatgtgaaaaatgctaccatggggtacctgaccagctccttaagtactaaactgatacctgccatctacctcctggtgtttgtagttggtgtcccggccaatgctgtgaccctgtggatgcttttcttcaggaccagatccatctgtaccactgtattctacaccaacctggccattgcagattttcttttttgtgttacattgccctttaagatagcttatcatctcaatgggaacaactgggtatttggagaggtcctgtgccgggccaccacagtcatcttctatggcaacatgtactgctccattctgctccttgcctgcatcagcatcaaccgctacctggccatcgtccatcctttcacctaccggggcctgcccaagcacacctatgccttggtaacatgtggactggtgtgggcaacagttttcttatatatgctgccatttttcatactgaagcaggaatattatcttgttcagccagacatcaccacctgccatgatgttcacaacacttgcgagtcctcatctcccttccaactctattacttcatctccttggcattctttggattcttaattccatttgtgcttatcatctactgctatgcagccatcatccggacacttaatgcatacgatcatagatggttgtggtatgttaaggcgagtctcctcatccttgtgatttttaccatttgctttgctccaagcaatattattcttattattcaccatgctaactactactacaacaacactgatggcttatattttatatatctcatagctttgtgcctgggtagtcttaatagttgcttagatccattcctttattttctcatgtcaaaaaccagaaatcactccactgcttaccttacaaaatagtgaaatgatcttagagaacaaggacagccatcacagagaacgtctgttttcaagaacaacataagcatagtgcaaggagctccatttccgagctcctaagaaatatgcttcaaaggtcaaacattacaaaagcattagtagtttgtttgtttgtttttgagactgagtctcactttatcacccagactggcgtgcagtggcactatcttggctcattgcaacctctgcctcccaggtcagcctcccaagtagctgggattacaccaccatgcccagctactaaaaatacttgtatttttagtagagacggggtttcaccatgttgaccaggctggtcttgaactcctgacctcaagtgatcttccggcctcagcctcccaaagtgctggattacaggcgtgagccactgagccagccagcattagtaatttttaaaaacactttatcagtattttaaaaatgttaatgcaggagaaaagatatcacaactctatggaaaatgacatttccatttgccttattgctacttcaagctctttaaatcaccatcttccctatttctgtgagtggtattgccatccttgacatttgacatcattttttattctttggtctcttttgactctcatgctggtggctgcctcatcaactgattctatctttgtagggtccctcaccagggtcttttatctagtttcacctttgccttcttttttcctttttttaatagagacagtgtctcgcttcgtcacctggctgaagtgcagtagcctgatcatagctcacttcagcctccaactcctgggctcaagcaatcctgctgtctcagcctcccaagtaactaagactacaggcatgcaccaccatacccaactaattttattttttattttttgcagagatggagtctcactgttgcccaggctggtcttgaactcctggtctcgagtgatcttcctatctcagcctcccaaagtgctgggactacaggcatgagccactacgcccaggccacctctaccttctaaccattctctccactgccagcctaccctccaccacttcacaagtcctgccagattaatcttccttagatatcagttaggatacatcactaaaacatttccactaactccactgtttctataataaatcataaatctttagcctggcattcaaggctaacttgctaatcacacttcccattaaaccttgcttatgatataggcaccaaccaaacctcttgctctgctatatctccactctgcctcagactgaaaagctagtcctaacgtctttgccttaattctgttcattttttcaagtccttgaaggaccattcttccctgattctcaggctagaagtgtcacttttcttatctgtacttccaaagcactttcgtatatttttattatggcatttatatatagttcatttatatttaaattttaattccatgaacaatcaagtaccaagtataatggagaaggtgctcatcctctgccttccttgagcttctgggtgatgccaggcccaagtctttgtggcacccagctccatgctttgaatactatgtggctgaatgaatttttaaaatctcaaagcagttaaacagcaggaaagcccattaacttcgtactgaaaaagcaacatactgtgatgatacgggatgacatcatttcaggttgggcatacaaaaaagtaaggaagctaaactaagactatactcaccaggccatttagaagttttaaataatgcctccactattttttttcttagacatagcttttaatggggaaatggaattttgttattaatacccattatattcctgtaagtaaatgactatttttcccttaactcagtgattagacaggaaggaagacattagtgattagacaggagggaagatattagtgattagacagcagggaagatattagtggtaaagagtgaatgatagtagtgaatataaatggggctgaggaaactttaagcataaaagattcctgagatgactttacaagtctgtacgaatctgccttgactgtatatttcatactgcccaacaaaacaataaaaaacaattttaaatgcatatttttaaatgtacacagttttctatttcatcagacttaagtaaaaagcttccacatgaagaccctttataatatgtgtgtggttatgcaaagagcaaaactcaggtaaacactaaagtgagaatgaaaaacaaacctaaagtaagtttcaagaagatagaaacttaaatggaaggagctgacttctgaaaactaagtcatcaattacaacacagttttacctaaggaaaaaatacagcaatattcgttaaaagcacacagtttttatggtatatacaaggagcaaaacagaactttttggtggagtataactcatatgttcacaagcaaaaccttcaattgtaaaatagcacacaccacccagtgaacagacatagaaaaagtgttaaagtcaacatgaccattactcaagtctctttccaagaggcaaaaggaattttgtagctacacaaggttatacttgacatactgctaaagaggacccagaatcttcaccaacttccattactgtcctccacctttgacaaaactgggcagccattctatgaagatgttacccattgtgacctttaatggctgtagcctttggcacagttttactttatactgataataccagcaatataattttctaatattattttccaaggccagaccttgggaagacaaggcacagaaataccatcataaacacacaactggaaacttctaggaatcaaaatagtagaggatgctgaatgtggtggcttgtgcctacaatcccagctacttgagaggctgaggtgggaggatcacttgagcccaggagtttgagaccagcctgggcaacacagcaagatcctgtctccaaaaaaaaaaaaaaaaaaaaaaaaaaagcagaggggaaaaacaaagacattaaagacattgccaaacaacagaattaggatttttccaagaaaaaagaacaggctgagaaaagaaagtttcaaagtcaatgaacagagaaagaaaactgcttaaaaacaggaatttaaccaaatatgattcatcgcttggacctgcagtattttaaatctgtttaaatctgttagtaattgccagtatatttcaaacctctaactatagtctaacagtggtttaacgcctgaactagaacccagatccctaggctccatatcaatgctctaatcacaccatgaaagctactgtttccacacctagaaaggatgcctgacacagagctggcatggtgtgggcactcaggggcttctttcaaaggacgcctgtggagttccatctcaatctagattggaatgctcagtctagaagggacctatactgcctgcctatgaaaggccttgggtttgtggagtcaggctcacctcaaagacaaacccccatgtggctgtgggcagacagggacccaggtctgtctctatttgtcctcagaagatcctgactttggtgtgtaaattcagcagactctacgtctagtaagaaccttgaagccgggtgcggtggctcatgcctgtaatcccagcactttgggaggccgaggcaggtggataacctgaggtcaggagttcaagaccagcctggaaaacatggtgaaacctcgtctctacaaaatacaaaaattagccgggcttgatggcaggtgcctgtagtccctgctactcgggaggctgaggcaggagaatcggttgaacctgggaggtggaggtttcagtgagctgatatggcgccacggcactccagcctgggtaactgagcgagactccatctcacaaaaaaaagaaccttaagatactgacatcactcaccccttacttgggaggcaaccataggtgcccacaataatactagctacattatttaagccctttttttggtgccaggctccatgctaaatgctatagctacacaaacacgtgcacatattcttcattaatagtacctatagttatatattgatatatatttacttattgtatattctcattgaaccctcaccataatcctataagacaggtactattattccaattttatacatgcaaaaataagcatatagagatttgatgatttgaccaagatcacataactaatttgtggcaaagccaggatttaaatgatgtctaccttcaaagcaaataactttgtcttccaatgcttgtaagtttaccatgtgccatggccacagccacctcagtggaaacatcaaggtgaaggcccactctcctgcccctgggatgtatggactccaggcttgtgtatgagccctcactctcccactcactggctgtaccttggccaggcattcgccctgagcctcaggctcattcacatcagatgagacagcacccattccacaggtggtatgaggcttaaatgagaaagactgatgtgagtgggggcgcttggcaaagtgaggagggtcaggcaatgccactgccgttcctgttggaaggctggcagtgcagagggcgccaccatgggggatacatttctccaccttcaatgaggcagtggagtagtgaggataggatttacattggtttttaaaagtttagaaacagtaattatttaatacacacactccttaaaaaatttaaaaatccaagcagtacaaaaacggagtgaagaataaatctcccatccatactagccttctagttcaccttccagaaggtatcctccctccagaaatattttagacacatgtaagagtgtgtgcgcccctcccccaacacatacacaagcctatctatattccatctatgtgcacatcacagcatgattttttttttgcttaacaacatttaggttgtttttcatgttttgtgattgcaaacaaagctgcaataaacatcttttcccatctgccttaatacataattataatgtttccgaatcagacagacctgagctgcatgtagtctcaggactaattatcttttagatagcttgattttgttttattttattttatgtatttattttcgagacagagccttgctctgtcacccaggtgggggtgcaatggtgcgatctcagctcgctgcaacctctacctctcggttcaagagattcttgtccctcaacctcccaagtagctgggattataggtgtgagccaccacacctggctaattttttattttttatttttatcttttagcagagatggggtttcaccatgtttgccaggctggtctcgaactcctggcctcaagtgatccacctgccttggcctcccgaaatgctgggattacaggtgtgagctactgtgcccggtcacattttagatagctttcaacaagttacttaatcttggtttcattatgtgtaagatggcaataatgatggcaaaatggttcagaaggctgttatgaattgttgtgatgattaaatgagatgatacacatgagtatctaatatcatgcctgacaaatagtaggttctcaataaatgtttgcattaaccaaggatgtttttcctgtttcgaatgaggcagttcctaggttctaaagacctagacagaggagatgaccgccctttcagttgggtttgcacctgaagacatggcagccataagtagctaggtcccaggtggcatcactcccactcttaggtgacagatcatatcagcctcaccactcagcccattggccttatcacagaggccagtctttgtggggctccttataatagcggtacaagctctgtactcagaaaaagccactagtcttcgagaggacagcttctgctctacctccacaccaacttctcttaggattctagtccccgacaatctcaaacatccgtgaatcaatctgtgtatctctcattttgacactttgcacacccttatctttactattacttgactgttccatgtgacaatgtccactgcctcaatcagtttctaagcattttgaagataaggtcagagaacattcaaatggtattatgtgtccctctgtatccccatcttctctaccagaagctatggactgaagtgtgcacatagtatctactaaggaaatagtcaatgaattgaactctgaacaagaactcacctacaactgagtttttagtcaaagaattaaagcaataaatagctctggagctggtttccccccaatgtttgttaccaggaaaataacagctctattatttccattctgattcatgggtaattgttgggacaagaagctcatgagatttaacgtaaatgggtcaaatcctcctccttctctccctctgccacccagcctgtaaaatttaaaagaaacagatatactaaaacttactccgagtttctgtgatttagcatggtataaaacatcctggtagtgctgggcatgggctgggtccacatcactaatattcgcagtaggtaggagcaaagtttctaaagtcctcaaaggattcccttcatcaatagcttcattgatgtaccctacagctacaactcctagaaaatgaagaagtagttttccttttaagtcacagtacattataacttctttagtatcaccgattgcaaaaggctaattaactagtacagcaaggctataggatgcaagatgcaagcacaaaaccaattatgtgtctatacgctcataataagcaatctgaaaataaaattaagaacacattcaattcataagactgcaactacaaatacattataattataaataaatatttagacataatttaatgaaagaaacataagacatgtacactgaaaactatacaacaccatgggaaaaaacttaaagacaaataaatgaaaagagccaatgttcatgaattggaagatttagtattgttaagatggaaatacttcttaaattgacctacagattcaatgcaacttctatcaaggtcccagctgctggtttttatttttattttttttttttgagagattcttgctctgtcccccaggctggagtgctgtggcatgatcttggctcactgccacctccgcctcctgtgttcaagtgattcttgtgcctcagcctcctgagtagctctctacattctgaccaacacttgttattgtctttttcattacagccatcctagtgggtgtgaagtggtatcatactgtggtttggatttgtatttttctagtgactaatgattttgagcatcttttcatgtgtttattttccctttgtacatcatctttaaagaaatgaagtgtctattcaagtcccagctacttgggaggctgaggtaggagaatcacttgaatccaggaggcagaggttgcagtgagccaagattgcaccactgcactctagcctgggtgacagagtaagactctgttccccccaccaaaaaaaaaaaaaaaaaaaaaaaaaaaaatatatatatatatatatatatatatatatatatatatagagagagagagagagagagagagagaaagagagaacaagactgactatagggttcacaaatgaaaagcacagaagtcaaactatgaaacctgcttttacaattctaatgaaacggatctatctggaggttacttctcaataccttattattaaaaaataaactatcatccattcataaaaaaatgcatttagatagacatgcacacacagacacacacacacacacacacacacatatattatataaaacacacatatacacacactgccaaggagcttttgcttcctaggttagtactgatggataagaactgttaaagaaactagatattaatgaacaataagcttagaatataagcatttttaaggtcaaacttcatatttctcattttttccattagatttaatctaaaatgatcacccgtcacttcacaactgtgatatgccatgaaatagaatgagtacttctcatttttaaaaaaagtatctccagcttgacattcaagtaaagataaaatatttagctaaatatttcttgaatagatgagcccataaccaccacttcgttaagaatgaaaagatttacctgtaagaagaatgaaaccatctaaaactcctagaaatcattccagactataatacttaaatatgtttgaagaaaaagcagaagtatttctctaatgtgcaggttatattatctgtaaacattgacagaactctggaaagtctaagtattatctatatacaaggtactgtcgttttaccctataggatttataaactggagtgcatggaatatttagtgccattctctggtcaccccccttgggtaagctgttctaaatacctttaaaacaccccatccaaaaatggtcttaacagaaccaaggccgatcacctggaagtgagtgcatttcagctgacttgattgaaatcacctgctaaagttgctgtctgctgcgtttctaagaatacaagctgctgaggtcatagtgaatgacatcataggagctgaaagattacccagaagccctctgggaacatatgcatcacttcctctgtttataaataaaagggaaatcctatttgaagaaagattgctgagcttcactcagcccacggtccacttctttacatcaacacatgttactataacattctagtccacaagagagtgggcgttcttttagagttcatgtatttgaggcagcagatgaggtaacctacacagaattgtacctaccaaatttaaagagcaaaaactcaaagaagaaaacttcctgatgtaggctataaggttaaaataatgctcctttatggttctactgggaaaagtaaacttttcagtaagaaatcaacagagcctgaggaaatgcattcagcagctagcttctccattaaattcaccttctatatttctcattttccattagctgcttacctcacccacatcacaactcagatatggaattagatctcagagcatgtggcaagaataaggtggggaggcaagagtaatgcaccttcaaaacgtccatgaaaaattctcagctcctcagatgacttaattactatactgagcaattcctgcctggttacaatggtgtattttagaaattttagattttgaagaattgcctaaacatgatatcaaactcaatacttcaggaactcattctgacaaaagaaaaaaataaaaccaagacacagataaattaaatactctgtattaaagttcccaaattccagaaaggaaatattagtgtctgaaataccttttctggttatggtatatgtcctttatgacaagatacttaacagaagtgttatagtggctgtgtgaaatgtcctagggagaataacttagtagtgctgttaccttgatagataaaagccacagcaatcaaatgagatttttgcttaaaaataatatctacttacaaaagactattttctaagttatgcaaatgttacttgctttttttccccccagtaaccaactaaagcaaaggctgtacttgatagccaagaacaaaactggcattttccccctgttaatcaatgtcaaccctacaatctttcagcactgagaactaacataccttcatttgtgtaagcagcacatacagaaataaccaaagcagaactgaagcatgggtattgccaagaattggggaaaaagttagaaagcaaagatgggacgtgagtctttgttttgcctaccaaaagaaaggagtcctacttcttgggtggcagttgctgtagcaaccaaaccactgctaaaggagattcagagcattaagacggaggttgtggagaagggcagaagcctgggggactgagctctgtagcgggacactaggagcagtggtggtcccccaacccccacctgatgatgttgaacatctgctcaaattagagcttgcgtcttgactaacgtctggcaagaaccataaactcccaagccaagtatcagaaaagagctaagtggggtgtgagcaagccgtctcaccgcagagactttaaatgcttcactgaaaggaaatgcagaggcaacagggaagctgtgccgtctcgaaagaaatttagatttgtgcacaacttgaaaaggacaaaatgaaagtgtccagggatcagtgtaacagtggtacatccatggtaccgtatatagggtagcacacctggatcctgttttatagtaggggcttaaagtgagaatatgtttaaaaaacaagaaccaaaactggccttgacttttggcccagcactcacaggaaacagcaaagaaaaagaagaaaactttgcaaatgcaattaattaacaaagtcatatgttttatttcaagagtgatcttagtattcctaagttaaatacagcattagaagaccagacctaagaccttacccaaacacactaaaataaaacataataaactgtgagagaagtatctgcccactctatccgcgagcttggagcaaatgagttagaaaagtcaaagctggaaggtggaggagagatcaatgattttagcaacactcacccactgttgctgacaa

SEQ ID NO: 445 - DNA, 1830 bp, Homo sapiens
cctgcctgcacggcacaggagagcaaacttctacagacagaccaaggcttccatttgctgctgacacatggaactgaggtgaaattgtgctccatgattttacagatttcataacgtttaagagacgggactcaggtcatcaaaatgaaagccctcatctttgcagctgctggcctcctgcttctgttgcccactttttgtcagagtggcatggaaaatgatacaaacaacttggcaaagccaaccttacccattaagacctttcgtggagctcccccaaattcttttgaagagttccccttttctgccttggaaggctggacaggagccacgattactgtaaaaattaagtgccctgaagaaagtgcttcacatctccatgtgaaaaatgctaccatggggtacctgaccagctccttaagtactaaactgatacctgccatctacctcctggtgtttgtagttggtgtcccggccaatgctgtgaccctgtggatgcttttcttcaggaccagatccatctgtaccactgtattctacaccaacctggccattgcagattttcttttttgtgttacattgccctttaagatagcttatcatctcaatgggaacaactgggtatttggagaggtcctgtgccgggccaccacagtcatcttctatggcaacatgtactgctccattctgctccttgcctgcatcagcatcaaccgctacctggccatcgtccatcctttcacctaccggggcctgcccaagcacacctatgccttggtaacatgtggactggtgtgggcaacagttttcttatatatgctgccatttttcatactgaagcaggaatattatcttgttcagccagacatcaccacctgccatgatgttcacaacacttgcgagtcctcatctcccttccaactctattacttcatctccttggcattctttggattcttaattccatttgtgcttatcatctactgctatgcagccatcatccggacacttaatgcatacgatcatagatggttgtggtatgttaaggcgagtctcctcatccttgtgatttttaccatttgctttgctccaagcaatattattcttattattcaccatgctaactactactacaacaacactgatggcttatattttatatatctcatagctttgtgcctgggtagtcttaatagttgcttagatccattcctttattttctcatgtcaaaaaccagaaatcactccactgcttaccttacaaaatagtgaaatgatcttagagaacaaggacagccatcacagagaacgtctgttttcaagaacaacataagcatagtgcaaggagctccatttccgagctcctaagaaatatgcttcaaaggtcaaacattacaaaagcattagtagtttgtttgtttgtttttgagactgagtctcactttatcacccagactggcgtgcagtggcactatcttggctcattgcaacctctgcctcccaggtcagcctcccaagtagctgggattacaccaccatgcccagctactaaaaatacttgtatttttagtagagacggggtttcaccatgttgaccaggctggtcttgaactcctgacctcaagtgatcttccggcctcagcctcccaaagtgctggattacaggcgtgagccactgagccagccagcattagtaatttttaaaaacactttatcagtattttaaaaatgttaatgcaggagaaaagatatcacaactctatggaaaatgacatttccatttgccttattgctacttcaagctctttaaatcaccatcttccctatttc

SEQ ID NO: 446 - protein, 370 aa, Homo sapiens
MKALIFAAAGLLLLLPTFCQSGMENDTNNLAKPTLPIKTFRGAPPNSFEEFPFSALEGWTGATITVKIKCPEESASHLHVKNATMGYLTSSLSTKLIPAIYLLVFVVGVPANAVTLWMLFFRTRSICTTVFYTNLAIADFLFCVTLPFKIAYHLNGNNWVFGEVLCRATTVIFYGNMYCSILLLACISINRYLAIVHPFYGLPKHTYALVTCGLVWATVFLYMLPFFILKQEYYLVQPDITTCHDVHNTCESSSPFQLYYFISLAFFGFLIPFVLIIYCYAAIIRTLNAYDHRWLWYVKASLLILVIFTICFAPSNIILIIHHANYYYNNTDGFIYLIALCLGSLNSCLDPFLYFLMSKTRNHSTAYLTK

SEQ ID NO: 447 - DNA, 28516 bp, Mus musculus
aaagtattattattttctgtaaaattccatacaaagtcctgatggtagaaatgctgccacacaaaaggcttgagtcgagaggctgaggcctgtaatcacagctactcagaatgctgggcagcagaattccaagatgaatgaaggcaagtcctctaccctaagtgacacttttagtcccaaactatagactgatttcttaatttttttaaatttagggtttcattgtgtagctttggctggtcagtaacttattatacagcctgggtaggcaacaaattcacagagatctgcctgcctctgcctcctgattcaaagaatgtgccacaatgcctagtactacagaatattttcttaaagatgcatttttattttttatttatttatttatttattatttggttttttgagacagggtttctctgtgtagcactggctgtcctggaactcactctgtagaccaggctggccttgaactcagaaatcctcctgcctctgcctcccgagtgctgggattaaaggtgtgcgccaccacggctggctaagatgcatttttaaaaataattttatttatgcatctgtgtgtatgcatgtgagtgtggatactcacaaagacccttagaggtcactggatctcctggagttacaggccttggtgagctactgtatgtgggtgatgagaagcaaaattaggccctctgaataagcagcaactgcctttaacagctgggctgtctttccagcacctgtcactgccccaatccctgttgctgctcccccaacacagatatacagtattaataaggcttctaacaaaatacatctaaataagcaatatttgttgagagcggttaagtgcttatctgcagcacagacagctttaatataaaactaatttaaaatagtaaattataaaccaagagaccaggtgatatgaaaatatactcaatcaagttccgaggagttgagaagcagctgtggcaaacagtaactctacaaactgtaatgtgactaaaagctgttaccacacctcctgagcccaggagagcaggtgccttgccttctcctctaaccaatcctaaaaactgttatctacaggccaacatgttcttgttcaaaaccaaagcatcacattttcataaaaattcgaaattacaggataaatataatagctccaagaatgttttaagaaattagggattctaagattcaacaaatctgcttatcaaaacatttttccatgacaattctcattgccccatgacaactaaatgacagcaatgtgtttcagaaaaccaaacaacccaaattgttctgaaaaactgccctgcttcatccctactgaagcctgggagaggggacgcagcaggaagacaggtgtggctcccagctgagaactgccctgctacaataaacttcagggtcacaaagtcatttggatcccattcttcctcaacctcactcataatgctcaggattttaatatatactggtaaatttcagggtaaattttagatatatcttccaacgtaaaagcctaccaaaactcccagtacattttcagctctatcagtccatcacacagcttagttacatggatgaaacagttgcttctggtctgtcttaaagtgtgaaatctaaagatggccaaagaagcaaatatagtatcattttatcagaacactgtaactcacatcaaatactattccaagtcttggaacaatttgttatctggcatggaggaaaccaaccatgatgaatgcctgacactggggcattttctgggcaaattagatcagagggttaccctacctagcaaaacaaatatttgttacaaaaaagacaaatattatcccctggattccatgacttcaacaatgagaaactgatatggcttttaaacaccaaaaactaagttttcctgtctagttttatcttcatctccttgccaagaatcagcagtgctctcatttttaccactctatagtctgaaattctccatattccgatgtttatacggaacctgcaatcagatgataccacaatttataatcctggccaggtctcatttgagctgtgggctcatcttattccactaagaaatatttttacttcaaaagtattcaatagtaaagtagcccaaactgtcaaaaagtcaggcagtgctttctcccataaaaactgccactttacaagattttttcatcttaattagtggtactcctgtttacttagtgtctgaaacctaaacctattctgtcagaaatttctccctttccccttgtacagatgttaaattcaagaccaattcattcctctgcccatgtatacacacacaattcttgaatccatttacatcttgtctctatgtcatcagtgctttgtttagcaactgtttatagcctactaactgtgctgtaatagcaatactctcggaactaggaacattggagcaaacaaacaaaggttcttcagaaatatatataaccactgccatgccatcttagaccagtgtaagaagccaagtggtttctctgtatcatcccttgcctacactctagattatccagaatattctctttacaataactgaaataatatttggaaattgtcttccattctttaaactttccagtggtgtcaatactagttccttttcttgtctctttgagaaaatagctgacataaacaatttaaaagatgaaggattaattttggctcaggttcagaaggatcagtgactagggagtgagtcacttggcaacatgtttctgagcccacagccaggcagaatatcatgatggtgggaccagtggaggaggcaccctttctaggaagacaggatgtggttagcgtaagaaataacatccaaacatatttctctagagagctacttcctccacagaggccaccatctccatagttctaattaatcaagtcaaaggttgaatccctcgagattaaatcattcatttagtcatagacctcctgttctgtaatccctgagataagaagtacgttttaccaatctcccagatgtttaatcaatctactcaaactgataaccaagactaattaatgttaacagtctaagtgtttacctgatgtggtctggtctttgtctatacataaagctatttcccaggtcaaaactactgcagctagaagccctttgcccaagccaatcccctgtatgaactgagtttcaggaacctgagcggtttcttgccactcaggtcctaccctttaccacctcagaggccttctgtggtcacttcactgctacagcagctgcaactctaatttctgtgagtgcagaatcatatcttgtggtctctttcctgttttctaacctattagaacataagctgtgggtgagatattaacttacttcactgttaatcttcacggtgtgcatcagaatttggttcgcaatggtagacaggaaaaaacccctatatcctatttctttaacaacatctacaaatggcacctgtattcctgctcaacttttaaaaaaatatcctatacaccagaaataggggtacatagaagattcaaaatcctcagtctgtctgtctgtccattttacattatgtaataggctgccctgaactcatgtcctccagcctcagcttcccaagaagataagactacaggatgtataagtatgcctggctaaaattcacaactttaataatgacatttactgtactataatagtaaactgtgccacaaggtttgagaggatggaaacaccaaactcttcttgggaaatcaaatggtacaccatcttgagattactgttgcaggagaaaagcattctgtgaggcgagtgacttttccgtattttactttttctacttcttactggacagtggtgatactgtagtattcaatgcacactcacagatagatcaatcaagtatgctgctggaagactgaaggggccgcatttgatccttgggttgtacttcatgctctttattctaaactttgagatttttaagaatctatagagactcgttacactttatcctgacttcattatactttaaaaaatatctaagatgttaaaaaaacaacaacaaataattatacacatttccaaaatgaccaattaatttaaaaaaaatgtcattcaggggggttgggtagagatggctcagcagtaaagagtactggctgctctcccagaggtcctgagtttaattcccagcaaccacatgttggccaacaaccatctgtaatggaatccgatgccctcttctggtgtgtctgaaggcagctaatgtgtactcatatacactaaataaatagatcttaaaaaaatatattaaaaaaatgtcattcaaacaactattcacagtcagtactgtttgctttgcacataaagaatggggaggggacctttcaaatacttacctcttcaaagcccatttcaaataaacactcaacagctcctctgacaggcaagagtctagtagaaaacgctgtgttcccaatacggatggatctgtatttttcatcactggggtttctgattaaaaaaaagaaaaaaagataacataatgggcaatataccaccactcatctttttaagagtttatatatgtttctttcacctttcctctcagctgtccttctacacatggtagtataaattccaactataaggaatgagcagtcgagacgatcattcacacgtcatgattcgtatacttcagtaccactgagtacttgtgctgtccaacttcatggatgacagtatcattgttgccataggaaactgtgtggctgttacagataagtacctttttagtcttttaagtttctagaagtcgccccagacagagggtagcaccgtgtctgcttgctctgaggggtcctgtcatctataatggtgctcagggtacaacgactgtgtttaagaagcatttgtgagttgaaacagctgaaaagctttgcttccagcataatgaaccttagtggtcacttagcttcctttcctccctgtaccaaggactgtctttactgtaagtttctaccttgttttaaaatgtttttggaaaggaaataaggtaattgtcttagggttttactgctgtgaacagacacacactgtgaccaaggaaagtcttataaaaaaaacaacatttaattggggctgccttacaggttcagaggttcagtccattatcatcaaggtgggagcatagcagcatccaggcaggcctggcacaggctgagctgagagttgagagttctatgtcttcatccaaaggctgccagtggaagactgacttccaggcaactagggtgagggtcttaagcccacacccacagtgacacacctactccgactaggtcacacctattccaacaaggccacacctataaatggtgccactccctagtccaagtatatacaaaccatgacagtaataaaataaaacaaaaccacaaatattcaaagacaaagctctaaatattactgtttaactgtcatacgttagtgttggtctacaaactccttcccacaacaattccaatactgtgtgttcaataacttttataataacttgataatactatgagattttcactgtgttctataaaatttgtaggtccacaaaaaagtggaaattaaaaaaaatcttttcaccaatgatttcagaagcaagcattgattgctggcagcttgggagtgtttaccttctctacatttactatgtattaggggcagagtttctcagtcttgacccccatgaaatgtagaccacagctgaggggagactccctatgcaccacagaatactcaacatccctgttttccctgagacaccacttaaacaaaatctaaagtacaaaatgagcctagcatgtgtcaatgctaaccacagatgacttgtcatgatgcacatcagctatccccatggcatacccagttaaagctgaagatgtgctgcccacctcacagcttctcaggctctccatggccgctgcatgctgcttactgggctctgtcatgccatagcaaagcccagcagagacgggcatacccagttcccaggtccctctctatcttcctttggcttgtttcacctcaaactcacaatccccttgtttcagatcttagttgctatgaatgtttaacccatttttaaattaaaaatgctaagcagacttgcttgagttcaagcatagactaagcccaaagtcagccctgcctttctatggtatcctgggcattgaattgaattttgcttgattctctatcaacttaattttctctgtacagttttttgtttttgttgtcatgctttgatgcttcccccatccatctctgttacctattaaatacttttgtaagttgtaatatttacttcactttttagcaattatcttgtatcttttcttgggaaatttttctgaatatgtagtttttcatgatgttaaaaggatagaatcttgagaaggcagcagaatttcttgtactgtgctcaactttatctttgaaaatatttttgtcttttttggtgttttactctcatagttatctaccaaactatttaattttcagaaaaataatatttgcctttgtatttgaattagttacggaaagtcacattctccctcccactttttctgaaacagctctgccttaggaaggatacagaactaccactggcccctcctctagcatccacttttcttttgagcaaacactgactacttatcaaggtacagtagtgtatacctataatcccaatatgccaaacgacggaactgtttcaataacaaaaaacaattctcaaacaccaaaaaaaccacaaaacccccactgtagggcacaagacaaaacattacaaaaataattgcatgtgggaggaatttgtacactagaggggatggtgacagggaaagagatgaagaataaacaatgggctacagacatgaaatttcaaagaacaaacagtcaaacactccaccaaacttttcacctaatttaatagaaataataataatagcaaccacctcagtagttgcgatatatgtgccaggtcatttatgttgggtagtcctagaatagagtatttttcttccttttataaggtaaacttaaacttggaaattatatgtaaattgcctataatgacacttaaaatagttgactaaaattgaaacttactgctctggttaaaatgtttatacatataccaccacacaagctgccagcagactcaccaactttcaattacactcaatttctctacgtgtcagtggcaacctacattaaaaattagaagttttttgtcttctattacttcttgcattgtcattgaaaattctctttctccattccattgggtttattgttatgattatgcagtgacttcataatcaatgcctgtttcttctaatggtttcctcccggaaactccactgtagaaactgtgagtcacctttgcctatcccttcactaaatgtctcatgtttggtctccctactacctcctaacataaaaatataaagacagagacattaacactgtcttggaattgttctttgatgttacactgtagctgtttttcaaacctttcttctcccaaatacatttatattatttgaacaaagaaactatgtttgattcttggttcttcactcagtacagttaatagtcaaacactatgtgtgctttgtaaacaaaacagtacaatatcaaatatttatattaaagaataaatgaactagggacaggggatccatttagatggtagagtgcttgcctcccattcattgagccctggctcaatctgtggcagctcataacagcaattgtggtagcccacacctgtaacttagaggtgtaggtaggaggataagaagttcaacattattcttaggtacatgaaaagttctaaaccaaactctggttcatgaatcaaattagctaagcagctcacctgtgatgtcaggaaaactaatacagagttgctttgttttgctcttgataaagtccatagtaagctcatcttatctaaaatgggtggcagcttttgcatacaaattagcacacatttcttttggagcttatttagatttattactgttaggatatgataaatattcaagcagaaatttaagagtattatttcattgtagatttcagtgacaagtatctacttcaaaacaagctaatgcatttttatttgcatatccattctataaattgttctgatactgaggcaaatgagatgctgggacaatatgccttcaatagtgcctccactatggcactagtgggtttaaaagaaaatagcaatgcaaagaggaacctgattttctctaccaaattacagaagtataattataatgtgcggtcagggaccaggaagacatggagcttttccttaagagttaagaagtcactggatttggacatgaagaagcaggatatcatctcccaaccaagccagaccttgaattctaagaacacaaggacacttgttgaaaacaaactaaaggagcattttctcacatcaacctgaatcatttctcttacaaactgctctaatttcctttataaaacaaaaactccaagatcagaaatgtaagccacagtaaaggctgtaaaatgaaccagtttctttaagaaatttagtaaatattcataatgatggtcatgatccgaaataactgtctgcatgcaaagctatctttcaaagtactctgatcttagcatctttggtttcattgtactaaaagaatcgaaatgtctttacaaatccatccttctcttatgtatgggggtgggaggttgaagacttaaacaattcagtatgaaacgccagctgtgggctctggagaatcaagcttatgagttctttcagacaccttgtactctgaggtgctgtgagatctcagggttaagctgaggtgtcataaaggaggaaggccatcttcacacaagtcacaattatgtgcaagcccaaatgctgcataacatctggcatagaatcacattatattcccttttcaaatatattttaaatatcactaatgtcacctaaatgaagaattatggttgtggtggcacacacctgtaatctcagcttttggtaggtcgtgactggcatgagttctggggtacagatcaagttccatgccagtttggggtacaggacaacacctcaatgtctctaacaactaactctctaaagctggtccgcatgaactgtacagcctttaaactaagaattcctacagacttcgggtcggtgtgtttgtaagagccagcgcccaggggctcaactgaagtgacctccactgtctgcccctccgcatcccttccccacactctttgaccggagcggccatgggaggtgctgactcaaactcccagccagttgtggaaagtgctgcactcagtacaaaggtgacttgacacaaagttcgtaacttaaactataaatgtgtcaaccgccaaactcggcgtgaacgtttaactggcactcgggctgagccacagcgccgggatcctgcagcgacatgggacagcacagctgtcaaactcagtgacagcctcggcgggccctcgtcgcccagcccgccccgcctcaggcccgagtgtccgcggccccgcccgcctgcggccctcaggctcgagggccccggctgcacctcaggatgttgtcggcgtaggtgagcagcagcttggaggcctccagaaaggtctccggggtgttctggcatagctcggccacggccggggacgcagagctcgacgagctgcccagtgtggccgacgccatggctgcgccgcggccttcgccacctcgcgcaccgcggcccgcactgagcaggcgctgaggagcgcctaggccgcctcagaggcctgcggccagagggcggggcgaggagccgaggggcggggcgttccgggaggggctaggggcggggcgagccgcggagaggccggttgcgaacgttggggtacggggtacaaggggccgagccagtggagtagatctcgagctgtggtggctgcttgtgtcgggtagggtcccagagataattgcacagccttctttttacggtagataaaagtcttttgtggaagaaaagactccagaagaccgagcaagtttttgttatgtcttttttttggggggtggggtggggtgggggcggttatggggaagggaaaagtgatcatggtctgtggcctaggctgggctcacaggggaatttactgcagtcttgccctttggttactagtgtccggcttcaaaaacagagcatagctcagaactcttctgggtttctgatttgtgtattttccgaattctgttgatgaaaactcagttgttgctcacaaggtatgattctgatgcaaggagcattttgggagtgtcctatggatactcgcataaaacccatatacaaaaatagaataaaatgaggaacaaacaagtaaataaagtttatatacacattgtatcctttgactcatactggcatatcccttaccagtatccttaatttatcttagaaagggaatcactaacctccttagctgatgcccttgtcactgacatcaaccctggaaattggctccagcactgagcttcatactcagtcctcattacttctttttcttcttcagaagagggtttctctgcatagttctgggtaaagtggaactccagctatagatcagcttgaactcagatccacctgatcactgcctcctgagtactggaattaaaggcttgtctaccactacctggcttttttttattactttttaatgttgaaatgccactaagagtgcacttgaccttgatttgtagtcaggagttttccatgctccactcaccttgaatagctggaattacatatatgaatcactagcacgtagcaggtacttgttggctttgtgttttaaagatatttacttatgtgacctcgtttgacactttattatctgttgttttttaatgtttctgggcaatttcttcggagaattttcaagaacttctgaatattcatctgtaaaatatacctacatttttagcacttaggtttgtagaccaacttcaagaatattgttttcagctaggcatgttggcaaatcccaaaacttggaaggtagaggcaggagaatcaaatatacatacatacatacatacatacatacatacatatatcactactaccaccaccaccaaagacatgaaagaaggaggcagatgagggaaaggggggttaaaggggagggcaaaggtgatggaagagagataatggatggactgtggccaaagaacattgtatatctatgagactttgaaagaataagtcttagaaagagaatattatgttcaacaaagtatgttattagctgttgtttaaatttttcagtggctaactactagcatttttttttctggtccataacaaagtaataattatgtttgtggcccaacttcaaatgctgtattcccagctatttgctgtgagtgttgactgatccttgtaatcccagtatataaaggatacaggcaggccagctggtgcagccttgttaggaaaagtgcattatggggaggcagttaggttttgagattacatgctcctgccctatgtccaggttactccctctgcttgtgcttgtggtaaaggatgtgagtattcaatttccttctctggctgccatgcctgctgccatgcagttctgccatcacgcactctaacctttgtacccataagccaaagtaaatggttttataagttgccttggttgtggtgttttatcacagcaatagaaaactagggtaagcatggtttcagatattttttgaaaacttgtgctgagcttggaagtaaatttatcatattgtgttatggaagtcgttattcctgcaattctagtaccagctgctatttctaaagcgaccaagagtggcatgacctgaactgccctcttatgttgggcagctatcatatctacaactgggattggtaggggctcatttccctggattactcccagttcagggaaaaggagtaccaacatgcaaactcctgactgacagaaacgagtactaagagagtgggatattgctgggatgaacttgaccatgtggttttattttgtggggctaggggaatatttatagaaggctttgggaagacttgggctagaaaacaagataaattgtactgtttgtagagaaaaggagatctagggagcttaacactacagccaaggcatgtgctagagagaggatgtttcacatagttgagaagtttgccttgtactggaacaaaggtaaagggtactctctagccaagacctcactcagcaaaacttccagcttgtacaatagcctaaagtcttttctgatcccagaaagttactgaatgaaaaagtattgctgctaatgtgattcaagtgaccccattcctggctggcagccacagtgccaggtttagacttgaaggatacaagaatgaagtgtcacagatcctacctctgtggcttctgagagcctctgaggccaggcaacatgtggtatggaattctctgcatgaagatactgagagaataagagtcatgataggccattttgtagagctgtgaaagggaagcttgggttccagtggagaccacaagatgttggagatatcaacgctatgagaaagctgccaaggaggtcaatagagaaggaccagcctaagagagagatgcaggctactggcaggaaagctggaggtgtggagcccttaacagaagacacgaagctacaggatttggtgttttgtcctgctggattctagtcatagtttggtccattatgttcttattccccacttggaccttttgggatggcaatctgtgccatatattggaaatatgtgatttgcctttttattttactgaaggttgaattctgtgatgctttgcatcttagaagagactttgggcttttaaacagtattaagactgtgaaagactccagggcatctatgaagaccggggagtagagtgtggtggtttgaatggaaatatttcctacaggctctagtatttgaactcatggtttccagtcagtagttcagtttgggaatagttaggtggcacatcttgctggaagaagtatgtcactgaaagtagtagagaaaacacctttgtttgctctcttggcttcatgcttgtggtaaaggatgtgaactttccatttcttcctatagccaccatgcttgctgtctgctgatatgctgtcgccataaccttctggaaatatccctttgcctctgagccatttctcccacacctcatttttatttgtgtgtgtgtgtgtgtgtgtgtgtgtgtgtgtgtgtgtagcaagtgcatacacatgcccttaccatggcatttggagatcaaaggacaatttctgggagttggttttttatcttccactgttaagagttctggaaatggttgcaagcctcaatggctgagccgtgatgatgcacacctttaatccagacccttggaggcaggggcagatggatctctgtgacactgaggccagcctggtccacagagtgagttccaggacagccagggctacacagtaaaacctgtcttggaaaaagaaaaaaacagagcaaagaacaacaacaataacaacaatgacaaaaaaaaaaaaacaaacccaaaccaaaatacacacacacacacacacagagagagagagagagagagagagagagagagagatatggaattcaggttatcaagctataaagcttagtggaagataactttatctactaagtccagcttctcaaatttggcactggccccaaagtcctggtgttttgtccgtattgtactactgtctgttgaaatgcttgccttcccctcagttactacacatgtattcacccagtttacagattgaagtctaggtccacttctttgaagcatttcatgacttaatgagatagcactgaccttggtctcctttgtgctaaaataatattacaaacagaagtttaattgtttggatagaaagtttatttaattgagaactgtatttggaaataaagctttgaaccagagaaataataagaggaggcaatgataagcaaaaccaagttgaagatttgtattcatgaatacaccatgatattttagcaaacaatacggtaataattcacatatagctgttattatgattttaaaaacttcttaaccctttccagatggaagtaaaatgatcacagagagaaatataaatatacattatggtcttgttatatcacgttttatgtgggtgcattgttttgagaacaattctttccctgggaagatgtaaacaaatacccagcctctttataaagcaacaacaataaatcaaagcaaaatccccaggtccgacttagggcactctaagtttattcagcttaccttcagagcatgggtgaagggttccttacaggagtaagtgcccagggcatctgcaccgccagaaagtttcactgcagcatggatgatgacatgacttttccatggctgcatagacagagttcccctttcagctaaccttccacagtccacataccccaatgccttttgagatcagaaatttgtatgtaaaacaaattgccaaaaggtactggaggaaacagcacaattttcactgcagggagatcatactaagcaaatggtgagctactggatcaggaacaagttgaattttcttaaacattttagacagagtagacaataaatcatatccaggagtaatgaggaaatagctaaacttacctcagattcttttctacatttggaaagctagcatacgtggcaacgatggcctgaagaggttattgcccacaagaaaatatataatcatgactacaagatagcatagtctatcctttatctgaagaaaaagcaaagctcacacgtgggacagacttgaacagttaatagacatcccctggctgtgttgctacttatcctacttatccattacagatttatctctgagcaagtaaaactttcgtaagctcaggaatttccacttcagatattgggcaatcttctggtcacttcctgtcatgagtcagccctttttattgttacagaagtagctgtttacatcatttgctaaagtaaataaaggtaaggaaaaatggaggtagaggggacaccataagcactgcagatcactacagacgttaggttttgttatattttaaagacaaagtcttcaggttggtagcccaggctccctttgcactctctccacagctgaggacagagctcctgatcctctgccgcccaggtgctgaaattgcgcggtaccattatctgatctctttgcaaacctttaaaagttttgtaactaacgtctcctaacaaattctcaacgtctttgcacatttctaagtattcagccatagtattattttattgtctacgtggcatttagatgtttccccaaacgacctcggtttcttggtgacattctgaagagttctatgaatattttctacagagctaccagggaggctaccgctataggtcctccccggaatgtcctggggaaatgacagccgcccttctctggcagcacaggaatatctaggcattatcgctgttgactaggtgaggtttcccaagcgatcaaaacaggctctgaggctagagcggggcactcacaacccggaacccggaggaagctctggccggagcgtctgacctctgacatcaggcaccgggcggaaacgctgcgctgcggatgagtgcgcatgcgcactcggtgggcgcccacaaaggcttgtttcaggtagtgactgcagtgtgcacccgggtttcagggtaggggtggagggcgtcgcgtggctgtgaatccctgagagctcctaacgctgagctcgggaagttacacccggccttcctaatacggcggtgctgggctgtggcgggaccgcctgaaaggttatctgccctacacggaagtagataaagtgcacaaggcagaatgggcctgaggcggcctcctgtgcattaatcttagaaatgccacatggactcagtccacactgtacagtaatcttcggtgagcctgaagaaggatgccccctgtagggtgggttggcgttgtaaaacccagtgagctagctatcagttgacagtctgaaggacctcatagattacaaataaaagttaagtccaagcgagggttgcatttctctgtgaccacagtcacacctagggtgtgtgtaagattctactgtcgtttaaatgatgcttgctgtctcttgtggtctattccaggaatgtgtttctgatcttctgaatttcaaccatgttgtcaaaatgcttgcaacattttctaaaagccacaatctcccatccatatccagcgtcatattcttggttaataagcaaacacagattttatggaactgtgccagcagccatgttgcgcagacgagttgtcatcacaggcattggcctagtgacaccacttggcgttgggactcaactagtttgggatcggcttctccgaggagaaagtggaattgtttctgtggttggtgatgagtacaagaatatcccttgcagtgtagctgcttatgtaccaagaggtccacatgaaggtcagtttaatgaagaaaactttgtgtccaaatcagatgccaagtccatgtcttcttccaccatcatggctgttggggcagcagagttggccctgaaagactccggctggcatccgaaacgagaagcagatcaggtggctactggcgttgccattggcatgggcatggttcctcttgaagttatttctgaaactgctttgctgtttcagaccaaaggttataataaagtcagcccattctttgtccctaagattctgatcaatatggctgcaggccaggttagcattcgctacaaactcaagggccccaatcactcagtgtccacagcctgcaccacaggtgcacatgctgtgggagactcctttagattcatagcccatggtgacgcagatgtgatggtggctgggggcacagactcttgcattagtccattatctctcgctgggttttccagagcccgggctctgagctcaaacccagatcctaagctagcctgccggccgtttcatccagagagagatggttttgtcatgggtgagggagctgctgtgctggtgctggaagaacatgagcatgctgttcagagaggagctcggatctacgcagaaattttgggttatggactctcgggtgatgccggtcacataactgcccccgatcccgaaggagaaggtgctttaaggtaaagaacggttgttctgttcaaaatatattttcctcttaagatactatattaaggcactattggaacttcaaattaaaaaaacattacctggtcttggtgtatagtatatattctcttagatcaaaggctttttaaaaattctttgcttgaaatgattgaaaacatttgaaaatatttaaacaaaaattgaatggactttagttagagccaatagagttgtgtctttgctagcttcttataccccaccttctgtttggaaatcatgagtgtgctcccttcctcagcctccctctgaacacttatcagacctggagaatagagatagatgtgtctaggtatattctgttcttttcaaatcttttcaaagcagcatttcttagcccttaatcacccaggagtcttgttaacatgccagttctgactgcggatctagattgatgcttaagactctacatttctaactagctccagtctaaagaccacactttgaaaaaaagtccttgattatatgatgccatctaagcttaaactgtattatgttttatccaattaaatcagccagaagtttagcaggctttcctataaagggacaaaaactagctacttttagctttgtggatcatagggtctttgctgtgacactgatcttatacaagctactcagatgaacaatctcctgttattaaactttatttgataattttcttctcttaccagatgcatggctgctgctgtaaaagatgcaggcgtatcacctgagcagatatcctatgtcaacgcacatgccacttccacaccactgggtgatgccgctgagaacagagccatcaagaggctctttagggaccatgcttgtgcccttgccatatcctccacaaagggagccactgggcatcttctgggtgctgcaggggcagttgaggcaacttttactgcactggcttgttaccaccagaaactcccaccaactttaaacctggattgtacagagcctgaatttgatctcaattatgttccactggagtcacaggaatggaaagctgagggtcggtgtattggactcaccaattcctttgggtttggtggtactaatgcaactctttgtattgctggcatgtaaacactggcttttaatggtcataaatttataaatattatatatgtagatatgtcttatatcaatatccaatgactttagcacaattggtatttgtatagttctttggtagggaacagggtgcccagtacttgttattttatagcatcttggtgtctccattgagatttcagtggcaactagtgacaaccagaaatgtctatggaggacagaataacctgcacacagaaccattgatttatgtttttctagtgcacgatttcatccatcatggtccttttcagatatttatttagagaccagcttctctgagcaaggctgtgctgctccatggtgtaactaactctagggtcaccactgttgtacagcatataaacaggactacaatacaagtactcctatttgtatcaccactcagcatccctttaggacagctgtcagccagtgattcacccctgacccatgtagtgtccttggtggaatttccccaagctcccaagatttcagttctctgaaggaggaagtaaaacaggatttcctttttcttgcctgttcttgaccgacctccctcccttccttccttcctttctttccttcctttcttcgtcatctttttttcgccttctttgagacatggttactcaggtaaccctagctgtcttggaactcactctatagaccctggctgaccttgatctctatagggatttgcctgcctctgcctcctaagtgctgcaattaaaggtgtacaccagcatagcctggctggtttggcttttctcattctagatatgtttgtgatgtggtgaatggacataaagatctttggaaaaaactcttgttaagttaggccagctcctctctaacttctaactttgtgactgtgacaatgttctccaagcttcctactactagggtagcaagttcttcagaggtgacagccatccaggaaagcatttggtaggcagggcttttatctcttctgagtaagtgttttcatgtctatgcaggtccacaatgatatggagcttcagtcaagtgcctacatttcctgggctcagtaacacctttaatggctttctgtccttgtactgtttaatgatttttattccaattccatgacaaactgccttttggcctctgctttcttagtggcacacacacacacacacacacacacacacagtgtgagagaaagggagatagtaaaaaaggagataaatggctatatgcctatgtgcctttctgcagaatggggagcagtctcacattttacttaaaactttttgttcttgttttagtttttttaaaaaaataatgtgtatgagtgttttccctgaggagcagaagatggcctagtcagccatcattgggaaagaaaggccccttggtcgtgcaaactttatatgcctcagtatgggggaatgctaaggccaagaagtgggagtgggtgggtaggggagtaggggaggagggtatgggggacttttgggatagcattggaaatgtaaatgaagaaaatacctaattaaaaaaagagctaaaaaaaaggcaaaaacaatgagaggattgttgtgtatactgtacatgcatccttgggaagagcactagctaataatgcaatcagcacatacaatggtgagcctctccctacggtaaatgtcatttaaacattgtcaacaattatatctcctttcaaaactgttgcctgtaaaatgattgaaaagcactaagtagactatatcagaatgggaatgaaatctagacagtgtgattcttttcaagctgtggtcacacagttaaggggaaacaaagctgggaaagaaaaattattaattttaaaattcactatttgaatgtaacaatattgtatgaactcaaaaatgtactttaaaaggaagaaattgtttttaatgtgtaattcatggttggtgaatgaaatttttatttttggtacaataatataaatgaaaataaaaatgttgtaagataaacaacaaaaaaagtcttcatcagctgattctgccagctgtgtttgagattctcccttctgctatacatcatgcacagcagttttccttttgattctttaactggcagagaaaatgaaaccaatcaaaacccctagatggccaggtgtggtggtgcacgcctttaatcccagcacttgggaggcagaggcaggcagatttctgagttcgaggccagcctggtctacaaagtgagttccaggacagccagggctacacagagaaaccctgcctcaaaaaatttaaaaaaaaaattaaaaaaaaaaaaacaacaacaaccctagatggtaatgtcagtcaccttgaccatcatcttggtaggtcttggtggtctcccaggtggcaaaacccaagattttattcctgagcaatgtgagccattggtgttagtcatctgtttcacacataagtgtgggggccagagtttagattcccagtatccatgtacataccaggcaaccgttgcctgcgtgtaatttgagcatgtggttacaaacacttcagtttgagaccctgcctattcagttctttttaagtgttcgttggtcacagatactgaacctgtgtgacagttctgaggttctgccttgtgtatgtgtcataagacactagaatgcagacttgagggacttccacaagctatgcaagtaacccgtggatattgttagatccatttctgccacttttgttagccagatgcatcttgtgtgtgctttggaatagctagtgactaagacttgttaatgtaaattggcagccatttgcatctgtgctatgcaggtgcttctggggagtgagtatacatgtggcccataaggcttcactcttaatatggttcttacaagtccactcatatgcccctaattgaaatatttctctcttgttccagtccatgcttcctagactactaaccaaaagccaggccatgtatgtatatatttcactttgaggctaccaaagagcggtggttaaatgagaaatgtacctcataggcctatgtatttggacacctggtctccagctggtggtgctgttgagctatgaaacctttaggagggatagccttgctggaggaagcatgccactgggagtgggctttgagagtttatagcttgccgcatttccactctactctctcgttttctatgagggactgaatctcacaaccttctgcaccagctgttttgagggaagaggaaggaaggacgggagtaagtcgtgggttagttgcccaggaggccctgctcttctcagagttcaataaggaaccaaatgcccaggaatgatgtaagtaaagacacagaagagatgaaaacaggcagaaagtaccattaggaaagatagtgtctcagagccagaggaccatcaagtagactgggctggtcttttactggatcttggttcttcccccacctttttgttaaatccccattttttcttaacttcttcctcctctttcattacttcttctcaacctagatggcccttggtccagggagattaaaccctgggaggaaacatcccagcttcagagtcctgatattacttctcttgattgttcagctgcttatgtgggaattttatctctttccctatgacctcttccctgattgcctattcatgttaagttctcatacatccacctggtgccacagttctctgtcaatatagtcatcccctttggaaccataagccaaagcaaactcttccttccttccatctttttcattccttccttcccttccttcccttccttcccttccttcccttcctcccttcctcccttcctccctccctccctccctccctccctttctctctctctctctctctctctctctctctctctctctctctctctctctctcttttctttctttgccatggtgttattatcagaacaacaaaagtaaccaatacacagtgtcaccagtgcagccttgcctgcttgcgtaatctcctccccctcccaccttggccacttccagttcattctcagcatcacagcaatgcagctgccattcttttcaacgtgacttccagcaagaactatttaggaagtaaaatcaggattcaacaatttccttctgatccaaataccctgtttcgtgtttcattttgttttgttgtttccttctgtgttcctatccctgctatcttagtttgttttctgttgctgtgttaaacacaacaagcaactttcagaggaaacaatttattttagcttataccttacagttcatcatgaagtcagtgtaggaactcaaggcagggactgaagcagaggccatgaaggagtgccagttactagatcattccccatggcttgtttagattgctttcttatatgatacaggcttcaaccacccaggagtgggactacccacagtgggctgactcctccctcccacattaatcattactcaaaaaatacttccccagacttgactattggctaatctcttggtggcattttcccaattgttgttcccttttcccagaaaatcctccttgtgtcaaagtgacaaaaactaaccagcatgcctgaagtcatttctacggcatataacagtatctggcccagaatttggtgatggttggtgttatcagctgtatggactttagaatcacctgggaaaggcatctcaatgaagaaatatttgggttaggtcggcctgtgtagatgtttctgggggttatcttgattaccttatctgaggtgggaatatctgcttacttactgaggacagtggggagctgtgcctcttgtgcctgctcccccaaatgctgatggtctgatcaagtacacatagtagttacatgcttcattaacattgttgtctccattttatggataaagcatccaaaggccctttacattttggtattttgagacagggtccatgccatgtggcccaggctggtcttaatttccaagttccaggcttatagatgtgcactttagagaccagtttaggaatctgaaagttcaatggattggtaacaggacaggagctcaaagggaccttatgggcatcaaagagcaaactcttgacatcagaaacataagacccgcttgaagagtaaacttgagtctccccactaagagtggccttatactcacagggaggagcagagctttcctagaccctgttctgaattgaatgaaataactgaagaaatacattgtgtttcacatgttttcacttaataaaaatcaaagtatggctattttgtttttgcagatactgatggttatattagaatttgtaaaccatgttagccaaatcccagccctcacattaaagagatacatagatagaggtatttgatagtccctggatttaataatacatgtttttaattataattaaaaaaaactaccataaaaccttaaagaaaaaacccattgtttacagattaaaaatataggtttttatacattaatttatgtatatttgcatacatgtaaaaataagctttaaaagagaagttagcacagcgcggaagctgtatcacctctacaccccacccctcctcaccatgcacagtggaatggatggggatcacaggtgggactgaaatactcatgctttgtatagccattctattttttctctcaatatattttaaatgtcttttagttgaaagcaagagaagaaagtttggctagaaacagattcagatggagaaagaattggaaatttctaattactgatctaagctaacacattgctgaaaccattgtgtcagattttcattgaataatggctaatgagaattgccttcatgtctgtgctgtttggttctgctgtggccatcccctgttaatgatagacttgtggggagtggctcaccacaaaggctacttgctgttcaaagtggcatcctgagatgagaggaagactcagtagatctggatctaagttcctagtctaggccctaaagtgaatttaatagtgcctgtacaacaagctaggcaaagtggtacctgcctgtaatttcagcactggagaggctgaggaggggagaatgttgtgaatctgaagtatcaagagttactagagcattcctggccattctgggctacagagtggaaccctcccaaaacagctataataaaataatagtaaatgataatgtatctaacagtggtctctaagctctagtaaggctggctaatggagcatagctagttcttctcagggacatttctatattcgggaaattggttgttaggttcacaaaatgtttttatattgttaatatctatataaacatcatcatcattatcatcaggcatgtttattctgttatcgttgggattcattggggatttgtacatgagaatggtttgctacagtataaagtgccttatctagtcttcaagaaaattgtcctgaaataatcagcatgaagcattgaaacaataacaaagcaacttggagaattcttcctgaaaagacgaaaggtggggagctccctttccagcagggctgtgagtgattctttctccctgatattttgtttttaaatgcttattcacagattatgcttaggtcactggtatgggaccctttgcacacaggcctggtttgcatgcatgcttgagatgagcagggtttgcatgctcatggtttgcacagcccattgccctgcatctccttttttttctccttacaagggttactttggaaattgtcttttggtctaaagcaagagagaggtatttgattgaaaatgcattcaaaaaagcaattaggatattttaataactaagtgctgttcttacattgccattcagagagagaaatgtaaaacagcataatgcagagatcctggaaggaatcccccagacaagcccgtgctggtgctgcataataagtagaacggcactgggggagaacacagagaattcttccatcatcagcatcctgcaggcacaatagtgagacggctctggagaagtgtggggctctggggaccctttagaggcagaactttcctagagaaagtggctgactaagaaggcaagaagccttgaggattgcagcccaggctcacttccagtcctaaccttcttcctttgtgatctactcagatgtgagcgatcattatcccacagtcagcagctgcacttgccaccatgccccctctggtattgtgtagtaacattatcacagaaatggcaaaggcagttaatacaagaatgtccctgtaataaattctcttccgtcatttctgaattctttcacttttaaaccgtaacactgagtctcttggaggacctcattttgtgcaaatcttcccttgaattcttgtattattaaggatggaagatagttgggataatacataaaaagaaatagtaccacaaagttctactttgtctctccagcttctttctttctttctttctttctttctttctttctttctttctttctttctttctttctttctttctttctttctttttctttctttctttttttcttccttccttccttccttccttccttcctcccccctctttctttcttttttctttctttctttctctctctttttcttccttccttccttccttttttccttctttcctcctcttcttcttcttcctcctccccccccttctccatcgccctcctaagaattttctcccatagggtactccctttgtcttcccaactctgagatgacatttcaatgggagattctaaagagcaactccagtcacattttctgtaactaatctaaacatagatgataaaaaaatgtatcatttatcttgtcaatctgcctcatatcagcttgatttgcattcctttatgaaacaggtgcagaaagcagcagagaagttctttattgatgacaagagcagcaccatccatttatgtatgtactgtgagtatctctcttgagccagggtatttgtcacagaagcttggttaccaagccaacattttctatagcctacttttaaaaataaagatttattttatgtgtgtgacacatatgtctctctgtatgcatgcacatatacatgttctagttggtgaccaggaggccaatagagggcatcagatccccagagctggagttacaggtgtttgggggctcctgccatgagtgctgggaacagaactctggtcatttgtaagagattcaagctcttctcactgctgagccatctttcctgcctactatctgccttttgtagaatatgttgccaattctcactctagatggcaagtagactcatttaagatagtaagttcaattcttacacaatatctaatagcacacgaatgctgctttgctataaaacactgtctcacctggactaatgaggtaactaaaggcaggaagtctgaaagcctctgtcaggcatgttagtcactcaagaagtgtctgccttacctatttcatcctgcttcaaggctggcagcacagaggttggtcatggtcctgaaccttgaactccaagaggaccagagcctcatagtgagattaccagttgagggcagtgacacaggtcgtcgaggctgcacccagaaacagaagcagcatcctgagtgacccctaaggacttctatggaacaccttgcagaacaggatctgagacaatgtccacaccttgaccagagctgcttaacaacacacacctctgtctcagtgctgcttgtcagagtcatttctctgaccactagatagaatctttttttataaacttcattgcttctttgtgagattcacatcatgcatcccagtcctcctcatcaaactgtcccctcgtattcatcctttgcctttgcacctcccccagaaaataacacaaatacacagacatcaacaaaaccaaagcatagaaaacatcttatcgtggaagctatagtgtgccacagtgtgtacatgtatcctacagtatatccatctgtctgcacatcttcacttgtgaatactcattgcaatgagccattggtctggttgaaattctctggcttctgtgacaccatcaacattggatcctcactggagttcctcctgtttattcagttattgcactgtatcatggagatcttgtagttttagaacaacaggactgatcctttcacacaacacaactgtttgcagataattgtgtttgattttgggttgtgccaattcagagccctggaagtgggcctgggtagtagctgcgctggttggacttaggctgtcctttatcagcaccaccaggttaagctctagatctcccaagctcatgaccccatgggcagctttcctgactgccaggggtggcaaggggcaggggaggcattatctgcatttcttccaccccatagcagataagtggcagtgtcagctctcccacactcgtgctgtcagggttggcacacccataccccacttctagaaccagctccaccatgctgccttttttttaggtgcagagcctgttcttctgagtgctcctgcaagtaagagatggggccagctctcctgattaccacatccaatgaagggcaggaccagctatgtacagcccctggaagaatggagatgtcctaaccagggatatccccatgttctccagtggtaatttgagacacagacatcaatactgacctttgttgctgaatagtcacagactcagaaatagccctcagtggcagcttgggctgggacatcaccaagacctgaggtggcagggctcataacaggctactcctctccacactgagcatccagttccatctcttcacaatgctcaagctgctccacattttctctgtcatatgaccagcacatactttcacactgtggtggcttccactgcaggctggccacatggctgaggggccctgggtgacatcctccatccttgctatacatcatggcagcaagtgggtgtctatggcccacctgtatcatagctggaggtcaggtctgtaggtggcatggtattcacaggtctctgtctgttttcttcctcctgtgatgtactgcctg

SEQ ID NO: 448 - DNA, 1745 bp, Mus musculus
gtacaaggggccgagccagtggagtagatctcgagctgtggtggctgcttgtgtcgggtagggtcccagagataattgcacagccttctttttacggtagataaaagtcttttgtggaagaaaagactccagaagaccgagcaaatttatctctgagcaagtaaaactttcgtaagctcaggaatttccacttcagatattgggcaatcttctggtcacttcctgtcatgagtcagccctttttattgttacagaagtagctgtttacatcatttgctaaagtaaataaaggaatgtgtttctgatcttctgaatttcaaccatgttgtcaaaatgcttgcaacattttctaaaagccacaatctcccatccatatccagcgtcatattcttggttaataagcaaacacagattttatggaactgtgccagcagccatgttgcgcagacgagttgtcatcacaggcattggcctagtgacaccacttggcgttgggactcaactagtttgggatcggcttctccgaggagaaagtggaattgtttctgtggttggtgatgagtacaagaatatcccttgcagtgtagctgcttatgtaccaagaggtccacatgaaggtcagtttaatgaagaaaactttgtgtccaaatcagatgccaagtccatgtcttcttccaccatcatggctgttggggcagcagagttggccctgaaagactccggctggcatccgaaacgagaagcagatcaggtggctactggcgttgccattggcatgggcatggttcctcttgaagttatttctgaaactgctttgctgtttcagaccaaaggttataataaagtcagcccattctttgtccctaagattctgatcaatatggctgcaggccaggttagcattcgctacaaactcaagggccccaatcactcagtgtccacagcctgcaccacaggtgcacatgctgtgggagactcctttagattcatagcccatggtgacgcagatgtgatggtggctgggggcacagactcttgcattagtccattatctctcgctgggttttccagagcccgggctctgagctcaaacccagatcctaagctagcctgccggccgtttcatccagagagagatggttttgtcatgggtgagggagctgctgtgctggtgctggaagaacatgagcatgctgttcagagaggagctcggatctacgcagaaattttgggttatggactctcgggtgatgccggtcacataactgcccccgatcccgaaggagaaggtgctttaagatgcatggctgctgctgtaaaagatgcaggcgtatcacctgagcagatatcctatgtcaacgcacatgccacttccacaccactgggtgatgccgctgagaacagagccatcaagaggctctttagggaccatgcttgtgcccttgccatatcctccacaaagggagccactgggcatcttctgggtgctgcaggggcagttgaggcaacttttactgcactggcttgttaccaccagaaactcccaccaactttaaacctggattgtacagagcctgaatttgatctcaattatgttccactggagtcacaggaatggaaagctgagggtcggtgtattggactcaccaattcctttgggtttggtggtactaatgcaactctttgtattgctggcatgtaaacactggcttttaatggtcataaatttataaatattatatatg

SEQ ID NO: 449 - protein, 456 aa, Mus musculus
ISTMLSKCLQHFLKATISHPYPASYSWLISKHRFYGTVPAAMLRRRVVITGIGLVTPLGVGTQLVWDRLLRGESGIVSVVGDEYKNIPCSVAAYVPRGFGQFNEENFVSKSDAKSMSSSTIMAVGAAELALKDSGWHPKREADQVATGVAIGMGMVPLEVISETALLFQTKGYNKVSPFFVPKILINMAAGQVSIRYKLKGPNHSVSTACTTGAHAVGDSFRFIAHGDADVMVAGGTDSCISPLSLAGFSRARALSSNPDPKLACRPFHPERDGFVMGEGAAVLVLEEHEHAVQRGARIYAEILGYGLSGDAGHITAPDPEGEGALRCMAAAVKDAGVSPEQISYVNAHATSTPLGDAAENRAIKRLFRDHACAISSTKGATGHLLGAAGAVEATFTACYHQKLPPTLNLDCTEPEFDLNYVPLESQEWKAEGRCIGLTNSFGFGGTNATLCIAGM

SEQ ID NO: 450 - DNA, 24458 bp, Homo sapiens
agggattggaaattaaaacaaaaacattgttctttactatatgtaatttgagaatcacagatggttgtgaaatacaaagaaaattttattctcaactctttattctgtgtattagattagggtttctcagtctcagcaccattaacatgtggggccttttctcagtggagtttccttgtgcactgcagaacattcgcattcctggcttccatgctacactgtctcacaagtgagcctctctttcttatcacttaagaaaactgaactataaaataatcctacatttatcaaagctagttttcgataaatggggcatcttttcctgacactcaatgtatttcacagggtgataaacatgtcagtaccaccaggatgatatatcctactggttcaaaactgcttgagctattttaatctattcttttcctcacagctttcagatctctacatgctgggtctttctctgggctaattttctagtttcttcctgctttcacaattgtttaaaaattcttataaaatacacatcagttctcatatagtttttgttttgttttttaaaaaacaaagtgttgctctgtcaccccggctagagtgcaatgacgccatcaaagctcattgctgcttagaactcctgggctcaacaatcctctgcctcagcctctgaagtagctaggactacaggtgagccaccacgcctggctattttttttttttattaagagatggggtctcactgtgttgccccggctgcaatccttctacctggggtgtcctaaagccctggtactacaggttggagccacttcgactggcctttgttattttgatatatgttgttaccatttaactattgatatacaatatagattttcctctttagtttctagtgagcattttttttttcttttttgagaaaggtctcacttcgccatcaaagctagaatgcagtggcatgattatgggctcaagccatcctcccacctctgccctccaagtagctgggactacaggtgtctgccaccacgcttggctaattttttaatttttttgtagagacggggtttagccatgttgcccaggctggtctcaaactcctaagctcaagcaatccgcccaccttggcctcccacagtgctggggttacaggtgtgagccaccgtgcccagtgagcaattttatttttatatcatctctggacctcacattaatctatttttctcagtaaaagtatactgcaaacaggctccagcaatgacagtcacatccagttcctcaaattctttttcttattaagtatgttgagtaaactgaccgtggttttgtgtatagactgataccaaaggcctgaccctaaagccctcaaagacttagagggctgtagggacattagacttcaaacccatcatatcctctttcctatccttggaaaagcaacgcacaaagactttcttaaactcttaatttctcagcattattccagtgtgtccactatcctttgcgctcattgtcacacccctcatctttcagaatcttgaagctgtgaggcggaggttgcagtgagtcaagatcgcgccactgcactccagcctcatcaacaagagcaaactccgtctcaaaaacgaaaatcagcaacgagccattagtaaacattcataatgaagattatgatgctaaatgtcattatttgcatgcaaaggtttccccctcatactaaacctcagcattttgggtttcactagatttaaagcagaagtgaggcttcattacaaggccacctctcttttctgactagtggggttttaaatagcctggtggctttccaggtggtaagtctcagctaatgggctctggagaacccagcctatcagttcatttatggagtcccttggcatccttgtactgtgaagagctgtaaggcctcaaagagtaaaaaaggtgagttgagaaggtgtcacagagcacgaaggtggtccccacacaggtcacaattatgtagctgtgaacaggccacatgttgcatctttcatagcatctgccacaaaataagggctcaatatattttcccttcaatttactttaaaaatcattaccattgcctaaatgaaatattactgacatggattttaaaaactgcacatgtaactaatgtctaaaattgggtcacgtgaaacctataaccttgaaactgagaatttccttttagacttcatgacaatataccaaacacttaatgcaccaggggctgaggggaacagagaacctaattaatcacggtgacctgataaatgaggtaacacccctaaagcaagtggctctcctttaacctcagttccatttccctacccccccacaccatgtcccttcagatcatttgatctgaagagttgaggtgggtacttattcaaaatgaataatcaaacttgcctcccaattcccaaaatctgcaaggtcccttagacctctagaagtgcaattttgctgacaggagaatgaaggaaattactctcatccaaggcgattacctccacgaattcttaaagggttatgttacatagtagaatccaggtattaatataaaaactgtaacttcaaaatactataatgtttcaatcaacaaaagtgggcagaaaaaaaattaaaaattttaaaacccaccacttcagaagcattatgctttagtactcggatagtctcaacatgggaagaaaacatcactttgtcagtgagtaacttctgataagtatgtggaaatgtaagccactccgctcgaaaaatgcacgcagggggaatgacacgcgcggtgcggttaccgttgtgtcccgatatctgaggccgttaaacgacgagaagagcggcagtgtctgaagcacgccttcctacctctcctccgcccggccccgcttccgggactccagttcacccgcagcaccctgactgcaggtgccaagtcacaactgcaaagaaacttccttttctcgagcgggggtgggacttggccgggtcccgaggcccctggccggcgggctcggacgttaggagcagaaccagctccaggtcccggtctgtccgggcgtcgctgccctctgaagctcaggccggacgccccagtccctggccgaacaaggtgccgcggcccacccaccccggtacccgccgtccgaccccgttgccctgcacctgaggatgttgtcagcataggtgagcagcagcttggaggcctccaaaaaggtctccggggtgttctggcagagctcagccacggccggggacgccgagcctgaggagctgcccaatgccgccgccgccatgcttgagcgccagcgggcgccgccgccgcccctcgctctccgcgtcccacactgagcaggcgcctcagcgcgcagcagctaccgcagccaccggcaggggcggggtcctcggccggcaggggcggggtcctcggccggcaggggcggggtcctcggccggcaggggcggggtcctcggccggcaggggcggggtcttcggccggcaggggcggggtcgggggcctggggcggggtcggggaccggggccaggagcgggggagctcggctgggagctacggctgccccttcgcggggggcaaggggctgttcggaagaaggtggggggcctcggccggcaggggcgaggtgcttcgacccagagttggggcctggtcgtacaggttgggaaggggttccgcagggagaggcggggcctgggctccggggctgaggggtgtgggcctggaggagggggatgtcgagtcctttaggacggaggagctcggctggaggggaggccggctttggtctagaggtatcgggcgaatggtgctggcacgtgcctctcagaaacccggatccctttgcgctccggggccagcctaattgatccagctattaaggtggagaaaccgcatgtacctccctcctttccccacaaataaaaccaccttagagccttctcttcgcagattgtcaggacgttctacatagatgtggatgaaagactacagaaggaaggagcaacaaacgtcaaaaacaaaaccatggctataaactctgctgggtttgttatatggattcttttcagaatttggctaatgactgaaaatctaagttccagctcaactagtatatgattcctctgtaaggaagtgtatttttaaaccataggttgcgacataataatgggttgtggattcggtttaccgcgtggtgaccagcgtaaaacacatgcataataattacgcaatattatagaatgtcgggggcgggaagggaataaaaatttgcatcccacacagtaagggtaagtaatattttgtgacttgttttttaggtagatcatgtgatcaaggtcttttattcctcttagaagatgcatcccttactactttaatccagtctcttccccaccatgttcttgaaagtgtactttaccagtggcttccttctttgcagaaattccttttcaacctcacgaagtatttttcttgactttatttcttaagataagtgatttgcctgaataacctcttttaaatttcttgatgtttcatctgtttacttttaagaattgaaattttcttccagaatctccgaacaagaccctaagctatgacatccagttcaatgactattcgtctcccaaatatacgtacgcttttaataaatatgtaaatctttggaccaccttccaagtatggtgtgttcaacagatagtagtatgttactaccgtctgtaactaaaattttcaggggcttaacacaagagtaatttctttctggctcatataacactttaataatgcaggtgtcataatgtcagtggacccagtctccttccataccttagaacaggggtcaagaaacattttctgtaaagggccacatagtgttttaggctttgtgagccataaggtctgtctcaactatttaactctgcctctgcagctgttgctccacagacaatacttgaaaataaatgggcatggttatgttctagtgaaattttatttacaaatccaggcagcctgcttggacaaaaaaaaaaaaaaaaaaaaaaaagtcacacctacttttaaccacatgagcccagaaatgacacacagcattttctctaccatatcattactaagaatgaggcctcatcaagataaaagggggtatttcagtaaggccagatttacaaaaaataaaaaaaaaatttaaaaacacataaaaagataaaaggggagagtctgggaaatgtagtctcgtccaactacacaatggattgggggcttgggtctggagatatagctatcacaaactttattcctcttaatttgggtttctttttccattgatacatttatttatcctttactaattatatgagaatagtatatattatacagtacttgtaacttttaaaaatgcaacagaactttttttttttttttcaaataaaattttaggggctggacatggtggctcacgcctgtaatcccaatactttgggaggccgaggtaggtggatcgcttgagcccaggagttcaagaccagcctgggcaacatggcaagaccccatctctacaaaaaaaaacaaaaacaaaaacataggaagattgtctatatacaaaacaccaaagtggaaatgctctggtattgaagcagaggtgtcaagtgaagggcagaaagctgtcagctaaggctttcccctgacagatagaatggtcatagggtacttttgtgggggaacaaaatgacttttgtttttctcttcataatagtttgtttcctcaactaaaacgctatctcactgtaagttatcattagttttgtcttccctatttgattaaaagtctcttgtgccatctgtctcagactgctttgcacacagcaggtactgaatagagttgttggttaatcactcaatgtagtcacacaatagtgaatcactatacaaattcctgaaagacttcaactcctccccttgctaatggtttttatggaggttaactttttaatatcaccaaaccaatcgtggggaaaatttacagagttctttcttttttgttttattaaagaatagtgttagccaggcgtgttagtgcacacctggagtcccagctacttgggaggctgagaggcaggagaatcgcttgaacccaggaggcagaggttgcagtgagctgaggttgccctactgcactccagcctgggtgacagagcgggactctacctcaaaaaaaaaaaagaatagcgccatgatatgtcaactctaaaaatgatgtttttaataaaggtgaaatcctggggaaaaaaaaaatctttattttggaacaaaaataaataaataaaagaacaagaatttcaatgctgatttagtacccattctttggttgtttgaaacaacgatgggtataaaagttagggtagcttattcagcttttctaaaggaaatggaagaattagaatatctccaacttgactgaagtgggggaagcagccaggaaaatgagagaccaagtccctttatataatggattcccttaatagctttataaatggcaatattcaaaagagattacagttactcaagaactttaacagaagtgttgctaaagagttatttggaaggacttaaatttcagatgatttttttaaaatggtgatttccatgattttatggactgtacattgttatcacaatattaatgctatggcattggttttcgcaaaagtcatttggtgagaaatgcacaaaaagtgcatgtgtactatcaaatgtaaggataaatgttgatttattcattccataattcattcattcatcatgtatttatgaagtgactactagttgctcagcactgtgaaggagacaagtatggtccctactttcatagaagtcataagtttagagcagtggttggacaagcaacagcagcatcagcaggaaacttgtcagaaaaacaaattctgaagctccacatttaaaggtgggacccagcaatctgtgtggtaacaagcccttcaggtgattttgattaacagtaaactttgagaactactagtttagagggaggaaaatttcactgtgggctgcagtttcagtgaggggggacaacttgaacagaagccttaaattgagaggttgagaaggtgagaaaggagaggacttgctacctgtgagagactccccaccctccttaaatcatgtacaatatcctagtaacgtttccttctcaacatctcctggatctctccttgccattgccttcagagcctcgtgtttcatccattcttaactttcttccctgtgtccatttccacatccttccaacccaccctgctcatttgtgcaatagtgatctttctaaagcacccatctgatcatgttgttctcctggtaaaaagttttctatggctccctctatccacattctaaagtcaaatggtgtcaggaaccaggctggtaagttaaatattttaagtggctttgttcaagacaaagaggagtaagagagactccagtgaagggaatgagagagtttaccatgtcctttctagaggagtttagaatcaataaaagaatgttgcactccaaattataccatgaaggctagcatatggtctctgaactacgggattaaatccaaagtcctcagtatgataccccaggcttttgtgatctgggccctgccttactctcatgcgtttactgttgctttgtcccacacttcaaatttgacatgggccacatatttagctgtttgtggaagataccatgacacttcatttctccaggcctttgttctcctcctgccaggatgccctttcccacccaatttactagacaaacattcatttccaagatgcagttcaaggatcatttctctgaagccttttctgactttacgaggtagcacagacctcattgtcccttttgtgttataataattccactatagcacctgtttcaacagtttgcacttacttgtttctatgggtgtctccctttactagaccataaacttcttgaaagcaagagccatacctctactcatttttgcattcaaacttcaagcattgataggaagaaaatgagtggttgttgaaaatagcaaaagcacagagatgagaaaagttagggtcaatcaagacatgtatagtgagaaaatcagtttgctgggtggcaagctcatttaatagagaatgggagccataattggaaagatagttttgaatcagattacaaagaatttaaggcaaacctaggaagtcttaataggagggtaggataagcagagcccatttgaagattttggtgcaagaagacacgatggaattgtagcaggaaatatggtaccaaatatgtaaagccattaaatatcataaaatttcccacccttttccagatcaaagaaaaggtgataagaggtagatacaaaaatgatggtctttttatttttctgaaagattttgtcacctcttagccaagacgattttgtgatattacaaaagaaatagcacattaaaactgtatgtttcatatgagttcagcttcagagaaaatattgtaggtattttcacactattattttaaagacagcaatgaaaagagatcaagtttaggtacttactcatcaagtgttactttataaccacatgtgtttgttttaattcttcaagaaactctactttgtcactgaatgaggatcaactagaggtgactggttaggcctgggacgaaggtcaaactgagctttgctgaattattttaaacaaaatagatttccaaactcatttaaatccaggaccaacctggaaagctaagcttgactcacattcttctgtaggggtaggaaagaatgcagagcactctacttggaaacaatggcttcaagaggcattgcccagaaaaaaccataaatatgactagaaggtccagatgaagattctatgctcaaccatttttctaaagaagagcaaggacaaaactcacgcctgggatagcatgtgaaaaacagatgttcgatgaataccatcttgtcgacttcttgcttttttacattttcatgttatattttccctttatcggtttgcagtcagctctaagcaaacagttaatgaatttttcacacttagaaacaaatgtctccattgtgacaatggagacaatttttgagcactgtctcaaatctggtgataatttttttttaagtgaaaggaagtttattaggaaagtaaaggaacaaagaatgactactccataggcagaacagcctggtgacaacttttaaaaagtaaaaactttattacaaaaacatttgtttattgtagaaaagctttattaaataaagctaagcaaaaataaggagggaaagatcacaatcagtatacatcttgcagacctttaaagaattatttttgaaaaaacggatatatactgttttgtaactatgtctcctaacaaatagtcgcaacatctcattaataaatattcacctgcagaattattttaaacggctgcatggcatttggatgtaccacaagatacacaacaaatttcctgatgttggccattttggttaattccactttactcacaattactaataacgttgcgagctatagcaataactttgaaactgcagagaatttccttaattctttcttacaattccagtagaatacgatggtgtcccttctccgacaaaagggaatatttgggcattatcactgccaaagaaaaatgcctttttgatgggtgaaaatgctacctcatcgcgttattggcaggtcctcgattatcggcgagtcactgaggttccgagaggggcgtctctgctcacgcaaacagctacccagccgcctcccacggtctgacctcagccaaggtgacgcggcttaaagtcaaccggcggaaagagagtcgaacgggacgcgtgcgtgggaaagcgcatgagcgtacgtgcgagcgcgcatgagcgtacgtgcgtgtgcgcgtgcgctcgagagcgtcatcgcccccgactgtggagaagtgtccggggtagccccgttacaggtatcgctggctaccctcctccttcgcccctcctttcctcctttacattcaaatcaagtcggggttgaatttcgagaggggagtccgaggacctggggcctgatttctttttctctcgccatgcttcttcgggctgtgtacatgtgtggtggtgcctgagaggcgatacagggaatggctacactcttttactcccgcccctggccttcgtagtacccttgaagtgatccactagtcgtaacccctccttccaccaatgattcaattggagaagtttagaggagtggaaagacttgtccccttcccccatcgcaagcttggtcacagagtgtattgccaacccatgtatccagacgctcagtctagggctcttggccctgggtagcgttttgaaaaggctggttatccttaagtactgaagattgataaagcccacttacttacttaaaagaatatgccctgaaatgtgttttctgtgccactgacaccagaaatgctatttagaagaagttatcagtaatcctgacaaaggatgcttcctgcagctcaaatcaggctggaggtgcctttatatttttcattgaattactgttttggtgactcgaatgaatcatcaattcatttatttgtcttcaaatgtctgacggcacttaaggtctaaaaaagaaggtaagtttaaacagatagtttgatgttaaggtataaattgaaagtatgtaacattttccctgtgttcattagcagctcatatcaagcacccaaaggaacaccttggatgtttttccttaggcccttaagctatttaaaagaatacctcctaggtgtgttgtggtcttttacaggaatgtgtttctgatcatctgaatcttaatcatgtccaactgcctgcaaaatttcctgaaaattacaagcactcgtcttctatgttcaagattatgccaacagttaagaagtaaaaggaagtttttcggaactgtgccaatatccagattgcataggcgagttgtcattacaggcattggcttagtgactcctcttggtgttggaactcacctggtttgggatcgtcttatcggaggagagagtggaattgtttcactggttggtgaagagtataagagtatcccttgcagtgttgctgcttatgtgccaagaggtagtgatgaaggtcagttcaatgaacaaaactttgtgtccaaatcagatatcaagtccatgtcttctcccaccatcatggccattggggctgcagaattagccatgaaggattctggctggcatcctcagtcagaagctgatcaagtggctactggtgttgcaattggcatgggaatgattcctcttgaagttgtttctgaaactgctttgaattttcagacaaaaggttacaataaagttagcccattttttgtccctaagattctggtcaatatggcagcaggccaggtcagcattcgatataaactcaagggcccaaatcatgcagtatccacagcctgtaccacaggagctcatgctgtgggagactcatttagatttatagcccatggtgatgctgatgtgatggtggctggaggtacagattcttgtattagccctttatctcttgctgggttttccagagcccgggctctgagcacaaactcagatcccaagttggcatgtcgaccatttcatccaaagagagatggttttgtaatgggagaaggtgcagctgtgctggtgctggaagaatatgaacatgctgttcaaagaagagcccggatctatgcagaagttttgggctatggactctcaggtgatgctggtcacataactgcccctgatcctgaaggagaaggtgccttaaggtaaagatgggttatttccttcgaaatatttcttcaaataagacactttattgggaatcccaaattagggaagttgtagtgtctggccttggtgtacagtatctctgttgtttttcttttttagactaaacaagattgtttagttctttgcttaagacatttgaagtatttcaaagcatttgaacatacttacaaaaattgcatttgagttaaaaaccaatggagttgtggaaaagaccatgtgtgtctttgccaacttttcacgcctgcatttgtgcttaagcatcagtgtgctccctcacaaagtcctcctctttgacccttcatcagacttggaaagtaaagtcaacccttctagatgtgtctggttttgctccatttcaacaggattctgttcttttcaaatcagcacttctcaaactataatcacctagggatcttatttaaaatgctaattctgattctgtaggtctagggtggtgcttgagattctgttttgttttgtttttttagagacagggtctctctgtattgcccatgctggtcttatctcactgcagtctctaactcctgggctcaagcaatcctctcacctcagcttcctgagtagctgggactacaggaatgcgccactgagaccagttttcttttttttgaatttgtttgtagagatggggtttcactttatttcccaggctgagagattctgtagttctaacaggtgatggtgatactgctggtttaaggactacatttaagttaactgttatagattagtgcatttaaaatgcaaaaaaataaaaataaaaagtccctgataatgtgttaatagatagctaatagtttagctttcttaaatcatattatgttttactcagttaaattagccagagttagcaaccttttctgtaatgggaaaaatatagtaaatatttttggctttgtgggccatggagtctgttgcaactaatcaactctgccattgtcatgtgaaagcagccgtagacagtatgtaaatgtgtgggcatgaatgtgttccaatgaaactatttacaaaaataggcatctagccagggccatagtttacctacccctaaattatacatttgaattttattttatttgtttttgtttgtttgtttttcttttttctttcttttttttttttttagtagagttggggtcttgctatgttgccagagcaagagctggtctcaaactcctggcctcaagcagtcctcctgccttggcctcccaaagtgctgggattacaggtgtgagctaccatgcctggcctacttttgaattttagtgagtagttgctggtggtaaaaatgtcaagcatagtaacaaaatagatgaagaaatggttatgttcacaggaaacctttcagcatacttcaaattatactctgagctggctgttaagaaatatatatacacacacaaacacacatacatacatgtatatttctcttaggaactaaaggaagatgacatccaaaacgttttcagaggtccttttagatataatttttactcttaagtttgtttggcttagcttgcctttgtactttttgtttagaattcttatagcctaaataaagaggattttgaaagattatttgaaacaatgaaacagtagattattgggaagtatgccaagttttgaatttaaatgtgaaagaaaaatcataattataattctcataaaaaattgccacactccaaaaatccctagaacaaaaattattctagtcttgagtcaacatggtattttttccccaaggaaaactgccaatgcaaataaatgaaattatgttttatttgagattatacaatcttgcattggcttgtgtgtttaactcttggtgatgaaccagtccaaggtagtgagtgtgactcattattcccatacagatggcatcctaactcacatggtaatccaagatagtgttccgttactagagcaagggattcttttcatccagtgtacttggatacctacatttgtttcacataagccatacagataaagagacttttgttaaaattaaacttagtcctgataaatgtcttttcttgttttattaggtgtatggctgctgctttaaaagatgcaggtgtgcagcctgaggagatatcctatatcaatgcacatgctacttccacaccattgggagatgctgctgaaaacaaagctatcaaacatctcttcaaagaccatgcatatgcccttgcagtttcctcaactaagggagcaacaggacatctgctgggagctgcaggggcagtcgaggcagcttttaccacattagcttgttattatcaaaaactaccacctactttaaacctggattgttcggaaccagaatttgatctcaactatgttccactaaaggcacaggaatggaaaactgagaaaagatttattggcctcaccaattcctttggttttggtggtactaatgcaacactttgtattgctggactgtagaacatataatttgtaattaaatactgatttttaaatgctatatgtgaagaaattatgcatttatgtattgatacccagatatactttatgttagggtttctccaccttggcactattaatatttgggtaagataattctttgttgggaaaagggggattgtactgtacattgttgggtgtttaacaccatcctgattgcttcctaatctattccaatagcactctcttccccagttgtgacaaccaaaagtgtttccagatattgccaaatgttttctggggaacaaaataaccccacccctcctgcatcccgccacctatgagaaccatggatctatattttcctaatactttaggtcaaacaattttctataacatttgacctgctcctatccctttcaactcctttttgctaggcagggttgctatactatagtactccaggcgtaccattcccatacaatatataggaaggaatataacaaagtttgcatcagcattctttgagttaaactgtcagccagtaatgatctatttactccttatacacctagccctgttttcttcatattatccatactgtaattcagtataatgaaatttctctaaactcccaagccatcagttctctgaaagaagaaactgaaattgatttgacatgtcttattctttttgtctttatgttggcacctagtgattaacggagataaaaatctttgggacgtggagcagaaattgttcatgacttgggccacgtccccttggctttcctctaactttttttaagctttgctagtttcctgtgttttcccaacatcctactataagtgttggtggttcctctacttctctgccttgttttctctaacacggagtgttcatccgccgcagcctggaagtgttggtagggggaagggaacacattccccagaggcaatactcgaccaatgagggatgacggtggctaagtgcctcagcctcctttcagaagggtatctatggttctccacagtttttcagagggtccccagtgaatcggaagtttagttacccacagcattagctagctctaatactcccttcactggcttttattttccctttcccatgctccctgattgttaatctcattcccaggaatcacctcccaaacaaactgcttgttctgaggttctgctttctgggcaactcaaactaagaacgtttatgttgtagtgggggtttatatatcaacgggatagagtgaataggggataaacagggtgtgtgtatttctgctgaaatgaatagagtttcccacattgcaatagactggacacattgcctgcccactgactttgactatagtactttatcccctttatgccaaagactccagctgtgtcttcacataactataatcagttttaattttcatgagcacacatttattcattcaactgaagtctgttgggtgctaacatagacctggctttgtactggtcaccagtgatgaagagagtatgtcagagaaagtttcctaaaggaagctgaggctgtaagggtgaacaggtcttagccaggttgaaggagaagataaagaaggaagggtgttccagtcagggaattcaatgcgggaaggtttagaagtcagaacatttgtactaaacataggtgcatataccctaagatggattaggaaataatggcaaaaaatctggaaaggtaggtcacaaataactacaagttttgttcaaggcagtaagggtaataggaagccatttaaggtttgggatggtgtgatggctttgtaatgtgtcagtttggcgaggctgaactacatttcacagcattccctttattgtatgttctcggttagggtgggccataggaaattcttgtgggagatttggaggatggaagtgaagcagcagctgttttgtagctcatgcatgttgcttaatctgctagctcatcttggtgtgagactggctgagtcttcaactgcttcacctttccctggatcctctgtcagtttccctgactcctggaccaggtgtgtgtttcgttccatgataatgaaggacctgaccttctgccccataccaccaaagtcagaggccataagaactgacagattcctttctgtcactttgtttgtggattccatcttgttactggaatttacatccatcttcccttcccaactgcctgccctgtggacttcaaactccatcatcagaagatgacaggcgaacatagctgcattacagaaactttaaccagttctcacaattgtgtaactggttacacaaactgtcaaatccctatagcagatatctatatatgtcttagtggttctatttctctgagtcaacattgactgatacatgtgaagaagaagggtttattgggggtgacataatcatattttcttttggaaacatcaccctggctgcagagtgaagaacagcttggagggaagcttgattcccataagggaatacaatcagacggtattgcaaaatgtaggtaagaaaagatggtggcctggatgaagaagaatattttgacccaagtttcttccaaaattgaaaatcatgtgtttttaaaaaatcaactttaccagggcataatttatatatcaaatacatttatatgccattttaagtgtacaggtcaattaattttgatataagtatgcacacacatggaaccaccacctcaatcaaagaacatttctgataccccaaaattccttttgcccttttgcagtcagtgcccccagctccagaaaatcactgaagagctttctgttactataggtaagatgtacttttctagaattttaaataagtggagtcatacagaatataacctttcgtgcctgccttcttataatgtttttgaggtttatccatgttattgattgtgtcagtaattcatttctcttttattgctgaattttaaaaattatctcttttttttttttgagatgacgtttcgctctgctgcccaggctggagcgcaatgacgcgatctcagctcactgcaacctctgtctcccaggttcaagcaattctcctgccttagcctcccgagtagctaggattacaggcacctgccagcacacccggctaatttttgtatatttagtagagatgggttttcaccatgttgaccaggctggtcgcaaactcctgacttcaggtgatccacccgcctcagcctcccaaagtgctgggattacagacgtgagccaccacgcccggccctaaaaattctttaatcagtatagatacccttgacttttactctttccttagtccctacttagcttattttttaactttttactgtcactgttttttaaaaaaatgaatatgtattgccttttaaacagaaaaaagacaggatttttttaaaaattatagaaccaagatagtttctaaagcaaagaattcttccgccccgaatcacaaatgtacaagggtttaacaaaggacctacacacacgcgcacacacacttttatatatattatttagattaccagaaatactgctagaaattttagaatttcctgtggtttagtgccatgagtatatgatgagttttggatccaaatatcctaaccttatccccagggtctttatatttaaggaagaaataaaacaagataaaattaataatagttgattcatatgtttgttcaggtcttcagaagcagacatcaaaacagaaatttctatgcaagaaatttgttgtgaaggatagagggtgagagcaggagaatgcagagagagccttccttcccacaactaggaaggagaggggcacaggaatgaaagaggattgggtaggaagggtgtcaatctgaagtaccattctaataaagttttggccaggctgatgggcagtttgcaatcaaaatctcttgttaaaggagttccacatctctccaggatgggcctgcattaggacccatactgcgcgtggtcattggctgtgagctgtccaggcacagcaggagatctgaactgtccatttttcatgccattgtaatctaccccttgcaccacagacatctgtttctccaagcaggttcatgggacagctctttcatggttcctgtgggcctctctttctgaggaaaaatttagatgagggtagttagtaggataaataatagcctctgaggctgcagttggtctcaggtccacaaatgctattcctcctctctctaatccactattcattctaaattccccttgccctcagctatcatctcgtcagaccttggtggctgggtggtataacccaaaccttcagtcctcaggaatgtaagcccttggcaatcataccatcaccttttcatacagtggctgctgcctgtatcatagagcactgggatcaggaggcaaggaaatgccaggagatacccacgtagatcacctagattccacatatattctccctgtcctaattgtgtgaacacaacactaccttctccagcggattagggtcaactctcactgttagtatgttgactttatggttcctgggcacaagaactccaaagtgtcctagtggcatctacatcttgttgttcaatgtaatacttgtgtctcctggcaagagtgcgtatcctttggagatcaggacttccaacttaaataatttgtttacttagcttaaataaaatcttatttagttgcagtaatacatctctgcaatgcccagaattgcaaaatagaaagtatgaaattcctcattgtgactgaatcactggaaataacagtaagtggggccattcatgttttccaactccctttgtttctgaacctacatgttcttcttattgcagacttagccccatataaaagtttttgatgtaagcatgtgctgcatcttgaggatggcaccacatccagtcagaattgtcactgagctgttgattcgggtatgcctttagaaggcagttccagcttctttgaggctggctgcttttggatgacatgatatgtgatacaaactatggaaccgtggtcatagggccatcttatttgctgtacaataggtccccctgctcagatgctatgtcataagggattccatgccggtggattatttattccataagcttgcagatagtggtgctggctgaggctctgtgggtaggaaaggcaaacccacatctgaaataggtatctatctatacctatgaagatgaaccacaggtacttttgaggtaggttggacactcagaggcaacagtagggagatatcttggtaagtggaagtccatattttgagcccacaggtagccttcgtttctgccactgtaacctcttgattcacaggcctttcatgtaagttatatggcagccaatgacaaaggctggctactgtcaattggcaaattcattttgtctacttggctatttagtccctctactgtgatggatactttctggtaggtataattgtgtgatgcagaaatctttatccttcatcatctgtatgtccatccacatgcctctactaaagatactgttctgctctttcagaccttttccttctagacccctgactaaaggccaggcctttggacactacccaggaatttttatatattcttacttcttgggccacttctactgtatgaagtgagtaaccagatgaagctctgcctattgagaagatttttccttcccaacatctttcaaggctacccctgaatgtggctgtgatgcagctgccattcattttctacttgaactactgcaagacatctttaggaggtagaatcaacaggatttggtaattgataccttcaccttccccacctaattccttgcttcttaatcttccctattctccgtccccacctagacaaattccaccagagaagggatttttgctatttctttcactgccatagttcctgtgtctagaacagtacctggcacgaacttggtctcaacaaacatttgatgagtgaacaatgaatgaatctcagtaaactgctccaccaaccacgtagagctcagatcacaagactagtaagaatcatccttgatttctcccttttcctcattccctttcctaatccttcaacaaatctagccaattatattttcaaaatatgccccgagtagtcactgttctccatttctaccactgttatcctttcttctctgaactgcaagcgccaactttttggtcttcctgcttccactctccattgctttctaagtattattcattcttgtaatagctgacaaattgatctttttacaatataaatcagatcatgttatttccctgctgaaaatcttctgatggcttcccatttgactcaggttgaattcaaacaccttaccaaggtctatgagacctcacaggacctccctctctaatctcacctcatactgcttgtgttcaaactgtgctggtgtatcagcatgtgtatcctcaaaaacaccaagcttatttctgctcttgtatggaacacatttttatttatgtgaaaattatcttcctctttctatttgagtttcagtacaaatatctcttcttgagagagaccttctctagccacccattctaaagtaaccccttttcttccttcccaatccttctccatccacatcccagtggtgttgttgaacacctctttgcttttccagagtagtgcaatgggagaaatgggagattgggcttgataagcctggatctaaatcactgtcactgagcctaatttttctcatgaaaatagattcaatctgtaaaatggagtcaaacctgtttaacaatggttttgagactcaaatccagttgctcaatatactaaatataatcttcacatctctttcactattagaaattatcttttgtaaggaaaaatatacatctttagggcttttttcttttctctggtagtatataagcttcatggcagagagattttgtcaaccttgtgaacaagaatggtattcccagaaatggtattcccagaactcagcaaagtatgtggcacacacatatgtacacatatatacatacacacacaaacacatataccaacaaaaccaaaaatttttgttccaacagtaactgaaaatatctatgttataggaaggacaacaaagaggagaatttcatccatggttttagaaaagtaagagagctattgttactgtcaagagtgagtgcaaggaatggacctttagagccataactagtggaggcactaatgatcattctctgtctagttacttgagactcatgtttgatctttggtaccaaagaagaaaggatgatggttatgttggtaatttctttagaattgcttagcacgagcaacatatcttgaattctaagagactaaatacgttatcttgaacaaaactgcctctagcttaggaatcagctaatttatttttttttctgcaaagggccagatggtaaatatttttggctatgtgagccatatggtctcatttgcaacttctcaactctgcccttatagtgcaaaagcagccataggaaaaaaatacaaaaacaaatgggtatggcaggttttggccttcaagaagccagatttgcccaatgggctgtagtttttgactcttgctctaactctgcaaggaagtacattctctgaaatgtttagccggctgatttttctgtgtcagtggaatacccaaaaattttgcagtataagattagacagctgaattttggtactgtaataataacaactgtaacaacaccaccaccaccataaatagctagtgtttatgtgccaggcattgtttcaagtgcctctcttaatatcggcccatttaattatcacaagagctatgtcatttaagtaatattgttgtcctcattttatggataagaaatctgaagtgtagtgagattaaaaagctggtccagtcacacagccaaagactggcaaagcagagactgaaaactgtcttctgactccaaagagcaggtttttaacttcatgaatataccacctttccacagagcaagcactgaaatcttatagcgaggggcagagctaactctttgggaccctgttctgagttgggagaaggaatgattcaaatttgattgaccatctcattttatttctttggaaaagaagaaagatgtgatctgttttgttattgcagttactgacaaataatttaagtggataaagtctgataaccaaatcccaacctaaaaattaaaatgattcctctctagatataaatattctactcttttcaggtttatggtttgtgaatctttatttataattttttaaatattttatcacaatactttaagggaaggactctttaatttacaggtaaaaacacctgtggtatatttttacgcatataaaaatatcataggtattttatatatatagtatttataccataggtaaaagcacagatagtatataatatgtgctcatatatgctcattttaaaaatgtaaaatagtgcagaagctatgtcagtcctttctccacatccctgaccgcttgttagtaacactgtgcaacctcacagtgaactaaaatatgtgttgccattttgatctagtctaacatcagcaaacagcatataagaactttctttatcctttcattgcttaattctaccatggccaacctctgttaaaggtagtctggtagtgaataacctaccagaagatctgtttgcttttccagagtggtgcaatgggagaaatgggagagttgggcttgataagcctggatctaagtcactagcactgggcctaatttttctcacgaagatagagtcaatctgtaaaatggagtcaatatattacctgtctaacaatggtcttgagactcaaatccatttgttcaatatactaaatataatcctctgtacaaagagtagatattatatttaaagagtagtgtgttgtttttcatattaatgaattatccaggagcttgattgctaagtacagaaaaatgtattgtttttttattttatcatttgtatacatttatatcaatttattattattactactactattattatcattgtgttatccttgtgacctatttttttctttttttgagatggagtcttgctttgtcacccaggctggagtgcaatggctcagtctaggctcactgcagcctctacctcccgggttcaagcgattctcctgcctcagcctcccaagtaactgagactacaggtgcatgccaccatactcggctaatttttgtatttttagtagagatggggtttcaccatattggccaggctggtcttaaacccctgaccttgtgatccgcccacctcagcctcctaaagtgctaggattatagacgtgagccacaccgtgtgtggtgtgacctattattaaatggagaaaagctttgtccaggcaaaaagaaccatatccagactttaggaatttcccctacagtaagcagtctaaggcattgaaatattaacaaagaagcttatgaaattccttctgtagagatgaaaggttagaaagctgcctttcctggctagcttatgcccacccctttttagcagtaggggtggattagatgacctctcaaggttctttctagctatggttttgttttttgatgtctacttaaagattatgctaatattgctgatgtgaaatcctttgtacacaaggatggttgaaaacactggctcatgatctgaatctatgcctgcctggttaaaactgtatacttgaaattaacagggctcaaatgctcatgttttatacaaaccattgggtcttttttttcttctcaagaagatttttttcttagttgtcttctgttctaaagcaagagggagaaggttgataaaaatgcattcagttatagaaggaattagattattttaataactaagctcagttatattgtggttcacaaaaatgaatgaataataatgtagagtgcaaagatccaggaggtaatcccctagacgagacattgctggagcagcatattaactagaaaagagccattgttag

SEQ ID NO: 451 - DNA, 1522 bp, Homo sapiens
gtgcgcgtgcgctcgagagcgtcatcgcccccgactgtggagaagtgtccggggtagccccgttacaggaatgtgtttctgatcatctgaatcttaatcatgtccaactgcctgcaaaatttcctgaaaattacaagcactcgtcttctatgttcaagattatgccaacagttaagaagtaaaaggaagtttttcggaactgtgccaatatccagattgcataggcgagttgtcattacaggcattggcttagtgactcctcttggtgttggaactcacctggtttgggatcgtcttatcggaggagagagtggaattgtttcactggttggtgaagagtataagagtatcccttgcagtgttgctgcttatgtgccaagaggtagtgatgaaggtcagttcaatgaacaaaactttgtgtccaaatcagatatcaagtccatgtcttctcccaccatcatggccattggggctgcagaattagccatgaaggattctggctggcatcctcagtcagaagctgatcaagtggctactggtgttgcaattggcatgggaatgattcctcttgaagttgtttctgaaactgctttgaattttcagacaaaaggttacaataaagttagcccattttttgtccctaagattctggtcaatatggcagcaggccaggtcagcattcgatataaactcaagggcccaaatcatgcagtatccacagcctgtaccacaggagctcatgctgtgggagactcatttagatttatagcccatggtgatgctgatgtgatggtggctggaggtacagattcttgtattagccctttatctcttgctgggttttccagagcccgggctctgagcacaaactcagatcccaagttggcatgtcgaccatttcatccaaagagagatggttttgtaatgggagaaggtgcagctgtgctggtgctggaagaatatgaacatgctgttcaaagaagagcccggatctatgcagaagttttgggctatggactctcaggtgatgctggtcacataactgcccctgatcctgaaggagaaggtgccttaaggtgtatggctgctgctttaaaagatgcaggtgtgcagcctgaggagatatcctatatcaatgcacatgctacttccacaccattgggagatgctgctgaaaacaaagctatcaaacatctcttcaaagaccatgcatatgcccttgcagtttcctcaactaagggagcaacaggacatctgctgggagctgcaggggcagtcgaggcagcttttaccacattagcttgttattatcaaaaactaccacctactttaaacctggattgttcggaaccagaatttgatctcaactatgttccactaaaggcacaggaatggaaaactgagaaaagatttattggcctcaccaattcctttggttttggtggtactaatgcaacactttgtattgctggactgtagaacatataatttgtaattaaatactgatttttaaatgctatat

SEQ ID NO: 452 - protein, 457 aa, Homo sapiens
MSNCLQNFLKITSTRLLCSRLCQQLRSKRKFFGTVPISRLHRRVVITGIGLVTPLGVGTHLVWDRLIGGESGIVSLVGEEYKSIPCSVAAYVPRGSDEGQFNEQNFVSKSDIKSMSSPTIMAIGAAELAMKDSGWHPQSEADQVATGVAIGMGMIPLEVVSETALNFQTKGYNKVSPFFVPKILVNMAAGQVSIRYKLKGPNHAVSTACTTGAHAVGDSFRFIAHGDADVMVAGGTDSCISPLSLAGFSRARALSTNSDPKLACRPFHPKRDGFVMGEGAAVLVLEEYEHAVQRRARIYAEVLGYGLSGDAGHITAPDPEGEGALRCMAAALKDAGVQPEEISYINAHATSTPLGDAAENKAIKHLFKDHAYAVSSTKGATGHLLGAAGAVEAAFTTLACYYQKLPPTLNLDCSEPEFDLNYVPLKAQEWKTEKRFIGLTNSFGFGGTNATLCIAGL

SEQ ID NO: 453 - DNA, 1043 bp, Homo sapiens
cgcccccgactgtggagaagtgtccggggtagccccgttacaggaatgtgtttctgatcatctgaatcttaatcatgtccaactgcctgcaaaatttcctgaaaattacaagcactcgtcttctatgttcaagattatgccaacagttaagaagtaaaaggaagtttttcggaactgtgccaatatccagattgcataggcgagttgtcattacaggcattggcttagtgactcctcttggtgttggaactcacctggtttgggatcgtcttatcggaggagagagtggaattgtttcactggttggtgaagagtataagagtatcccttgcagtgttgctgcttatgtgccaagaggtagtgatgaagagcccgggctctgagcacaaactcagatcccaagttggcatgtcgaccatttcatccaaagagagatggttttgtaatgggagaaggtgcagctgtgctggtgctggaagaatatgaacatgctgttcaaagaagagcccggatctatgcagaagttttgggctatggactctcaggtgatgctggtcacataactgcccctgatcctgaaggagaaggtgccttaaggtgtatggctgctgctttaaaagatgcaggtgtgcagcctgaggagatatcctatatcaatgcacatgctacttccacaccattgggagatgctgctgaaaacaaagctatcaaacatctcttcaaagaccatgcatatgcccttgcagtttcctcaactaagggagcaacaggacatctgctgggagctgcaggggcagtcgaggcagcttttaccacattagcttgttattatcaaaaactaccacctactttaaacctggattgttcggaaccagaatttgatctcaactatgttccactaaaggcacaggaatggaaaactgagaaaagatttattggcctcaccaattcctttggttttggtggtactaatgcaacactttgtattgctggactgtagaacatataatttgtaattaaatactgatttttaaatgctatat

SEQ ID NO: 454 - protein, 182 aa, Homo sapiens
MGEGAAVLVLEEYEHAVQRRARIYAEVLGYGLSGDAGHITAPDPEGEGALRCMAAALKDAGVQPEEISYINAHATSTPLGDAAENKAIKHLFKDHAYAVSSTKGATGHLLGAAGAVEAAFTTLACYYQKLPPTLNLDCSEPEFDLNYVPLKAQEWKTEKRFIGLTNSFGFGGTNATLCIAGL

SEQ ID NO: 455 - DNA, 71850 bp, Mus musculus
  misc_feature (1)...(71850): n = A,T,C or G
tggattggttcttgcctctgaaactagccacttagcattggataaataattaattctttccaataaagagcatgaagattaattgatggtcaataaagtacaaggatgtacggttcattgtttaaagttattttttcaatattgaaatcatatcttcacttatgaggaaaagagggctgaacatgttaaatcagcactggccataaaaccccatcatctccacaaagatatgaaacacagtcaaactgagttgtaaagtcaagtgtttcatgccatctcttccagtggtcttatttcccgttggactttatctccaatgacccagaaaccttcagggtctccagaccccattttcagttccattgaaggtttctgggagcatttgtgtacgccataatacacatcccccctgagggtatggccagctgcttgtggatagatgctttgattttgagtatcccagagacaaagactcatcaaccaaaggtggtatcacaaatgattggtggcttgccctgtcttcagggcagtctctcactctgggaactatcttgtggctggttctgatggtgagctgtatttacagattactctttcagatccagatgaattttgcttacttgacacaagcccatttagggtaccagaaacccagaacgacacaaccttggaaataagacgagagtcagaaagcctcatgacccaaggtcattctccacagcattgttctgacccaggattatgagcttttgcaaagccctatccctgtgacatctgtcagcattgacttacacaaggagattgagtttatcaaacagtactgcctcttaaaatgtagcactaggctgaaaatgggactgtctaactcaaacatatctattattcagccacttgacattttacttagaatattgtgtaaggactgatggtttattcatctaggtggcaatattctgtgaatggcaggcttcacccctgattcctcatcgttatcccacactatgtagctctaaaggccataactattttaagttaaaccttagaattaatgaagagagatttactggattctttgtttgactagctctgaaaagaactccttataataagcctcagatataaaagtaaaggtcaaaatccatgtaagtaagatccactgccctttacaaaggggaaaatacatgttaatcttttgcaccttcaaccagataggtttctatggagacagaaatctgatatggagacaccccacttaatattcatgagctgtcttagagtgcagtttcttcttattgttcatggtactcataggtgtgatgctcaatccgaactttctttggaaggatgattctatacctgtgcctatactcccccgcccccgcccccgcccccgacaaaggactggagataatctgaacgctttgcaggtagtcacagtccctccaaagctcactaccaaaagcagagagtcacactaatgagctaacccattgttttccccaactgactgaaagtcatttgtattcatttattgttatattgtgtatatagtgtatactattttggaagctggtttcttcggtttttcaggacagtgatgttttctggagatatgcaagctaatacacactttttcttcaagttgtcctttaagttacatggttttttgaagatctccgagcaggtccctggattgcttttattaatttttaaagacggtaaccttgggcttacccatacacttctcacctacattctgtagggttcactggtatttccttatgatttttagcagaagtactaaaaagtcacatgtagcatttatgacatgacccagagaatatctatgttccagccccaccccacctctcatctttatatcctcacttgagacagcctctgacttccttaggaaatggttttttatctcactgggttcaacagaagtgaattctgcaacgttctttttaagcaactattctgagctctaagggggagtgcctggagtgctctttctctgtcagctctgacgctgttgaagctagtgcatgtccaatgaaacttgggggaagcacggggaagctccatagcctaaaggctttgctgtgggtcacagaaaggagataccatgtcacatgtagctctactcggctttggcctggcgcttctttccttcccttaacccaatctgactaacctacaaagcgctgacattggagcatattttaggatcgtcttggtatttactaggtaatttccagaacattttcattgtatgaatgtgccacattttcgttattcatcaatccatcatcagagcagctaggttttttccaatttctgcccatcatagatagccagaatgagcatgaatgcttcgtaaatagaacgtagaatcagttgggtgtatgcctaagtgtgatattgctggatcttgtggtagatctgttttcagctttttgataaatttagttgaaatggggacagcatagaatagctagcaccctttgtgacaatgttgtagaaatactaatataaaatgaagatgttaagacaagtcccagtacacaacttccccttgagaagatctgcttccttgggtcttcttcagcttccttgctgcgctactttatacagttgatttattatatctagtatatattatatgtatctattataaatatatgcatactcagctctagaggaccactgtagaagcacacatagatactctatttcacagataagggaagcacatttagaatacacagcttcaaaattccagaccttcccagcataggaagtgcttggacagatactttaagcctggggtggtcccagacttccaggagcctagcattactccagatgggctaacatggagccccatgccaccactataccactatgtgtgtttgtgtgtgtttgtgtgtgtgtgtgtgtgtgtgtgtgtgttgtagtatgtgtatggggggggtgagagtgggagggatgggtgtgtggttgttattaggaatcagactcaatctcctgcactgagctacttcctagatggaataagtgttctcaggggctttgtaattttgcagtcaggtctctctgcaaccttccctttcatcctcacctctccccttcatgttactcctcctctccccactgttcttcctcctctttctgatgctcacaatgtgttgcccaggctggtcttgatcacatgggctcagtcactcatcctgcctcagccacccaggtgctggaaccacaggcacaggccattatacccaccttcaaatgccctaaatttcaaaagccatgagccaaagtctgaaaccaagtaagtatgctcagaaagtgtagtaaaccactatagatgcccaccccccccaaaaaaaatctcacctaccatttttgtctttctctactcagaagatgagcctagtcctgtcaccactgtagaggccatgggacctttgagaatggcgctggcaaatgaggtggaccacatttatgcaaaagccaactttattcagagcctcagacaatttaaagttgtcatgatttcaagctatatacagtcacaaggacaagccacatatgggggaaaatctttccactgaggcaaataaacaaatagcaaagccagttataatctgaagcaaactcactcctacccactacacctggcaggagcacgagagcatgtcccaagagcaatctgtgttttgaagaaactgaggccacaagatttttattttcttggagtgttctcacaatatctcagaattctcttcattattacccacctgtttcccttcacaaagacaacctgctcaatcccctccagagaggacatgtcctagccattttacaatgtatctgaggacaatggtgttaactattcagaacctacaaaccagttgaggtttgataagcatgtatgtttctattctccagcactagagaatgaggatattggaagacacccttctctcatgagcactccacatccaagaaaatacatgagctgaaaaaaaaatgtaaaatgttatctttagtcttttgaaacatcactctatgtagttctgactgacctggaacttgctatatagagcaggctagccttgaactcacagaaacacacctgtctctgcctcccaagtgctgggattaaaggtatgtgccaccacacctgactaaaacaatatctttgaaaaaataggaacaggccttggtacacagggagtcctccctattctagctgagaggcaatattgaatattcaataatggctatgggccttcaggctcctaacagaaccaggagcatccagagtcagatcaagtggcatttactctcgatgaggagtgcaagaagaaatcatatgaagtgtccttgaagctggggagagcttggagtgctcacaggacaaggacactgggcaggagtcaagggaacaagagaaatgagtgggtgagaacatagggaaatccaatgtcaagggcagtggcttcactctaaatgcagtaagtggtcaacacagggccatggagtaacctggtcagctaattttaaacatcactcaggagccaggtcaggaaagaaagaactagaaaagtctgcacacctgctaaagggttgggcataggtagtgaagggaaggtgggtgtcaaggatttagatggttatttgcttagaatcctaaatggatggtggtcctgagaccagaagacagagaggacaccagactacaaggttctagagagtgggagatgtctgagtggtacaattgtagttctgaagtgtgactagattctaataagaatttattggtgccgggcagtggtggtgcatgcctttagccccagcacttgtgaggcaaaggcaggcagatttctgagttcaaggccagccagatctacagagtgagttccaggacagccagggctacacatagggaaaaaaaggagaaaagaaaaaaaagaaaaagaaaaagaaaaaagaagaaaaaaataatttactgataaaacagattgggggggggctatatttagcagataggccaaagttttctgcccagggatctggactgaaaatgtagactatgcaaacaagtctggagctacagcccttcagaggtataatgtcagtcattactgccatgtgtaggcctttgcctctgattgcacccaccactatttaagtgttttacttaagtaaattccctaatctctaaaataaggcaaaaatacttatgcctctattgtgaacaaagaaactacgacaatttatttctctcatgagaaaaatatttagaagttgtcagtaaagtgcaatgcgacagtgttgtggacttcaacaacgtagagcccttcctgccatttacccaccatcctcaatgacaaaagtagtagcttagactccagtcatcacatagattgttgaaagaagttaaaaagcacaatggagtaaatgccacgcccctgatctctttgaagctttttttggagttttctagagattgtttgcactactctatcacacaaaatgttggtcagaattttagaaacatccacaaaagacttacaagtatgattttctcccaggaagcatatgcacaaacaggtcttatagtatctactactccagcagaaagcaagctctgtccttagggcagaaggcaggtgcccgagcccaatgagtggccttaggttgactcattgcggggtcggtggtgaggtcatctgcgcagtctcctcagttctgagatctatacagtttttaaaaagccagttcagagttagcatcttctgtccctggccagcttacagcatgcttctctgcccaaggccagctcttaagtattctcctctggctatgatccttgagacaaacgctccttatgtccaaatgtgaaacccatgacactttgtttaactttgttccttcctggtttgtccttccctatgcctgggaactcaaaagaggcaataccagcttggtgtagaaggcagagttttaagaactaacggaagttcatcacgaagctgaacagggagcacaatcctaggatgcccgtatacatgcagaacgccgacaactgttgggcatccagctttgtttccaaggtgaacagcctggagcactttagggatcttgaggatgacacactggactcccagccctcaggagaccaagacaggaggactgtgagctagagaccagtcagggattcaccatgaaactctctcaaggttcttgatgctgagatctcatcagtgttgatggaatccggttttctacatgggtatcaaagtttaaatgtttctcaattgaacgctatgtgcaaatgtatttgggaacatcatttcaaataaaggaaaagacatggggagggagaacaagagcaactgtcctccttgagaaccctttgaggtttgctgtctgcctgcagacctaagggattagtactatcctttgagcctatttctttccacctatagagaaaggtgtacttacataataaaccatggactaacatactcctggtgattactgtgaaagccctccccagtttattgtgcaccgtgtgacgcactgtgggtcagataactctgtttctcaagcagaataactggaaactgaatagctagcttaagactcttcagtaaagcatcacctgatcgatatcacccaggtggggcagactactatgtcatttcataacaggcaatcccagtctataaccagtaactggtgccattgctttcctgttcaatgtgatttaaccagttctgctaccaccaactacagtcaccagcatccttataagagtgcccccatctgttgcgagaagaacagcattcacaagagtgtagttctgattcctgtaaaacatacaagttacactagggggctggagaggcagctcagtggtcaggagtgcttactgttcttgcagaggacctcattctaatttccagcactctctttgggaacctcacaattcccacatgaaaccccagctccaaggaaatctgactgctctgactgacacagtcaggcaccagcactcacatatgtacagatacctacacataattaagaacaatgtgtggggtggggtggaagaagaaagcaggcacaaagaggtttcaaatgagggtgagggaggaacacacatgtggcgtgaaaacagaagcaaagaaaccaggcaagattggggagcggagatggggaaggacatggggtatgaatacgaacagcataacagatgtaaagagcatacaacaataaaactggtcacttcacttactaactaaaaataataaccacaaagaaaaaaaaactggtttgaaaagacagataaggagatgagtcttttcctagtcaaaggtcacaaagagaattcaatcaaactacagggggctttcagtatgaaaccagactctgagctgtttcccatatccccagtatgtccatgttattatagagaaggacatttccgcgacactcagagaccttctgagcattgtgattttgtgtccccttggaagaaaagttgaaactttggctttcagtggtagaaagcaagaaatggcctgaatctacattgtcagtaagacaagggacagaacagatagtgtgctgggtacagccacaaaatcagagatccagtgcacatctccaagtagaagtgacaaatacagaaatggatgctctcagccaaccattgaacggagcacagggtccccaatggagaatttagagaaaggcaaggagctgaaggggtttgcagccccataggagaaacaacaatatgaaccaaccagtacccccagagttcccagagactaaaccaccaaccaaagaatacacatggagggatccatttctccagtcacttatgtagctgagaatggccttgtcagatatcaatgggaggagaggtccttggtcctgtgaaggctcaatgccccagtgtaagggaatgccagggccaggaagcaggagtgtgtgggtaggggagcaaggggaggaagaggggagggggggttctggaaggtaaaccaggaaagggaataatatttgaaatgtaaataaagaaaatatctaatttttttaaaaaaagaagctataacacatgggacttcctggaaagagagtactgaatggttaaatttaagatttaatttgagaaattttagatgaataaatgggatcagacagcaaacataagtgttggatcctctttcctggagttggatgaaaatagtcattgcttctgatgagatgttttgacgttttcagttagcagaaacatgctaactgtaatggcatgtgcatgtgttcataaagacacttgcaaataaatcaatttgttttcatcagagtatacaaacactgctaaaatgctagctgtgttcctggttcctcatggaaactgtaactcgtgactgttcggaactatgaacgttatatttttccaggttcaagtacaccaattggagagagcattcctttactaatgttgtgttttatggataggttgtgattttccaaggagtgtaattacaacccatctgtctgggtcagcctgggttacttctctggttttaactcatcttttgcttatcagcaagtcaatgtccctttacaatattgatgaaaatgtcatcactcacaaactgtgcagctggagcccacctggctttgtacatttaataaccaggcttccctagtgccagggaccatgacctggacgtacagccttgtctgaatctgccacctccatgcttgggttgtaactcacaggcagtttcttgagtggttgtttaatactcaaccctccccttcctactgtgtgtgaccctgccacttaattccatgttatggttatgatgagaacaacatgtacaaagtaatggtcttatcaccataagctgataataatcccgtccccatgaactgataatcaccacggtcctcaggtgagaaatgacaaagtctgagcaccaccacgaactcaaatgcaaacattatgacctgtgactcccacctgagagtctctgaaagttttctgagagaaacccatagcatgatgtcatgatctagaacacatatacacatgtcatgattgcatgtacacgccacacatacactcaagagaactgttcataatattcttagcaaacactcatgttctaatccagtacttatttatttaaaaagattgcaattttacagaaagtgtgttttcctttttggatcactgtttttaaatgtcagatatataaatactacttaaatgacattaaagctggaaaataatttcaaaggcagatttggaagtaaaacatgcctaagacttcccaggagcctctgatcagagtgaggctgtgcacacagagatcatgacagctgcttttgagtagggatgtccctcagactgagcacaggcacacattcagtggccacaaaacacaaagaatagcgtttagttgatctttaggtcttatgttagtcagtattgacaatacagaaactgaccagctgtgaggaacagatcagaactcaggactccaccagcattagaaagtatgaccagtgggacctagcctggaagatagccaaatctggctgttggaagccaaggtgacattcagttgatggactccacattgaagtttgaacaactagattaatgtctcagagccaattgccagactcattactagtggcttttctctggttcacactaagaaactagattattgattttaggattgtctgtgtgtgcgaggatatgttctaagatgtctaatgtttgatgcttaagttgtcaaccataagggcagtaatgagtaatcatttcctaatcacgtggaaagaggttaaaacccatgtataaaatgaacttcctggccccagcataataggcaccttttcactgtcactgtctaagccaagtacagaccattcctacctgcctgccattttccccagcaataagctgcatccacagcttaagacctttacagccctaagtctgttcttcacggcagtagaacagcaggagagcttgaagatgcagcgtcgaagctgggtcttggcacatcaggtgctactctgaagtgaggcaggcgaggttgctgggctggtggtgtttattcatctcctctcttgtttcatgtgtatgtatgtatgctctccgagtatatgcacggctccatggttcagggggctggcaaatgcatgcgtagagcgtgtgtatatgtaaagtagaacctgaacctggatagcaaaatgaactactgtatgccagaggtacacgaagtgtgcccagctgccagcagcaactgctacatgcaggtcactgactacctcgcatatctggaagacagtccggctctcagtggtcgtgatgtccaagctgtgcccagtagcagcatatatatggaacaggcctgggcagtgaatcagccttatacctgtagttaccctggaaacctgtttaaaagcaaggactctgacttggacatggccctcagtcagtccagccagcctgcacatctccctgaagaaaagccttttcctcaagtgcagtcgccaccgcactcacaaaaaaaaggtagggactctggcttctcttggtttctgtttcattttaaaatgttattgcatcagcttccttgaatctttgcatttgagcaccagagatttgaaattcaaacagcagtaagaggggttgctgaatgagtgagggctctggtgagtacagaagttaccaaacgcctgctttctctttctatgacagctacagaaagctggttgtcacggtcacgcatggcatatatgggcagagatgcatgctgtccagagtgagtgttactggcttctctgctaatatatatatacatcaagggattccctctttgggatagcgggaggaagatcccaattcagaccacaaattcacttgactcttcctactgagagcccgttctcattagctagctaaatggtctaaggctttctcattggctctgagatgttaatgggttatgatttacaaatgttcattttcattttgatgttatttactgatgcatgtagagaagatgttgataactgtgtcatgcttttagaatgtcaaagtcaaacagaaatgaaccctctttacttaggcactgctccctaaaatgtagtagacttcaaacgtgaagaataaactcattatataaaagcaagtgagatatttttcaaaatatccactattaaaataaatttaatatttattcattttaataagcatagttcttaattttctatcaaaaggacatttttccattaccaaaagatcaaagagacaaacaagtacctcacaggggacttagctgcaacttctagagagtttaaattctgtaatagatattccagaaacctctttattctaagtatgatatgtaggatctgtgaaaggaacaaaattcctgggttgctgtcatttgcaagatcatgatgcccgttagtctccaaaggcaagcttttctgtaaagttaatcttatgatataatatagtatatttaattaggtttttagaaaagttagcatttgtggttttatgttttaatgtttggtgttgtttgaggcagtctctttaatattctccctcctttactttgccccttcttttccctgtgagcctcttctttctaactagtccctgtggttgtacccctaaagcaagcgatcctattactaaaatcgccagccatgaaagcagaaagttcaaacaagagctcaacttccattgaagtatgactgtgagagccctagtctacaatgttcagtgtgaaacgttaagtctgggaggacccatgtacagagccctgagttttcagttagattcacatcatcttgaaggacctcagaacttcccgtttatcataaggagtgtgctcagaaggaacatactgttccctagtggggagacaagcatgctccccttctactcactgttgaagtgcctgaccttggaagtgaaaaacttgtcactgcctccctggtcatgccagggcatgcctgtcactgtgttgttggatctccagaaatcacaggtatctgtctcgctgtctatgtgattcataattcttaaaaattcctacagaatattttagctcattttcatctcatcttttcactatattctcttcaaccagcactggggcatatttgcttacaaaatatgaaacaggaaattctttactaattaatttgatgcatgaacggggagaaaagatgcattgtatgcatatattgatgtaatttctcaaagccatatgccattgaaaggccaaagccacctgccaaactcattaaatcaaagcaggcaaatattcttaagtgaatcattgcttaccgttacgagctctgagtaaatcccagtagcactaacgcagctgctaactgtgtgtcttaggacaaaaggtcgtagccaacatgtttatccatatcgagccactattgatttttttctgagttggaagataagcagtgtctttctaagacaaagttaagactgtacacaggtgttcaacgggacaatgcctcattttccagatggattttggtcagttttcatgaaagctataacttgtatttcttgctgctttgtaggaatataaaacttcagtgagatgcactgacaactttttcttttttaaagttccagctccattcagtgtttttgtacaaggagggaagcaggaggaaaggcaaggttcttgaagagtttacttttgctattttctttttcttaatttccactgcatgtggagatcaaagaacactttgcaagacttgggtctctccttccaccacaagggttccaggaatcgaactcaggtcactcgtctttgcagccagcacttctacctgctaggccatatcacaagcccattttctttaatggtttttaaaaagagtatttttttcatctttagttggcatttatggaggtatagagtgtacacataaccctgctttaaggcatgatggtagcagcactgcagtgggctggatggtcagcaccagagcactgccttgtaaaacaacagccagggactctagagcaacaggtgatcaaatcctgacgcagtgagaatacaaacccaggtgtcgtcttcttttcgccaaaccccatttcctataaaattacaccaattatgggaggggctgtggaagatccacactgaacagagcttaactgtatgctataataccaacccagtttccctatggagtagggaacacatttttgagactagttcttgctacacacctctcaagcgagcctcaaaatttctctctctgtgcctcaaccttacagtcatgcaccaccaaacccaatgtgaaaacacattgtatttcttacaattcagggacaaatgaaaaggaaccactgatgatccacagtaaggtatgtgaacatgacttagtctttcatgtgacacagtctcaatgcactctgttcaaaacagtcattttggccaggccagcttttggcctcacctgtttagggaggaaaaactgaagaagaggttaagtggggaaattgtagccaggatctgtgacatctcctttgtgcctgtggtttggggatggttagaagctgacatttttgtcctttttatctatgtttgggttggtcattttcatcagaaattctgattactgccaggatcttcccagcatgcctttagccactcagaaggcagcttctccatacctttcaaaggagtgttccctgggagactgcctcaatagtgcagggtgggctctttgtctgaccatttctgtatcatccatacaggaatagcgtgttcaaaaggtgctgggcagataccaggaagcatttgtctgtgggttttgctttggtttatacctggtccatcattttaacccttcagggagtcaggttcagcaatcccaggtaaaactgaatgttctggccttctgtctccatgacaagatcccatctattgtcttcttctatcgactgcatgatgcattagaaatggagattaaacagtcattttgaagtgacccacatcaagaggatagaaggtgcaccaaatcccctgaatagtaaaatctttaattagaatttcttagaccgcttttaaagttagagatctcgataaagacactctaaagtcagtgccatgttccccctaaaactttcttgacaaatgctgttgaatcctagaatcatgttgaacagcctcatgcaacacaggctgggctggaaaccaaccctgggaagccccacaaattccctggcactatcagtctttgccatgaatgttagcataagacacagctgacatttctctttttcacattcccgtctttctcttcctctcnnnnnnnnnnnnnnnnnnnnccccctccccccctctctctcattatctcttcccttctagataaacttgtttcaaccctcatgtgaatggtttccccaagaaactgttagaaattgcaggtgcctctcttcaaagatcatctttaagtgcaactatgaagctgctcatgcaagcctcaccttttaaatgtggcagtgccatccataagccattaacagacagttctccagaaaacaatgccactggtgttttaaaatacagaacacatttgctgttccaaaggctaaatgagagtgcttctcatcacccagaagcaggaatcgatccagaacagaatcacctccatgcaacttccaggcagacaaaaggatgagcaggctatgtctgcctctttcctaagaatcaaacaccaccagaggtgtgtccttcagccatctccaagtgccctgaccctgtcctggagtggtgccccttattgcaaaagcaggagccaaagggaccataagcaactgaagtcagatgtctggccatcttagggagaaatggtgctactgctaatttcctgaacacaggttcccatcccttaccttcccaaccaatgcctgtgtccccatagcagcccctgcttgcaagtgcattcggggctgagctctgtcttccacctgactgtcccagcttttaaggcccattcagctcaatgagtatctgtatttggtctcttgggcccaaagacaggcttatactgtgcctcctgcttggctttcacagcactgcctgtgtcagggttgccctgggctcttttgagaggctacatggttcagctgcccatgccctgtgcttcccttccttgcagcagattcattccaatgtggtaactttatagtggctctgcagtgttctgcttccagacaccgttgaagggttcttatcctctgtgccctccacacagattttcctggggcctaatgttcttcttctccttttttatttttcttggatattttctttatttacatttcaaatgttttcccctttccaggtctctggaaaccctctttccttattcccccaccccctgtctctatgaggggtgctcccccacccacccactcccatcctcccatccttgcattcccctatactgggacattgaacaccctcaggcccactgatgtccaacaaggccatcttctgccacatatgtggccagctccatgggtcactccatgtatattctttggttggtggtccagtcaccaggagctcggggtcagggtgtctggcctgttgacactgttgttccctccatggggctgcaaaccccctcagctccctcagtcccttctccatctcctccactggggacccccaagctcaatccaatggttggctgcaagcttcctcctaatgttcttcttatatgctgtttagtgatgcaggttccaacaggctcccctgccacaggacattcaacttggactctggctatgtgcttcttccttgccctctgtcccaggaatcacagccatctctctggggggcccaatccacttcagtcccaccccaaaatcaacattgaggtgttccagttccaccccttgccagccacatcactttgtccacagactgaactcacagcccacagacaccttcctccttccagcctcagtcctcgaactgctctcagttccttccttcagaggcaaatgacctctgtttgacacagaatcagcctgaatgggattttacttagacttaaagaaaattaagttatgaaatttgtaggaaatggatagacttggacaatgttatattaggtaaaggagcccagggtcacaaatgctgtgtgttctgtctcccgtgtggagcctaggttccctttttatacatgtgggagtgggtaaaggtcagaaagctagaaaggggctggtgaaaagaagaaaggatttgggagagcctcggggaggacactagaatgggtgtgaaatgaaagtagaaagtagaatagtgaggaagaagacagaccctatagagggcccgaggcaggggactgggtatagaaggatcagctgaaattgagtacatatgaaatcactgtaaagaaacctgctactttgaatgatgtctaaaacaaatttaactgaaaataaaatagttttgaatcatttggataaatcccctgtacaagcaaatttaaaattatctaccaaatgtatgaggccagggtttcccagtgttggcactatggatatccagagccagacaactctgtactgtggctactttcctgggtcctgcaagaggttaataggggctctggcctctgagctcagattagagtagcattcaccacataccccagctgtgcaaacctgttctgtactgctcctaagcatcacaaaaatgctatgctcccttgctttacatggtgaaatacacttccaccttcctgcagaatactacctgaagcaatgagtgttgccttgaaaaataattctaccaccctttcccctgcatgcagtgtatgattggaaaatgaacagttcacattttttaaaatgtgggggaggggggtatgtgtgtgtgcacgcacataagtgcagttacatgtgaatacaggtgcctgaggaggcctgtaggtgttggatcccatggacctggagttacaggcagttgtgatccacccagcccagatgctgaaaaatgaatgtaggctctcggtaagagcagtagctgactttaaccacagagctgtctctccaggccacagtggcccacatttttaaggctatgacttctaatcttattgcaaacagaatttctgattttaaaaagcatccatatctctaaagtgcagaaaaggaaacaattgtgggcataagtggggagtctaaagcaaaccagaggcagctgtaccatttctggtggtcctgtcttcttggtcctcatttacttggccctcctacttgctaacccatgtcttctcagcacagtgatctcgttggcatcaagagtctaaaacaagagtgtttctgaaatactagcaagaggcagacagtatgatttcatgtctgtttagtctaagattttctcagacaattttatctgctacatgataagactttcaacagacatatagttttatagttttatatgctatatgataagctatcttccacttctccatttttcttaagctacttctacccttcttattttgataaagattaaaattctgtgagttatttctttacttttaaaggaggatagccttgagcaaagttaagcaacaggcaactgagtgcactcgagctggaacacgtgggaagtggtacaggctgtggaaagctgggcagggcgctccttcgtgggaagtggggctgtctgctctgctgtgagaacttgggctgtggcaggagaccactcatctactcatgtgatgcatgaaggctggattctatatttttacagcatagttttgggttttggcttagtttatcttaatattatgagtcaaacactgtagactctgtgtgttcttttgattaaaccctgagtgaaattcatcatatcaacctattttctttcttagtgattttctcctcaaatatttctgttcttactgtagatttaaaggttatggtggctatagtggctattaagattctgaggctaccagaaagagaaaagaaaggacagccaggaatttttccatgttaagctgtaatagctgagcctttcaaacccaacactcttgagtctgaaacaggagaatcataagttcaatcctggactgccaaggaaatttaaagaaagcctgcacatattactgtgttggcttgtgacagaactggagggctggatatgtaattcggctgcatggtgcttgcctagaatgtataagaccctaagtaccacagaggaagaaaaatatgtacatacatacatacatacatacatacatgatacatacatatgtatgtgtatatacagagatatatgcatatatgtgcatatacatacaaatgcatatgaataatagcaaagtctggccctaaattaaagaaataacctaagagttctgtgtctcttcctaccctaggagttcccaagaagcctagaggccacctcacagtatgctcttctcctttctggtgttaatctctggcctgcctgccaatgcttttgacacgctattgccaaggcataaaaggttgagccttagacttaagtgtttgtgggtctcatcaccacaggctcagccagccagaaggtaaaatgacaggatgtgacactggagagtatcatggggtacatagtggctgccctgaggaaagagtctgccaagtgggagcctctggtacagttttgcagaggctgagcccatcacagcaatctataaaggtctctaaagtgattagtgactcaaggttttgctcagtaatttacatgtagtagttctgcagtttgttggagaaatgaacagatgggtggcttaattaattaatgtggtgtttatctgagggttaaagattaacatgacgaaaagctcagttcctaataccaagaattaaatgtaaaaggaatcaggattagcatgttaggaaaaggctaagccattcgaaaggcttttaattatacaaagaaataccatgagaaaatgagcttaaattaaaaatctgaacagtggtttgaagtgtacacactcaatatggaattgggaaaaatgactaagtacagtaatactttagcttctctgggagtgttagaatgcagcctcaccctgagtgcagcccacctacagttcttatgctctgagcttttacttcggcattatgaatcatagtcgacctgaattgttctctggagttagtgactagtcctctttagcagttacctgggaaacttgaagagtggttcttcacatggacagtaaaatcacaagttctcttactctaatcttaattactaatatcgatatgaattctcagatcacaaatcacactgtcaccatggtcatttgtatgggtatttatagtgtacgaagaattaaataaggcacagagttcatgcaggccttaccagaagcagaatagaggcagattcaaggacgtgcacagagtacctggaggtagctgcacaagctattaaaaaacctgttggaccccttcatgataaaagtcttggaaagatcaggaattcaaggcccatacctaaacatggtaaaagcaatctacagcaaaccagtagccaacatcaaagaaaatggagagaagctggaagcaatccaacaaaaatcaggggactaggcaatatagtacttgaagtcctagtcagaacaattaaagaaaaaaannnnnnnnnnnnnnnnnnnnnnnnnnnnnnnnnnnnnnnnnnnnnnnnnnnnnnnnnnnnnnnnnnnnnnnnnnnnnnnnnnnnnnnnnnnnnnnnnnnnnnnnnnnnnnnnnnnnnnnnnnnnnnnnnnnnnnnnnnnnnnnnnnnnnnnnnnnnnnnnnnnnnnnnnnnnnnnnnnnnnnnnnnnnnnnnnnnnnnnnnnnnnnnnnnnnnnnnnnnnnnnnnnnnnnnnnnnnnnnnnnnnnnnnnnnnnnnnnnnnnnnnnnnnnnnnnnnnnnnnnnnnnnnnnnnnnnnnnnnnnnnnnnnnnnnnnnnnnnnnnnnnnnnnnnnnnnnnnnnnnnnnnnnnnnnnnnnnnnnnnnnnnnnnnnnnnnnnnnnnnnnnnnnnnnnnnnnnnnnnnnnnnnnnnnnnnnnnnnnnnnnnnnnnnnnnnnnnnnnnnnnnnnnnnnnnnnnnnnnnnnnnnnnnnnnnnnnnnnnnnnnnnnnnnnnnnnnnnnnnnnnnnnnnnnnnnnnnnnnnnnnnnnnnnnnnnnnnnnnnnnnnnnnnnnnnnnnnnnnnnnnnnnnnnnnnnnnnnnnnnnnnnnnnnnnnnnnnnnnnnnnnnnnnnnnnnnnnnnnnnnnnnnnnnnnnnnnnnnnnnnnnnnnnnnnnnnnnnnnnnnnnnnnnnnnnnnnnnnnnnnnnnnnnnnnnnnnnnnnnnnnnnnnnnnnnnnnnnnnnnnnnnnnnnnnnnnnnnnnnnnnnnnnnnnnnnnnnnnnnnnnnnnnnnnnnnnnnnnnnnnnnnnnnnnnnnnnnnnnnnnnnnnnnnnnnnnnnnnnnnnnnnnnnnnnnnnnnnnnnnnnnnnnnnnnnnnnnnnnnnnnnnnnnnnnnnnnnnnnnnnnnnnnnnnnnnnnnnnnnnnnnnnnnnnnnnnnnnnnnnnnnnnnnnnnnnnnnnnnnnnnnnnnnnnnnnnnnnnnnnnnnnnnnnnnnnnnnnnnnnnnnnnnnnnnnnnnnnnnnnnnnnnnnnnnnnnnnnnnnnnnnnnnnnnnnnnnnnnnnnnnnnnnnnnnnnnnnnnnnnnnnnnnnnnnnnnnnnnnnnnnnnnnnnnnnnnnnnnnnnnnnnnnnnnnnnnnnnnnnnnnnnnnnnnnntcagatagggaactaatatccaatatgtataaagaactcaagaaggtggactccagaaaatcaaataacccaatttaaaaaatggggcacagagctaaacaaagaattctttttttccccattttttgttaggtaaattgctcatttacatttccaatgctataccaaaagtcccccatacccacccccccaactcccctacccacccactccccctttttggccctggcgttcccctgtactggggtatataaagtttgcaagtccaatgggcctctctttcaagtgatggccaattaggccatcttttcatacatatgcagctagagacaagagctccggagtactggttagttcatattgttgttccacctatagggttgcagttccctttagttccttgggtgctttctctagctcctccattgggggccctgtgatccattcaatagctgactgtgagcatccacttctgtgtttgctaggccccggcatagtctcacaagagacagctatatctgggtcctttcagcaaaatcttgctagtgtatgcaatggtgtcagcgtttggaagctgattatggggtggatccatggatatggcagtctctagatagtccatcctttcgtcacacttccaaattttgtctctgtaactccttccatgggtgttttgtttcctattctaagaaggggcaaagtgtccacactttggtcttcgttctcttgagtttaatgtgttcaggaaattgtatcttatatcttgggtatcctaagtttttgggctaatatccacttatcagtgagtacatattgtgagagttcctttgtgattgggttacctcactcaggatgatgccctccaggtccatccatttgcctaggaatttcataaattcattctttttaatagctgagtagtactccattgcataaatgtaccacattttctgtatccattcctctgttgagggatatctgggttctttccagcttctggctattataaataaggctgctatgaacatagtggagcatatgtccttcttacttgttgggacatcttctggatatatgcccaggagaggtattgctggatcctccagtagtactatgtccaattttctgaggaaccgccagactgatttccagagtggttgtacaagcttgcaatcccaccaacaatggaggagcgttcctctttctccacatcctcgccagcatctgctgtcacctgattttttcatcttagccattctgactggtgtgaggtggaatctcagggttgttttgatttgcatttccctgatgattaaggatattgaacattttttcaggtgcttctctgccattcgtttattccttgggtgagaattctttgttcagttctgagccccatttttaaatggggttatttgattttatgaagtccaccttcttgagttctttatacatattggatattagtcccctatctgatttgggataggtaaagatcctttcccaatctgttgttggtctttttgtcttattgacggtgtcttttgccttgcagaagctttaaattttatgaggtcccannnnnnnnnnnnnnnnnnnnnnnnnnnnnnnnnnnnnnnnnnnnnnnnnnnnnnnnntgtatttccttaatcctattagatttgaccttagtacaaggagatagtagtggatcaattcgcaatcttctacatgatgaccaccagttgtgccagcaccatttgttgaaaatgctgtcttttttccactggatgtttttagctccattgtcaaagatcaagtggccataggtgtgtgggttcatctctgggtcttcaattctgttccattggtctacttgtctgtcactatacaaagaattcttaactgaggaatattgaatggctgagaagcacctgaaaaaatgttcatcatccttaatcatcagggaaatgcaaatcaaaacaaccctgagattccatctcctaccagtcaaaatggctaagataaaaaattcaggtgacagcagatgctggtgaggatgtagagaaagaggaacactcctggattgttggtgagattgcaagcatgtacaaccactctggaaatcagtctgtgggttcctcagaaaaatggacatagtagtactggaggatccagcaatacctctcctgggcacatatccagaagatgttccaactggcaataagaacacatgctccactatgttcatagcagccttatttattatattcagaagctggaaagaacccagatatccctcaacagaggaatggatacagaaaatgtggtacatttatgcaatggagtactactcagctattaaaaagaatgaatttatgaaattcctaggcaaatggatggacctggagggcatcatcctcagtgaggtaacccaatcacaaaagaactcacacaatatgtactcactgataagtggatattagtccagaatcttagaatacccaagatataagatacaatttgcaaaacacatgaaactcaagaagaatgaagaccaaagtgtggacactttaccccttnnnnnnnnnnnnnnnnnnnnnnnnnnnnnnnnnnnnnnnnnnnnnnnnnnnnccccttcttagaattaggaacaaaacatccatggaaggagttacaaagtttggagctgagacgaaagcatggactatccagagactacctgacctggggatccatcccataatcagccaccaaacgcagacactattgcatacactagcaagatttagggaccctgatatagctgtctcttgtgaggctatgccagttcctggcaaacacagaagtggatgctcacagtcagctattgaatggaacacatggcccccagtggaggagctagagaaagtacccaaggagctaaaggggtctgcaaccctataggtggaacaacaatatgaactaaccagtacccccagagctcgtgtctatagttacatatgtagcagaagatggcgtagtcggccaccattgggaagagaggccccttcgtcttgcaaactttatatgcctcagtacagggaaatgccagggccaagaagtgggagtgcgttgttagggaagcgggcaagggagggcagcagtggaggatataggggagtttcaggatagcatttgaaatgtaaatgaagaaaatatctaataaaaaattggaaaaaaaaacctgttgggagctgctggattccagatgcagagacacaagactgcttagccaaggtacagaacattgaagagtgggcataacatcagatctgatagacttccatgcaagtaggctgtattaagcagtgagggccaaactgagcccaaaccccatggatggttgggagttctctgcctactagtcccttgatgtacatactatgtatgatgcacacatgaaggtgacagtcagattgatggggccatagacatgcaagtgtttagtgtcctcctccatatgggtctaagtgagagtgttgcattcctgttggtcaactgtatctgaaagcccttgggtcacatttttctaacacatgcctgtatcttcccaatcaaccttgatgcatttataggtggtatttttttacttttaggaataagttgtgtatcagtttatgccttgtgggttgtgctccccaggcgatagtgtctatgcacaaatgtaatgtagagtcaccgttcctctgcccttgttctccgtgtgcaaagttgcttctaaaatggtgtctcctaagagcaggacacaccctgaaagctgccattccccacactgtggagtatcatagattccaactcagcctgatttgcatatgtcacctctaggtacatctcctctctgacctgttctatatacatgctttctgtagccaccagtactagtccaaccaagcaaatagtctgctttgatgttaagaccagtccgggttgaaatatatctacacccaggtgtcccttccttcaggagcagaaacttcaattctagatctgtcaccaagattaatctattccatatcctgttactcactgtgtgtttgttaaggtgacaagaaggaccaggaattctccaacaacctgccgtattgcataattcactcaaaagaattaccctagccaggattctggtttatacccacagggaatgcactagattaaatatcaatcagaaaacaaatacaaaactcttgctttctgtatcctaagtcctatgaaaatctttttgcttaatctgtgttatctgcaacatgaatgaaacttgaaccttctgctaagtgaaagccagtcacaaaagaccaactacaattgtatcccatttgtctgaaatgtcaatagtagatgatagagagagagtagattagggtggtctggggcaaaaggggtggggaagatgggtagagtgatatggtgacatttaaagacacttgcagggtttctttgggggataattaaaatattctaaggttaataagtggtggtagttacacaagtctgtgagtatatttaaagccactgacttgtgttacctttgaattatatcatagtaaagttgttaccaaaagaaaaaacatacttaaaaagtagcattttactattgtcttagtaagggttcctattcctgcacaaacatcatgaccaagaagcaagttggggaggaaaggatttattcggcttacacttccacattgatgttcatcaccaaggaagtcaggactggaactcaagcaggtcagaatgcaggagctgatgcagaagccatggagggatgttctttactggcttgcttcccctggcttgctcagcctgctctcttatagaaccaagattaccagcccagagatggccccacccacaaggggnnnnnnnnnnnnnnnnnnnncaatctctaaccatccaatgtctgggatccaactcatgatcttctgggctcctccaagggcttgggtcacttctccagccatgccctctgtaacacacgaatcgtcctctaggatccagttacctgtactccactgctgctgctcttggtggtcatctcatggtactggcatctccaaaacaatgcatgaccccttcagtcctgggccgtcaattgcaactgaggctgcaccttcaccaatggccttccatggcctttcacaatgccgagcctcagctgctctgcgtgacctcttcatgccttcaaaaccagtaccacctggttcacccttacacattaccaagccccgctgcagcaggagtacaaccttggctatctctggaacacaacctctttgtgctttcagaaaacacttcccagaagatgtcacctcaacgatgttggtctcttcttaatcactgctaatttcttagctccagctaatcagcatcaatagttccagtaacgcaaaagtttcactttagtagttctggtatcttgttaatcacagctgattcttcagccccagctaaccagaaccacagaatcttcccaatcaaaatagcaatggccctgaaaagagtctttaattttccctctgaaatttcacaagccagacctccatcttctgcactgttctcaacattatcttccaagctcctacacaacatctgacagagctcttaacaacgaatggatcttcaagcccaaatttccaaagtccttttacagtcctccccaaaacatggtcaggttgtcacaggaataccccactctgctggtaccaatttgtcttagtcagggtttctattcctgcacaaacatcatgaccaagaagcagttggggagaaaagggtttattcagcttacacttccacattgctgttatcaccaaaggaagtcagaactggaactcaagcaggtcaggaagcagaagctgatgcagaggccatggagggatgttctttactggcttgcttccccctggcttgctcagcctgctctcttatagaaccaagattacccgcccggagatggtcccacccacaaggggcctttcccccttgatcactaattgagaaaatgccttacagttggatctcatggaggcatttcctcaactgaagctccttttcctgtgataaggcctgtatcaagttgacacaaaactagccagtacaactatattaacccattttgatatgcaaaataatatttatcaattaatcaaaggagcaaaatattaactaaaaacaaaattctcctgtcttttttgaacaaacaaatggagcctgcttccttatatattgacttgaggggctgaggatgcagctccgttgtagcatacctgttttgcagctccgggtaccatatactcaaacaaaaatacatagatatactaacaacaagagcaaatatacgtgtatgcttgatagcatgacagtgtgtagtttatagtgtgaagagtaattcacacaagcaagtgggagctggggactgcagatcaaccttgaactctccggattgttgggggccttagttggttattcataacctctaataacatttctggtattgatataagacaattgtatgcttgattcctcaggcaaacaattcaggacacatctcacatcttatatagatatccaatcccactgttatgtcacttacaagtatccatatttgacaacaaagctaatgtctgtgcactttccttatttggccacattggcagcatgtgactcatggtaataggacaccatctctgaaagcattattttctggtgaacaatggacacaggcagaacaattggtatgccatggaagtaggatgaggctacaaaatccaaagtcctccccgagtaacagactttctccagcaaggttctatctgctaaaggttccatattcttttcaaatgttgccaccaaataggaccaaatattaaatatatgaacctgtgggaaacacttttcattcaaaccaccacagcaatgctaattgagtgaggggcagaaccggctcttctcacattccgagccaggggagaaatgtttgctcttccctcaggttattttcctggtgagtagctctttgcattggtaacaggtgcttacttggttcttcaagtgcaccccagctagcatcttctctgcaatattaactgaacaatcttatttatctaaggcacaagtggaaacaatgtaatctgatggcttcctgctcctactgccatgtggcctctgtcatggtggactctctctctggaactgtaaaccaaagtaaatcttctttttcctatgttgctttttgtcagggtattttatcagagcaacagaaaagaaactaatattctggatattagctggattccagaattcacctaattaaatgggatagaaattgggaggggaaaatcttcagtggtgtcctcctgccaaagccaaagacagtcccagctgttatggtgaggtcacaagaaggataagagggaaagattaattccctgcatttttttcaactcttgctcatgtccccagacaccatatccctttgtaggcaggcaaggttcacaagtcatagtccacagttggttcctgcatctcctgtccctgaaacctgacacctgcatcagcaccaagaactcaaaagcctctactctgctggtataactgtagaaaagaggccacagcacaattctcctgacatcaatggcttttctatctaccttttcctggaagacacttgtgttaataatttggtttatttgttgtttaaaggttattctgtgctttgtagctagttgtttgtgtgccaggcacctgcatgagctcattccactctgccactggctttgcatcactcctgttaaaacaatctctattagttacttgtctgtcagtgcaaccaggtatctgacaaaagcaatttacaggagcaagggtttcttggagctcacagtttaaggattcagtctatagtggtggagaaggtatgactgcaagaatgggagacagtcattgtgtttaccaggaaactcagaaagattaaaaagatgagtccatacctcccctacccccagccccaccctgcttcatcttattcaacccatggtcagcatagctcttcctatttcagctaaaccgtcatgaaacacccagagatgtgttatatgccaagaggtgtggctcctctgttgttctaaacctagtcaaattgactgtgaaggttagccattacatcttcctactaagtgtggctggtatctgagtgtggtctccatgtacagttctcaacagtgatgtggagaaactttccatagtctttctctcacttttccttccagaacagaactagagaagcagaactggttgcttacaagattcccacagcaagaagctctgttttatttggttctatattacgtgtgccttccatactgcttagcactatgtgtactaaagaggttctgactagagtcatcaataatgagtgactgaagacaaaccattcccttccttttgtccttgctgcagggctcttccataattatttttttaaataatttactgatgaggggctggagagattgttcagccattacgaacgccaaagtttggttcccaccactctctctgggtagcacaattgcttgtagctccagttccaggggctacaagccttcatgggcacctacatacacgtgtacatactaaccccacgaacacatacacataaagttatattttttctaatctttaaaaaatgaaaataagtaaaaccataataaaacgaaataatagaatgcttgagcgactttgagtccaacaaatggacatcaatttgctagagcaaagcaagctaagaaaagctggtgtgatcgaaatcacaatcctgcctcagcctcagcctgcaaagccctccatgtgcatctgaagcaccaacactttcctattagtataagataaatcatttctaagatataaagggaaggattattttcttcgtgccttttctgctttaaaagccatcagtcaagggtgacctgttgtcccaaagggctgatgaaaatgtcataggaaaatacatagccaagtcttcttaacctgagcaatcacagttgaaactcagaaaagttccctgaacccaagaccttcctgagcaccaagaccaagggacgcttcatttctgctgcctgttcacattcacataccaacaaaccatgcacttcctttctaatgtgtttagctcatctaaaggctcatgtgtctttggcatacgtgtgggcatgtggccatgggctccacatgaacaggaagaaacaggcacaggcaggaagtaggctgttctgatgttatttttaacctgagccttctgagggagtttgatccaccaacacagaccccaagggagtcactgtggttaagttttctttcctcagtcaacagaacttggattctttctttgcattcagcaatgttggctgtgtgtccaactgccaatctgcctcaggtgcctgtgctcatctctctccagctctctggtttttcggggaaaaagcacaactccttcttggcagcagatgttaaaagagatggattgaagtctctgtttctcccctgaccctaagcgaagttcaactccttagagccgatgtcttcacctgggaagtccatgactattgtatctattgtacatgacatgatactgtttcttcaccttcctcttttgtcctttgcagggtatatccccagctatttagacaaagatgagctctgtgtagtgtgtggggacaaagccacagggtaccactatcgctgcatcacctgtgaaggctgcaaggtaagtgccagtgtcccagcacagactgcagctcagcatctgcactctcccagacaaccactggacatcaggcttacagaaagagatgtcaacattgatgacctttggcctccaggggcccagaggccctctttatttttgatgttctcaagatctgaattttccttcttcctaaatcatgtataactaaatggaagtttgcaatagtgtggtgttttgttcttgtgtttttaaaacagaaggacaactaacaaaaagaaaataaattaataacacttactttgaacattagagcataatttttaaatatccaatcaatctgctttgctgtttctcctcccattttatgtgtattgtctgaggagacgagtttgctccacagcctttctgctgtggttctgcatgtctatgcccacttctgagggttccattaggcagaatctttgaagccacttaaactcaattacgttccagaatttattcgaagtggctttcagcagagcctgtaataaatggaatcaatttgccatcagataattttgtgctctgcaaacttttctttgggagattcttgacaaaaacatactggtctattcacgtctccaaatggagtctacatctgcctacttaacaatcttaattagtaaaattaagataagcattatcttatgttttgatccatcaacctagattagaaaataaagacaaggaactcaatccagagtagtgtccaagcagccgatgctgtctgtgtaaatagggatgtattctaagccagagacagacttctatttcctgtagagtttacaataaaacttgtactgaagccaaacaaaaaaacaaaaaacaaaaacaactttccctcttctatctttcctcctcacccacctccctttccttcccttcccttccctccttcttccacctttcttcccaaacctcccagctttcttcctgcccttgcctttaagtgcttacaattcaaattcacaggttgtggggacttaatacaaacccagaaaggaacctaagagtgaaaagacactcttaatatgatgcagaagcaacttgggaaagggaaaaggtcttcaaatgtaacatcatcttcaagagtgtcaagagattaaaaaaaaaaaagctacaccccaaggtttattcaaaccaacagtgtatgtggccagaatctgtactactttagcaacagaaagatttgtgagtttttaactctgctgaggtgtgtaacttcctgcacacttaatgctgctgaggtaacttcctgcacacttaactctgctgaggtgtgtaacttcctgcacacttagcactttgtagaaagaaggttcatgtttccatataacaaactgttttcgaagaaaatgtaacaatattacagtgcttttacaacaatataagatagaaatttgaattgagagaaaacacaatgaaaagtcaaggtgactcttaactccccaagcaattctaacatttagaattctaaactttctaaaaggcatagacataaacaatttctaaactgttacattctaaaaaaatatctagtggcttaacttgcaggccacagaacattccaggaccattgaaggagtcagggcaggaatgtgaagcagaaacatggaggaaggctacttgctggcttgtccatgcttagctagctttcttatacagctcaggaccacctacccagagagtaataccacccacagtgagctaagaccccctaaatcaatgaacaaccaagacaatccctcacagatactcacaaggcaaagttatctgggcaatcccacaattgtgactcctttagttgactaagttatgtcaaggtggaagttacagctaaaaatgatggatagtaacaaagaggccctgtgtgtgtgtgtgtgtgtgtgtgtgtgtgtgtgtgtgtgtgtgtgtgtgtgtgtggtgtgatagtgttttgagacaggttttctatgggtaaccctggctgtcctggaactcagtaagctaggctggctcaagctcagagatctgcctggagtgctgagattaaaggcatgcaccaccacacctggctccataggtgtccttatgtctggttagtccatcatatgggaccattaagaaattaatctggcttttctctgagtatagaaatatttctgttataggttttaaaggcaagttctccattcatgtacaagtcaatgaaacatgcccttagtccttaagaagcctctttgtcagctcacaagatctggcggttggcttggctttggtgctggggaattaactcaaagcttcatgcatgttcagcatgttttatgccgctgagctatgcccctaacccctaaaatgatttttcacataaatgtcttatctttaattttatctccgggagttaattttcattgtttttttttaattaagagacttatcatccttacatctatctaaaggtaatatttcctcatcctatggtaaaagatgcttttccacagattagaatgatgcttaaaagtaatttggcccatgaatcagaggtaggctcagaaaagaaacagcacagcatgctgcagtgcttctattttctacaaaagcgaagtactcatgccattaaggagtacacagaatacctttgttgagatatacgatcctgtcctcattctgttacagccttgctcaccctggcctcaacgtggtcttcgtaggccaccagtgtaagggagaaagcgctcctcctcagcaactgtccatctcttccctggctggcttctcggtaaacatggcttcctcctggtaaacaagagagttgttctgcctcctcccagtgcatctagccagaaatgactgggtttcttttgtcccctattctgcctgggaccgagaacacagttagtgaagggaaagccacaagaaaacttgccttacattctggagtcaagctgtgatatggccctctgggcagattcactcattctgcacctggggaaatatggttgatgtctctctcatccagctgcttgtgtgtggttcctggacctgtaacagcatatcatgcagaggcatgcacacatgtttaagaacacaaatccccaattcatagagttttcctgttagaattttattttgaaagaaatcatatttcttttttttttaaatgacagatatgagtcttggttatatctgctttgcttaatataaggtcctactctggaccctattattgcaagaaagagctttttctgagtagggactatgcaagtgggcatgtgcccacaaccaaagccaaaaacttaaatgaaagaagaaaaatgggcaaaatctggggcaactgggacaaagggatgcagcatgaatctgctgcccatctgtgcccaccacagcaagagctcactgtcagtgtcaattcctgtcacccagaaacagtggccaaataagtcttgagaaagttgtataaattagcaaaatctagaattaaatagtgttcttcagagaagagaaagcctgttgaacccatatgcctacagatactggaggaaaagaaggttttagaaggcctcaagctcaagttatctgttcttcaagtcctgttgtttaaaaggttaagagagttggtaaaggccatcattttttttccattttctcctcctcttcctcctgttccttctcctcctctttctgcttctgcttctcttcatgctcctcttcttcttctcctctgtctcctcctcctccttctccctcttcctcttcttcttcctcaattttttttgaaattagattatttttaatacaaacatcccaaccacagtttctcctctgtctgcacattccagctcccccacagcttctttcccttcagaaaaacgggccaccaaaagaggacagctgaacaggacagaacaagctacatatagacaaaaatcctgaggctggacaagacaacccaattggagaagaaaaatcccaagaacaagtcaaagagtcatagatacacccacccccacagttaggattgccacaaaaccaccaagctaacagtcacaacatagacaaagagggcctggtacagacccatgcaagggcccatgctggctgcttcaggctctgtgagcccatgtgagccctactttgtcgattcagtgagccatgttctcctggtgtccttcatctcctctgttccctgatttgctatgggagggacttgatggagacctccaatttagattctctacctgcataatgtctggctgtgggtctctgtatctgttctcatctggccggaggaagcctctctgttgatgactagataaggcactgatctgtaagtatagcaaaatgtcattaaaaatcatttcatttcattgttttgttttgtttttccagtcatgtttagttctatgctaggtctctgaactatccattctctggttcctggccatccaggctccttctcgtggagtgggcctcaagttaaaccaaacattggttggccactcccacaagttctatgcccccatcaacccagtctgtcttccaggtaggacagattataggacaagagttggtacccaggtttctctttctgtaggctttccagaccagagactagagggtagggatgtaggtttcatacagacaccagttccacctttctatatgcaatgaactgggtggttgttgtcttcagcaatggagccttgctgtcagttttcagagtgaccctcttttcaagtatcagcctgggttgtttagggatctccataggacaccctcagtcaacagttcaaccaaacacaaccagatcttgccactggaagttttgcctgtctacaaaaagatggccagttcagactctgtatcctccattctaggagtcctcactagagtcaccctcatagattccgggatgtttccacaacactacgtttccatatctccttccaaacacttcctaatttcagctgtctctgcttgcattctttccctccatcccctaccctgacctaatccctccctctcctctccctatccaaacccagtctaacagcaaaatctattctatttcccccttcccatggagatccatgcatcccccctagagctgctttatctaacctctctgggtttgttattatattctttgtaacagctactatccatttatgactgaatatataccatgtttttctaggtcagggttatctcactcaggatgattttttttcttaatttcttccattcaccttcaaatttcatggtgtctattttttatccactgaataataatcgattgtgtaaatgtaccacattttctttatctgttcttggcttgagggatatctgggttgtttccagtttctggctattgtgaataaagctgtaatgaacacagttgagcatctttgggtatagatcatggccatcttcagagttgaagaagaattaagtgaaatctctaagtgaaataaagacatatatttagtcaccaaacaattttaaatgttcttggtgtgtgtatattcattgtacatagtaatggatttcttatagaaatattcaatcaagtatcctgcacttttaattcaggataaagtaataaatctcttcattcacttagcagaaaaattatgacactatgtaaataaaggttataccatataatgtatagaaaaattagagcaaacaccaggttgcccgctggcttcatttctttgagtaaaatacataatagtgaatatacagcagccctgtgaaacctccctcagctccttagattcacttgccaccaccatcctccatttgagggtataaagtaggaggccccagcacaggctaaggaccagaacaattgctcttattcttaggtagacaaaattccagagtcatttagtttcagaaaatatgaacctattatctcgggtctttctcatttagggcttctttagaagaaccattcagaaaagtctccatccatcttattcctgtaaatatgaaggaaagtgcatcatagacaaagtcacccgcaaccagtgccaggaatgtcgctttaagaaatgcatctatgttggcatggcaacagactgtaagtacatgttcttcattcacatgatattgtgaagtgtggagtgggagaggttttggttcaagatcaacaaagaaagcaggaatccttgtggatagaatctggctctcacacaccctccctccccacattcagtcttgccataggtgaaaatcattggctttcttcctcctaacttatcaattcccaacttccaaagcatccagatgatatgagaaggggtagttagatcatcctgtgtgggtttgaagcatgtagcttggtcacttctcacacacaggctccacatgctgagagtcttagagaccagtccttgtgttttcaaaagcagaaataaattaacttggtagacatctttgagatggagtactgcagaaaacatcatgcttaagaacttttgaagaattcaagtttaaggttcccacatgagtcatattgctgttgatagcttgttgtatttttatccaaaatagattttttaactggaactcaattttctcagtgccatagcacatagcactgagattaaccctggagtctctcctcctaaccctgggccagcggttttcactccctttacactcagccccaagcctgacagcctataaacccagtccctgaacacccacatggtggaaggagagaatggactcccacaggtgtccactcacagggctgagggtatgcacatggacacatgcatgcatccacacacacacgcacacacacttcaacaaataagtaaacaacaagaaggaaaaaaaaaaggcaaacctccatgccggtgccagtcctatcactgacaaggcatgtaacccccagattcctgcctgagaaacccccacataccttacagctttaggcccgggattcagtcgattcagctgcaatagtgtggcatactgaaagccttgaagcaatggagcttcagttttgtgagcctttagggggtaaaccaaagttacctcacaagttgcctcgtccatatttcccacatctgaagactctcatgtgacatgggtggctgaatcctgaagagatactgccggagggcttgtgaactaactggacaccttgcttttcttctcgctatgtccctttatacggcacaaggacagtgtgccttcattgcaggaaccgaaagcaggagtcctgggtcttcccctgcctctaccatgagcttgatctgaccttagagaaggcatagtgtggtccatcctctgtgaaaagagactggacctatctgcagtcatctgaagcctgagccgtgtctgcagtgaaaacaagaaggcctgagttctaacctccaacacacatgtaaaagctgcaacgaccacatgtattgggttacggactagtacattctgtggactcactagccaggaacttggcctaaatggcaagcttcagattcagtgacagagcctttcccaaaaatgtgagtgtggattgaggaacactcctggcatacttctctggcttccatgtgtgtacacagaagttcactaccacacacacacacacatacacacacaaaataataattaataataataataataataataataacaattaagtaaaataaaataaaagtaaataaagcctgagtctctcaatcttactacaaatctaatgaaatagtctatttgaaaactaaccacagaaagataggtttcttgttcctttttgcacaaatggtaaatatgactatatttactgaacacttaccatattcacattgccatagtgaataccttgtatgtgggcattattgatcccatctgggtaaagggaggcatgagagctcagagaaccgaacaaacttgcttaggcgtcacgcagctagaaggtgctggtgtcaggactcaaacccacatctttctagtccaaggctctttatctaccatggaggacagaccaggtacaaagatttgcaaagatgtacctgtaagactcaagagaatcaaaggcaaattacagtctgccctgagggagccaggaagaaccattttccctcccatcactactccagaagacttccttaacaggaagcacaggaggcccaggggtgaatgcagatggctgtccaactgatttctctgctagtgtggttttaagtctctctgctttagtctgatttcagccactgccttctgtagagctgagttcctagtgcccatgtcctttccaagctctgctttggacacttggtctggacactggactcatagtgggctgtttgctatgcgaggaaaaatgtgccccgtgtgacctgaggctcagaaactacaatcttctccaagctctggattagcagtgggtcctctcacctttctactttgcagtggtgctggatgacagcaagaggctagccaagcggaagcttatagaggagaaccgtgagaagaggcggcgggaagagctacagaaatcaattgggcacaagccagaacccacggatgaggagtgggagctcatcaagacagtcactgaggcccacgtggccaccaatgcccagggcagccactggaagcagaagcggaaattcctggtaaggcttctgaccaagctcactatttatgtagcctttgttttctgccaaagtttagagtcctctggaccctcctgacatgagtctcctatttttgtgatgggcagttgcagctcagagggctggaactgcaatgatgccaatgaggttacagaggctactggagcaatattcactcactggaacccagagcagcttcctaggcctccaacctcaaggtgaggccagggatggagcctctcctcaggaatgtctgctatctgatggcttacccttctccccccttctgccttcagacctccagtgtttatattcagctatctaggcttgttcacgtgcccccttcagcaaaatctctaggaggaagggtctcagacctcagatttaagtttttatctgccagagttcaaatgcttgtctaggaataaaaacttgagttcagaagccagagaaaatgggcatagtgatggggaaagcagagagacaaggcagaccttttcggatctgtgtgcacttattgggttttagagtgcaaccccttcccatccatttctcatttagacttcctggtgttctaaagtttctggagttgctatccctgttttatagataggcaattcaatcccaaggccatacataaatgtcccagatgatatggcagtaagtgactaagccaggcccaaagccagcatgccctctgatttcaagtctctctgcccacctcattaaacaaacttcctgcccaagccagtgtctagccacctcagagactggatgtgccttcataaaggcttttgtgagcactttgctggcctgtggatctgtctatacatcagagttgctttctttaaacaaggagctgtggtggtgaaattgcctgtacaccacaacagtgacgttataatggtgttacacttataatcatagtactcagaaacccaaagtaagaaggttgcaagttcaaggcctgcttgagttaccagtccagcccacgacacttaacaagatcttgcctcaaaagttaaagccagaaagagctgtcacacagctcagtggtatagcatttgcctagcctgcatgagatgctgggtcagtacccagcaccataagtaacaatcacaaaaggaaattttgaaaagaaagggctatgaataatttgcctttcctacaccaaattgtctcattatcaacataaacaaatactgtcatgtgctactttagaaaagtcatcaaacactgaaatgatgcttatgctgtgccaggttcaagtctaaatgctttgctccctaatcttcagaccctataccacctctataggtagaatacctccatttacaggacagagagatgtgggaaacttgtggggctcccacagctagattgtgctaagacatggaggagcaggtatagccagtgctgggtctgcctgggctccttctgcccaccgcccatgtagcctaacccaccaaactaagagaggccttgggagggtggcattccactacttcaccctggtgtatctgactggaaattaaactgcacttattctgtataataggccaattccaatccaatatatatggaccatatcagcacagactccagcatacccacgggcctaagtctatcaaagtgtactctttcctcagaagtgtgggccactgccaggcctggtgctgcattctaattctaagtagtcaacaaaagtggaaatcaagctgaattctgagtcagatggaggagtcagggcccattctggactcgtggagaattttatgctttccccacctaggagaggatgaatctaattaagccagtttctgacataactaaaatacgtgttttagagtctaaggatttagtcttttaacttatgtatatttgtatatgtctatgtgagaataagtgtatgtgtacatgtgtcaaaagccagctcgacacccaggctaaactgagatatggtgttggtgattgcggtcattgctcatagcagccaatggtgggaaggggctctgctgatagcagcaggagatttacagggtgatgggagtaaaacttaattatctggggccagaactctcagtaactgggcaagaaacactgaactcttttaactcttaagagaaagaaaaggatagaaagtcatgcatacattcacacacacacacacacacacacacacacacacacacacactctgccgggcctgacaacctgtttcatcaatttcacaagtgcacacacatacatatatatatatatatatatatatatatatatatatacatatatgcctacatatatatttatgcatgtatatatacacagtcagacatgtatacattatacatattatacagatagacatatatacatatatacacatttggtggatggagcaaagtcccaacaaccacactttatttttttctttcagcttttttataacttcttagacaaaagttcttaataaaattatgtcatagctaaaatgtcaaacaagagggtgttacagaagaatgttaattgcaagttcaaaggattgtttcagtctgtaagctcataataagttcaaagcaacagtttcacatagccttgttttatcatggagcacacctgtcgattcatctttgaacctgacctagaatgtatttttttccttgatcattaacctgtctcaagtctatttttctttctggcacagtctatgtgcttgttgtgcatgaaagctcaccgcattccttcttacacagcccttacctactatactaagagacctgggcacattctattcttgattctaactttattatatctttctggcaaaacaactaaaaccatctccttaaactttttatcaactattctaactttctaaaaaatatatgaatcaaattaggaattctataaagtcattaatttatcaaaatagcattaatacatgaaagtacatcttcatattgatctgcaggaagtttgcccaacagagtgggttaaaactcaggaaacagtgggctctgtcagatgtaagagggatactgcagtagcaggctgatcagaagcaagaaacaatcctggggaaaagtttctgggctccatgcctctccagagtgcacccatcacagccatgcaaaatgatgggccatctctagcaactcgcttgccataagctttcctgcatgactccttccatgcatgtatattagtgtaaggatgagtgtatgtgtgtgcacatatgcctgtgtgggaatatatttatgtatgtatgtacatgtatgtctgtgtggagatatgtgtatccacgtgtgtctgtgtggtgatgtacacacatgtgcatgtgtctgtatatgtctatgtgaagagatgtatagttgtatgtgggtacatgtgtgtctacatgggatgtgtcttagttagggttttaccactgtgaacaaacaccatgaccaaggcaactcttgtaaagacaacatttacagggacaggtttacaggttcagaggttcagtcctcaaggcaggaacatggcagcatctaggcaggcatggtacaggcagagttaagagttctacatcttcatctgaagactgatagtaggagactaactttcaggcagctaagatgagagtattaagcccacactaacagtgacacacccactccaaggccacacctccaaatagtgctattctgtgtgtgtgtgtgtgtgtgtgtgtgtgtgtgtgtgtgtgtgtgtgtgtgtgtatgtgtgtgtgtgaatgtatgtctgtgtggggatatatgtatgtggatgcatgtgtatctatgtgggagtacatgtatgcatgtgtgtctgtgtgtgggggggtatgtgtgtgtgtttttctatatagggatatctgtatgggtgatttctgtgtggatatatgtacgtgtttgtatgtctttgtgagaatatgtatgcatgtatgcatgtatgtccaaatggagatatatgtgtgtatatgtatatgcatgcatgtctgtgtgggtatatgtatttgtgtgagcagatcctccagagatcagaaggataacactcttttaagttaagtgtatatgtatgcatgtatgtctgtagaggggtgtatggtgcatataggtctgtgtgaggatatgagtatatcagatacctccagagaccagaggtgtcagatcctgctggagctagagttacaggtggctatgaattacagatagtgcatgctgggaattgaaattgagtcctttacaagagtcatatgcactcttaacctgaacaatctctcctgtccaagatctatttttttttaaatctaagaagcatccactagaactatagaggtatgtagctcagtcactaaaatgcttgctgaatagacatgagggcctgactttagtccccagcactcaaataaagctaaagccaggcatagtggtacatacatgtaatcccaacactggagaaatgaaaacagagcccagataaccagccaatctaacataattaatgagctgtaggtcagtgagaaatcctgtcttaaaaacataagatggacaactaagaaataatacccacactgatctctggggttcatgacttacatatgcaagtatgcttgtgcacccacccacacacacatacacacacacgagaggggggaagggagagaggaagggaggaagggaagggggagaggaagggaggaagggaaggagggagaggtattaatgatcagatgcttactttatgggaatcacaaagtaagtcatattccttatataacaagggcaagcagtaagggatatcaaagatagtaagtacggtcagtgttgaatacagggaaggttgtaaacagtatgaaattacagagttcttgtgagtggaagatggggaaagacttcattcctctaactagagcattgaaaacagaaaagggcaaaatatcaagacataagaaccagccttgatgtctcaccttcaaggctcctaatagtcttcatgaatttgatcatccaaagaagaaaagtgtggcaaagtggcctgctgttagacttcggtcagagcaatgaggtgatctctgcactgattttcttcaggaagttgatgaaagcagctattatacccagcagtgcagtacaacatgacatgtgacatgtaccttttatagatccctgatatgttcaagaaagtgtccagattgatcgggatccttctctatcccatcttactctttacatcttacatctttgtgcctagatcacccctgtgccatcatggaactagggcaacccaggtccactaagcactagttctccagtgcttatgggtgaaactctcaaaagcatatctaggaatagctaccactacacaatactcctcagtatacacaggccctgtctcctatagaaagaaccttcttccctctccttgaaaatggctgtaccgtgactactttaaaaagaggattttagcagaagagatgtttaagtgacttcttagtttcttcttagtcataagaaacttttcaggtgctgggacagtagctttgtggtagagagcttatgcaaatgcatgaggttcttggttccaccgcctcgagcacgtgggcacaggagaaatttttcctgaacacaacaccaatagcttatgctctaagatcgagaattgacaaatagtgcctcataaaattgaaaagcttctgtaaggcaaaggacactgtcaataggagaaaaatggcaaccaatagattgggaaaagatctttaccaatcctacatctgatagagggctaatatccaatatatacaaagaactcaagaaattagactccatgaaaacaaataaccctattaaaaatggggtacagagctaaacaaagaattctcaactgaggaataccggatggctgagaagcacctaaagaaatgttcaacatccttaatcatctgggaaatgcaaatcaaaacaaccctgagattccacctcacaccagtcagaatggctaagattaaaaaaaaaaaaaaaaaaaaaaaccaggtaacagcagatgctagcaaggatgtggagaaagaggaacacttctccatttctgttgggattgcaagctggtacaaccactctggaaatcagtttggcagttcctcagaaaattagatatcacactacctgaggacccagctatactactcctgagcatatacccagaggatgccccagtacaggggattgccagggccaggaagtaggagtgggtgggttggggagcagggtggggggagggtataggggatttgggggatagccatttggaatgtaaatgaagaaaatatctaataaaagttttaaaaaattttttaaaaagacaatataaccctgaatgaggtaatccaatcacaaaagaacacacatggtattcactcactgataaatggatattagcccagaagctcagaatacaattcacaaaccacatgaagctcaagaagaaagaagaccaaagtgtggatacttgggacctccttagaaggggaaacaaaaatacccatgggaagatatatagaaacaaagtgtggtacagagacttgaggaaaggccaaccagagattgtcccacctagggatcccagacattattgcaaatgccaacaagagctagctgacaggagcttgataaagctgtctcctgagatgctctgccagtgcctgacaaatacagaagtggattctctcagccaaccattggactgagcacagggtccccaatgggggatctagagaaaggacccaagaagctgaaagggattccagctccctaggaggagcaacaatatgaactaaccagtaaccccagagcttccagggactaaaccaccaaccaaacacatggagagacctagggctccagctgcatatgtagcagaggatggtcttgtcaaacatcaatgagaggagaggctcttggtcctattaaggattgatgccccagtgtaggggaatgccagaacagggaagtgggagtggttgggttggtgagcagggggagtggggatgggataggggattttcagagggaaaaagaggaaaggggataacatttgaaatgtgaataaagaaaatatctaatttttaaaaaaggagaaaaaatgctttgaaactccaacttgagacttgtgtctcttaaaggaggaaagtatgtcgtcaacagcattactctcataatcaccatcatcatcatcatccttgtaatcctcccctcctctccctcctcttcttcttcttcctcctcctcctctccctcctcttcttcctcctcctcatcttcctcctcctccctcctcttcttcctcctcctcttcctcctcctcctcctctccctcctcttcttcttcctcctcttcctcctcctcctcctctccctcctcttcttcttcctcctcttcctcctcctcctcctctccctcctcttcctcctcctcctctccctcctcttcttcttcctcctcctcttcctcctcctcctccttcatcaccatgtaagaagctggggatgccatcttgcatctataaccccagctctaggaagctgagtggtaacacaatggttaagcactttatgtgagaccctaggttcaatccccactaccataaagaaagaaaaatcaaaagaacccttagctatgccactaacccccaccataccaagaaagaattttaaagttgtcatgttaagttgcagtgttttaaagtaatttgttacacagcaatggctaaccaaaatggaactcaataaattttgaagttgaacatgtagctctactgttacatcctcagagacagtgcagtcaaacactgaaccacagtcagttttcatgtttacaaatgagttctggtgctcagagtggaaaccacactcttttgagcagtgaattatttctacaagaatgccaagaaatcttactttaaaacaccatagctaacgcttctgtctagttagccttaactgccagcttaacacagcctggagaacctgaagagagaagcgtcagttgaggaattatccagatcagattgacttgtgacttatgtgacaattctgtaaagaattgtgttgatataagaagggactgtctaatatgggctgcgcttgaattcttgccctggtaccctttaataagaggctatgacaaggaaggtataagctaaattagctttttcctcccctaagttgcttttggtgggattgttttatcacaacaacagaaagcaaactagaacactatacatgtaccaaaagttttccataattatgaactttccatagtcaaagggaccttttagggtttatatttcctacatggctgatgtatttagaacactgcatacgaattcattaatttttatgttctaatgtcccaacttgttcttgaaaaaatgtgacaggcttgtgaccttaatagtgcagtagccatgagggctaagactcatgctgtcacggaagctgcagctatcctttgattaggggtgagtatctggtccccaaaaggagctccttcatcatttatcccttaaggtcaggatccagccaagtcaggaaaagcgatggtggtttcatctgcttcccagacttgtgcttccttctgagaaaatgagtgtttggcaagtgaggaacgtttgcaagatccataatgagcctaaagccatgtgtcaagtcacgcacaaagcatgaaaatcatgttctttccatgatattcttcaatctacttcagtcactgaggtaacagaagtgttttcaacactgaagacactgttatgaaggcagaatcagactgaggaggcaggctcgtttctaccctctcccagggaggcagaaagacaatggcacaaaatccatgcccactgcggtgagctgtgtacatcattatctggggacacagcgcatctgttctcctccctggttcattacaaaggtgtagctggcaaactttctgtacaaagatgaaatgtggcctttcaagtcagggcacatctgccctatttctacccctgccgagtcactgcctgatgaccacattctcagctgagacagtgtcagacggggcacacacagactgaaggatcagataggtccatgtgtggtctgtgaggtgaggtcagggcacaatcagaaacttcagaaacaagcaggagagcctagcttcaggagcagacactgaagccagactacctggctctaatccttcctaattgtgtaagcttgagttagttatttctttccctctctggtcatttgccctgtgtccacctcaggtggggtaaaactaatcagtggaatggacacagaggtgcctggcatcttgtgctccaggcatcttccctacactgtacaactctcatcttacctcattcatcccagaacgagtaagcctggagtcaggtccaaggcaccggggccctgagagtgtcctacattgttttccaatggtgtgagcatacaatgtgctgaacagagagaagaactcatccacctggttgaatgccactctgccagtgccaaggagctgccagactaagccaagatgtccttggctttcacccgtccatttgcaacaaggccaactggccacatttcctacttatctgaaacaatgctaaggaaacttcaacccagagagccagctggcagaggtctgtgtaacttcagcctccccagtgctgaatggagacagatgtcacacttgtacacacacctgaaccccatttcatacctctctgtccctagtgcccagaggagctagggagctgggagttccagtgcatcttcatagggtctccacttctggatgttttacagtgagcccatagtccagcccacctcaacctgccacagcagcttctccttgctcatcccttcccaaaccaaacagccatacacttcatctagcctctgtcctcactgtagcccttcagtgaacattgttctgtatttagaagatgtttttgtcctcctgtggtccatgggactgaaaatgatgcttctctgccaggctttacccacctgggtctctttcctgtcctcagaactttgcactgctatatcagtaactcttcttgatattttggccaaatccttgacaaggacagtttcaagaagggaagattgattctggattacagttcgagaaaaattgtcccccatggccatactagctagggttatttttgcagtaaaataccatgaccaaagcaacttggggaggaaagggtttatttcatcttatactttcaggtaagagttcatcactgaggaagtcaggacaggaactcatgcagagcaggaacctgagggagctgatgtagaggccatggacagatgctgcctactggcttgctccctatgctcagcttactttcttacaaaacccaggaccaccagcccagggatagacacctgaaatgagttgggcccctccccatcaatcattaatttaaaaaagtaccttgccagatcatacagaggcatgtccttaggtgaggtttcctcctttcccagcttgtgtcaatttgatgtaaaaactagccatcataatggccaagaaggcacgacagtaggagcaggaggcagctggcagccacactcaggaagttgcaaagagacaggaagtggaagcttgactataaacctggtagattacctgccagtgacctacttgctccagtcacactccacttcctgaaggttacataactttctcaaacagcaccccagggagtgtggagtatgtgaaaccatgaggaacacttcccattcaaaatagaactactggcttcttccttgccttgaatgtttcttcttcaactccatgaacggctgtctccttgacattcttcagtccaaagccttgactactttgcttgtcaccaggaccttggtgccccctgtctcctgaccatggtggacatgtcatctccaggcttatcacaaaccatagttcttcagtgaatttctttttcttgcctatcatcccttaccatgaggcagtttatcttatgagagacattgttcactgctgtaatctcagcatcaagagtgaaatctggcctatagtatttactggatatgtgctgccaaggtcatgtatgaacaagaaagtggtctgccctacttcatccaaaggcctggtgcacatcaggcagaaacacaaaggctttgtcctttccctttgagaaggctctatctttgataagcgcctatttaactatgaaaaataagattaagagatgttcagtgccataaaagtgacccctactggccactatgagtatgcagagaagatcaacatcaattcagatgaggtcatctagcaaaacgtctaggagtagacagaattcagtgagcagagacaacagactgaagtagggacttcagaggaatgaaagatccagagagagatgcagtagaaaagagaggcaatctgtgggataagggtgttaaggtcaaatgtgctaagccaggtggctcattgagggcttagaggacagaagtcaatgctattgctggaatgccctctgagcaagctaaggcagctaagcaggccctctctccacaggtaaacacaagctgatactggagcttggtatcagggcacagttacatactgggcataggatccttagtacccaagacaactagtcacagtaagctaacagattcatcacgaacccaggaatgtgcagtccttatgggtaaaaatctacagggaagccacataggtgtttgcattctgctgtctcatttctctgtaccaggaggcagctcacctcctcacatattcttcttcttttccctagtacccgaggtccattatggaaacaaactctaatgatacaacagcatgcttttttttctactctgctgtttatttcccttcagaaaagcctgtgaagttacatctaagctgtaattttatcgttaccatattcccttgcatgattttcctcagtctttcaaatcattggtcacaggaagtgagtgccctgcttttctactagcagatgaaatggaaactggtagtctgaagcattgtccaggacactgggctgaccatttcgatagtcagattagacctacccagtggatgtttgaatgtttgggtgctggggagatgttcagttggtaaagtgcttgctatgcaagcatgagtatctgggattaggtctccagcacaacacataggcagagtatattcctgaaatcccagcattaggaagacagagatattcagatccctggagctcactggataggccggctagctgaatcagtgagttccacattgagtgagagaccttgtctcaaaacataatcttggtcctttcagcaaaatcttgctggcatatgcaatagtgtctgcatttggtggctgactatggaatggactcccgggtggggcagtctttggatggtccatcctttcatcttagctccaaactttgtctctgcaactccttccatgggtattttattcttgtaaggctatgccagtgcctggcaaatacagaagtggatgctcacagtcatctataggatggataacagggcccccaatggaggagctagagaaagtatacaaggagctgaaggggtctgcaaccctataggtggaacaacaatatgaactaatcagtacgccccaaagctcgtgtctctagctgcatatgtagcagaagatggcctggtcggccatcactgggaagagaggacccttggtcttgcaaactttatattccccagtacaggggaatgccagggctaagaaatgggagtgagtgggtagtggagctgggcgggggagggtataggggacttttgggatagcatttgaaatgtaaatgaagaaaatatctaataaaaaattttaaaaaaacataatctgggaataaaaagatgactcagcagttaagaacactggcagatcttccagggagacctaggctcaattcccagcacccacgtggtatcttaaaaccatctgtaactccagttcctagggatctaatgtcttattctggtttccacggccaccagacatatatatggtgcacatgcacacacacacacacacacacacacacaaacatatgcacatataatgtatgcatgtaggtaaaatatctgtaaacataaaataaaaataaatacatttttaaaataaactaaaatttattaatgagcagcagtatctagaaagaaactgaagaaggcacctgatgtcaaccctggcttctacatgcacacatatgacatgacatataccaatgcatatgtacacacataggaacacatatatactctacatatattcgataaatttaacgcaaaactccctaccttgtcaatatatggccatgtttatttagcagctgaccttccttcctaacaggcttgtgaagaagacgggaggcaagagcagcctccttttcaggggaagaagaaaatatacaagccaacaaggatattctctagatgcaggaatccaaaatagggttgacattcatttttccttagctcaggcaatgacagaaagtggaacaggaattgtattcatcattagtctatctatcagatctgtgtctagaaaagccatgtcactggttacctcaaatgcccccattcaccacaaaaacatgacagaacccagatctgtccattcactatccccaaaacaagaaacagcgacgatgacaaaaccagatggtcctataggtaatttcaacaaggatggcactgctcacatttgctgtgaacacacacatccttgaaatactccccaaggtttgcagggcctggctgctcctgtggctcctgatacacaggcaacttgaggataagaattatctgctgtcctatgaggtgtaaccactgacagagtgtagggagaaagatggttgctgctgcagtgctccaagctgaatttgctcagtgacatcctggcatcctcagagtggctccagactaccagtggcagcacatcccacaacatctgtggaaagacagatcctctagttccacctggttctaggttcagacccaataggtgaagcctagaaatctggaatacagtgaagtttggggccacagtgtcttatgttccacctaccactctcactccccactccccactcccaccgctgggtgtttggggaaaccaggtcttcttcacacctgttcacatagtattagacaaagatggctgccatcccacacccatgagtctctggtgtttttggtggcatccacaacacctagaggatgcttgaagacaccacgtgtttccaggtgtcagaaggtgaacgggtgttacagacatgtttccctttcctgctttcggacttattcaaaggcctagactgctgtgagcaacatgggatagagaagtcgaggctggcatccatgtgctgttaagccatgtgtatcatgtattatgttaatatatgttaatgcatggtatcacaaagacaagaatgggcaataaagaggcttgttctcatggaaaatatagaaacagcacaaaataaccctagtggagaatgctcactgaagacaggtggcttgtggatatgggaagtctaccatgcacaaatcacttaaggctgggctaaaaccatgcttctgaataatcaggtccaaaaaggactgagaacatcccccaagtgataaccatttcactgtccactcttcccagtgcagttgtggattgtcttcgagcaagtaaacagcaaagaactctggggacataaaagataagcggatgtcccacctgccctaatgtttgccctgtttgtacaactgagtttcctgcagggagctgagagattgtcaccctcaatgctcagcagagaacacctcaaactggagttcacatttagaagcccgagggcttgttagggctcaccagctgtgtgcctccattactgtccatgtgtccattactttcccaacacacatcccagaacacacagtgctctgaatgtgcccaccagtgacctagaattcttactacaggcctaaatatgacccttgtgccagcaacatatacctatctctctttcttccccgcctccctccctccctcccttcctcttcccacttcttcttttcatcaacaatcctatgagcattatcccttgtggggggtggggataggggtattaaagcaatggccaacgtatacacatttggtcaaagccgtaattgatgtgaaaattatccactttgtcaacacacaggggcaaccagaagaaacagtcctttagccctaccatatgacggctgtaataaacctaggtttcttcagctttgctgaaattgttctcacttctcctcttcagccagaagacattggacaagcacccatcgtgaatgccccagaaggtggcaaggttgacctggaagccttcagtcattttacaaaaatcatcacaccagcaattaccagagtggtggattttgccaaaaagttgcccatgttttgtgaggtaaggacatggctcttctgtctgggtcacttttctttatagctccatttccaagagtgcagggtattgtttaacagcaatcaggagaactccatgctaggaaagcagagttggtacaaagtgagaatgtctgccagggctgcagctcagtgggagagcacttgccttgtatgtctgaccttggatctattcccagtactgtcaaaagaaaaggactggttccccaattgtgccttctctctacagccattgctgggtgggggacaaaactagcttatttgctaattttagcaaaaaaattattagcaaaattgctgcagtttgagcttacatctatagcccttctacagaatatcccagagatggctatgtgatcagttcttaatggagaagaattgaagccaaatggccctcacagcaagactctcgctgtctctgtggggatctcttcttccctaggagcttgatctctctggagcctggaaagctcacccaacagagcccatgctttccctcaaagatacttcctccctctcttagcacatgtttcatctcacctcagcttacatcctgtatcactttgacagtgctatcctatagcaggtgagaacagagccactacagggaatgcgcaagaatcctggacatgactgtctgacctgagtcatgtcatctttgagatttacactggtgtctctttaaagcagttggcatgttcagataggagcatacaaatagagtgttgtccttctgccctacctgagtgacaaacactgcacacatcttagctactgatgctgttatttcttctctttgtctttctggaacattccaagtagggtaggccagctccagcaattcccctgtctcttcctcccctgccctaggattacaagttgctactaccaccaccacacctggctttagaaagtaaaaacccatggattttgggaacagggtcaggttcaagcagcatatcctgactatgctgtcttccgggctcaagttcatcatgacatttccatcttgcctctgactttctgaatctaatagggctgatggtatcctctgcggaacatctatctccctttgcaaaattccatcaggtgtcagaccattgctctcacaccttcaatgaagcccagagagttagcatatagatacagtacagactgtagtgaacctcttctataagctttgagagtagtgtatagttcttcctcagctgagagaaccaagtctccttgtctaggatgagcatctgctgccttaactgccagctcatctgtgctgtgagtttacagtaaggacagcccagctgcaatgagggtgaatcagatactggagggggaaatgtcttattgcttacttttgagcatccatagaatccatacccagaagaacagagcagtagcctaaggataggaactgagacggagaaaacactttcttccttctgacttctaatatttttaattaatatttatgatcattctagatgatgaacaaatagtaccatttctaatttccttcctattgtttgggcaaacttagccaaaagtaatttgggggaagaaagggattatttgacttacacttctaggtctgctgaatgattcttctccagagtgggatcagcagtgtgtgagcattacctgggatcttgggtgacagtaaggatgagagccacatagaatcctagaggagctggaacaggtgcctttctgtcctccctgctgtctgtaacctagctcagccttcctccttccaactccctcttaagtcaggcatctaaggatataattaaaacaagtcaggacttaaacaaaagcaaatctttaatgcgttatcaaatagaatcattagacatagaagcctgtttctcatagagaaataaaaagtttaaggttgaactttgaataggctgactactgaacagaagtagacttctcagtgtcttccagcaggattgcttttagttgcataaagtaacctaaactggactagtccagagtccccacctccaaaaagaagctacaacagtttcagggaagacttagacattatgtacaatttacatagtcttgcatggtttacgtattgagatgtgttggccttgaattgtgatagagatagtttcaaatcccagccttacctacaaaatatccctatgccaggcatactagcacactgaagtctgagtgcttgtttatcacatgtgtgaatgaaactggaattcaaatgtttacctaactgtgaagttcaactgagatgactgtaaattttgacaagaaacagaagatgtaacagtcattcagacccattcaaatgacatcaatattgaattcttgaactttttctccaaccccagaaaataattttctatttttactattttgccacacagagttctgttgtaaagttttattagcccattgtcataaaacctaaatagcatggtgaccaaataagctttaaatgaccctgaaatctgagcagaaagagctagcttgtccattgactctggtatctaggtcaccaaatatagaaacctggaagccaggacactggattctggcttcacctctgccctggatttgctggttgacaatgagcaaagcttgtactgccttagtcacttgcatctggcaccttctagttttgtacttcctgaaaagctcagctgcccactgaccagcagagctacacacaataaaagaagatgagtcttgaactctgctcagccgcactttcaagtaaaactcagaatgaagggctgactgatggagacttctgcattactataataccagttgaagacctgtgctaaaagaaatgtaaactgctgaaattaaccagcctggagatttaaaaacagtgattgagggggctagagagatggttcagcagttaagagcactggctgttctcccagagaactcagcaccaacatgcagctcacaaccacccacccatacctctagttctaaggatccaatgacctctttgggtgcatagacatgtgtgcagtcaaaacagtcataaacatttttttaagtagttgtagtctgagcatgttattatatacctgtagctcctgcatttgtgaggcagaggcagattcccactactttaagtccagcttagtctgcatagtgaattccaacccaggcagaactacatagattgtctcagaacaaacatggctgtaagtgtccctccaggtagagaatgagagtaaggacctcaggggatacagacctaggttggccaccaaggctctgtggttgcttttccaacaccctagctggcactcatcctctgttctgtgcttatgtgtctgcttcttttcagctgccatgtgaagaccagatcatcctcctcaaaggctgctgcatggagatcatgtcccttcgagctgctgtgcgctatgacccagacagcgagactctaactttgaatggggaaatggcagtgacacgaggccagctgaaaaatgggggccttggggtggtttcagatgccatctttgacctgggcatgtctctgtcatctttcaacctggatgacactgaagtcgccctgcttcaggccgtcctgctaatgtcttcaggtgagtgtgctgagattctcaagggtgtgagaagagcttcttggggtgggggtggggggcctagtgctaattcacatcacttaatgggttgtctgtctccctttagtttctgagaaacttatctggctctcttgcatccagaaactagaagggtcaattgacagagagctgaatgaggggttatctagggtctgaggctctatagctctgactagcttggaactcattgcatagaccacactggcctctaactcaggtgctctttgaaattgtttgtggaaacacttatatctgaggcatttcagaagtgtgtgttgccttggccttcgattctgacagagctagctagctacatgtcccagcctcacttgtagaatatttgtattaagtcccagccagcatcttaccgttcagctgcctaaatttacatatctccagataaagttgaaattaaaatatttatctcactgtatttttgtgaagactgactaaggtaactaagtcttggtatgatgcccaatttggataggggaaggtgggcaggggtagctgaagccctgtgaaatgatcccatttgcagatagttcatcaacccctgcctgtttgtgcctttgcagatgctaggtatagatgtgagagatagtgccatcctatggatcacttggctcaagttttagtttcctcttactgaacagcacaccaacccaaaactggcttaaggcatctgagactgccaaagctagagctgaacatggctgcagaggttgctcccagcagcctttcctctgaaagaatactcagacccttacatggctgccaggttccaagagggagggcttcaagcatgtgaaaacaaaagctgaccagacttaaatccacggccacatactattgaccaactagctccagctccagcccattcaacagtgacctcaccagtcacctaccagggaggacatgatgttgtctttaacctacctccatctttttaaccaatatctatcagaactctagctcccaacagtggaggtttaatgacagagctgatccatcctctttttatttacatcataataaataattgcaaagcacactgtattgtttaagggcatttagtcttaaaatacagaaaattgattcaggctctcctcttcatttcagaacaggttaggtttttatttctttagcacttgtcattttctgacaccatcagctagttacacttagaggtcatagatatgtcaagccagtgttcaggaggctccaaaactatttaccaggtatgtggccaaacgtccacaaaacctgagtcacagatatcttcagagttctttactgagctgaaactttctaagtatttttaaattgatctagaaattcatttcctacataaaatttagatatggcagatatttttaaagcagtaatatttaaaattatgtttgtggaaaatttcaaatgtagacagaatggcacactgaactctttgggtgactttggaaagactccagggggttccattttcccaatacctactgttctcaccctggtgtaacaccctccctatgacttgcttttaaccaatagaaccaacatattcgctgttacctcatgagattctatatgtaacataaaattattgcaaccagacttattctatcagggccttggggactttgagagattgacacgcaggtggagaaagttctcacagtgggggaactgcacagctggtatccaggctagaaccagtggtcacgtgaccctgagtgttttagggaagagagagtcctcaggggaatatgatttggtgcctctctaagggccacctttgtgatacagcctctctaaattaaaatagaaattgaacatatgtgggaatcaaagtcatggagggaatgaaagcaagttttagctaagtcattattggtacaaagacacatctacataatgttgacttacataaatattataaaggtggcccttagagaaggaagctatttcttctgtaacatcttctaattgtatgccctaaagaaggcagaaataaagaatcaatgtgaggctagtctgacttctatactgttccaatacttactacccttttgaacacttttttttaacaagaaagtgttcaaggacacaaaatcttcagcaataacctttggctttaacaaagaaacttattatttaataagcttttctgcaggcttttgttttcatagtcatcagcttatggaaaatggattttaatactgtgtaataagatgtttcctccagaaaaagttagtaagaagagagaataggtagagaaggcaaatgtgtctgtttttacattactatgacaaacactccataaaaccaacttgagggatggaagatttaccttggctcatggttccagaagcttgtgtccacagttgactgatcccattgctttcatgcctgtggtgaggaagagcatcatgataagaagctcagggtaaagtgaagttgttcaaattatggctgccaggaagcagcacacacccctcccctcaccacagtatccctcacagcactgcacccctcccccaccacagtatccctctaagcattgcacccctccctcaccacagtatccctctcagcattgcacccctccctcaccacagtattcctctcagcactgcacccctcccccaccacagtatccctctcagtacttcaccccctcccctactacagtatccctctcagaattgcacccctcccccaccacagtatccctcccagcacttcacccctcccccactacagtatccctctcagaattgcacccctccctcaccacagtatccctctcagcactgaacccctcccccaccggagctatccatcttaaccttggtgtctgatactctacagcctaagttgcattctcactcactcctaggagcagtgaagtccccagatctataactgaatcagacaagctcacttcttccacctctgaattcaaatccctttcttcctcccttcagatcgcccagggctagcctgtgttgagagaatagagaaataccaagacagtttcctgttggcctttgaacactatatcaattaccggaagcaccatgtgacacacttttggcccaaactcctgatgaaggtgacagacctgcggatgattggagcttgccatgccagccgcttcctccacatgaaggtggagtgccccactgagctcttcccgcctctgttcttagaagtatttgaggactaaatttactggacaagttcttgtcattcctgcagcatgactgggtgtcattgcattccacctgtagcattctgttgttgtttcttcgtttctttgtgtcaagtgagatcatcgatggtcagcagatcaccaatggcatagacttggatgaaattgttctttgaatgtgggtctttgtaaccattgcattttgttctccagtccttggtgtgaatgctttgaagggcttacagcagtgcagtctgagtggggtacaatcattatttcaccagcacgaagtcatcaccagctcccatctgtccctgggcagactcaaacaagccaaacagaatttcagaagactaaagaagccttaaaaccgagaccacagtcatcttgatccaacatgatccattctgatgtgtgcaaggtgaagctgtagagcccaggccgcctcagggtaagcatggcttttatcacggaaggggagaaggagcagtttctactcaggagctcatcattgccagcacccgtgttctccaagcagcctgacttggaatgtgcaggaatatccataccataacaaatcaactttcctttccatggccttttgtaaccttatgatttacttcaagttgcacaagagtatgacttgactggtttgaggccacaaggaaagtctttttttttttttttttttttcagtatgcccatagagcttgtaaatcttcatcaatgttaaagcatactttccaaaatgcgtgtggtgttacctcaagcaggaaggcacctttccaccttagattcacaagccacaaagctcgaatctgtttacatagtgcagtcccttttcaatggcctatgaagcagtcctctgcccagcttagctcacaaaggtcttatccaggctgtgtctgttgagctgatgatgttcccctgtagactgaatcttccaatcagggagacacatggggaaattccaggcttgtttggaaaaatccctggaaaagatcagtacaggaacaatcagattcaaaggaaaaaaactactcatggtataggctgtcagattagagggaatgctctccctggatcagcaagcgctttacttattcacaaatatctcccagtcccatcccatcgctgtctcccaatctcacccttgtggctacccacctccctagattctgaggcactaaatagcttctctctctctctctctctctctctctctctctctctctctctctctctctctctctctctctctttctctctctctcacactctctatctctctctctcttctctaaaatacatctatagcttacacaccattaccctggcaaatactcctcataaaatacagcagaccattcatacctgctacccaacttatccccaatgaccaagtagagtagatgtttctaagcaacaagtagtgacaacttacccaaaaatgggcaaagactgtacacatacaactgaatgtactgactcttcactgacttcgcagatgtaaaatattctttgcctgcctttcactgccttagcctggaaatgctgggaaaaaaaacaagccatatcagcaagaattacctaaaagcaaaggaagtcactgtgaaaagcaaggaaactcaattctttccactaggcttggtggggcatctttggatctttggcctcgctggaagtcgggctgcctgagttctactttgtactctgcagcctgggtaatttaggaccttacaatttcagttttcttacctcctgggaaatgagttgaactccaaaaatccttcttctcttccctattgtttgacttccaggaaagagaggggatgtctttgaaagatccttttgtattcaaatttgtagcttcaaaaaggaatgtatttgggcaatcaatttgagtgagaatgagaatttgattcagaggaaggcagaatggccttagaggcataaaacttagaggcacagcactgaaagtcccaagagactgggaataaccaaggaagcaggaatggtttgtcactaaaggatttagcctgacttcccagataaaacatcgctgaagagattaaatagaaggaagaagccccattagattcatgttcaaacatgtcagaggtagcctgtacctggcctcctgcttcaggaacttcattaaacatgtgatccctatgtcagctcttctggaagaccttcatccaaacaataaaaactttgctgtaagaccaattctccttccaaagggagagggggaggcagggaggcgagtcctgcacaggcatacaaacttctggaacaccagaatttctaaggaagtttcctgattctgacagttttcaaagggaatcagaaaccctggcactagtgcagggtttgacccagaatcattcagagtgctgtaaggattaagcattgggcactagcccagtcttcacaacccagccagccacagcaaagtgaccctccctctacagaggcccacctttcagggacagacccagctctggcaatcatgtttagggttgaatactccacaagccatgcgagcttcactcttctggtgggaaggaaccagaatgatagtaggtcaggacagccaaagacacgcttttgagaaattcattttatgaaactagattgtaagggatttcctctcaaatttttttcttctcttttaaaaaatcattctcttctaatcttgtccagactttcaaatcaagtgtggacatggtggcaggaacctttacacctgctccactgtggggagatattccagtcaagaaaacacactcatcctgctgggatgctcactgacaaatggaatttatggacaagaaggctgtgcacatgcagcaaaaatgtgcatgtgtacacatgtgcgtatatctgttcattgcctcaagtgtacttcgcacttcagtttaaatgtgcagaacttccagaaactggaaggaaaaaaaaaaaaaaaaaaaaaaaaacttcttcatgattctgctgaaaacaccacgtgctgcctctgagctttttctagtcccttgagcctcagtcctcagtgatgcgcttatgtgatgaagcctcagcccagcgcatcccctgcctctttcccagttcaatcttggggagggtccttctcacagtgacctgcaggctggccctgccaccttggcctcctcacactcagttctccccaagccagcatcccgacctgctgagcctcttcagagcatgtcattgtcagtaagacctcttcattctgtggaactcaagcctatccatgtcatattgaccttttgctgcatgagtcataaattatcaaatcagtcttacggtttttgagatgtagccagtgttttataaggctaaacctttctcatgaacttaatttaagtgaataaccaaactaccggtccttctccaatgagagatgacagacaattgaatctctgccctttgcagtggcgatggcatcaggtcctaaaataagcttataattttcctgttattttaataatatggaaatattaaaataatgtttcttttgatagtgatagactgatccatatttaaattttatagagaagaaattttattgtactgtgatatagatatttattatccaggtaaggatttgcccggtgtgtattttttacaattgaaacattttactttaatctctaaaagaaaaaagactataaaacatatacatattaaaaaaaaggctagggagaaaaaaggtttggctttatcaaagaatttttactgtgttgtatacatgtttgcaaatgaaaaatttacacatttttagtgtttccacattaattagtgccgccttcaagagcaatattgtgcagtaaacactgtttgtggctttctgttgcccagctcaaactgaccccatcttatgcacaagacaatcagatgttacgtctttcctctgaggacatagacaatactcaacagagcacaatgtgaaacaaagaacaagattgtaggcatgggctgtgctgctgatggagatgatcagggtgcatgcgcactcacatggccttgtaccactgcctccttttggttgttctttgtgacgttggtatctttctcttgacatcaaatagccaaagtagttctccatgttttcttcagaaaagaccattctttttcccataatgtgttcatgccctgagaatcagaaaaatgaaaacaaaaacaaaaaaagatacggatggaatagagaggtttatagtcagtggaagattggtattttgcaaacagtgttaagtgatattgctattgctagattggtaattttttttttcagcctaaaatcgttgaaatctgtgatcaaatgttttaaactatccagaaagaaaatttgtatatttgggaaaatggatttttacatagcttttgtatgcggatattaaattgtaattatgaatatagtggacataggtactcataagcttaaattctaaaaaagaaaaagcttaaaatagatatatatttgcctgtctctttctttaaatatttctggatataaggggctgcctcccacctcaacactgaggcagggaaggaattacaaatacaaggcacatctactaagatgaacgagttcaactttggggagcatatggaaagaagggagaaacacagacagacaaactgactgacaaacagacgtcatcaaaacatccaacagaaatctaaggcaactccactaaagtagggtgttggggttctcaagaaaagagaacacagaacttggagcagaggggagtgtcccttaggataagaacaattagcgtcataaagattacatcgtcaaatcagggcttgcctaccagaaaaaccaatggggaaagttgaggcagtcaactagagtttttgggaattctcttcaaggctgaactcccaacaggtgagctcctgtcaggggataagtagctaagtcctttgatcttgaaaagataccatgatttatctctcagctatgcgtaaggacacaggatttactttaacaattcactctcctgttctctaggacatgatattttcattcgtaggctattttgcaatcattgtcacagagttgggggtaggaggtggaaagggagggtgggcagaccaaccccagacaagaaaccttggaggacactttgatttaagcatgcttgggcctgaaaggaggggttaccccgcagaagagagagccaatcaaaggtcattttccctgaatatttgtatcacacttcataggaatcaatggaaatcttctcccatgtgaaacttcacttaatccaaggactttgggtgatgaagagcacaataaaatgaaggatgttttcttctctcaggctgctaacaaccatttcctttgcattttcttgcatacaatgagttgccctgaggaaggcagatgtgtgtagaaaaggaaaaaacttcaaaacagacttaggataaagtagtctgttctagtgctcttggatggagtgagataagaaccactctcagtctgactccaagtgatacagatgctgaatgccttcctcacaccagatgcacgcaatcctgtgtgttctggggcttgtgactcagtggctattctgagctcagaagagatggcgggtttgtttttaacaggacttttgtaataataacacatccaacatggatgcctgcatcccctgagagacatttactggtaagtgagctactaatcagactttccaggaagttcggatctccctgcatgttaacatcactcactagtcactgggtacttgagagtcccaatggctcccagccccagatcttcagtgtaatgttaggttatgtgattctggccagccttgtatgaacattactctgtcctaggaatcttgcttcacccttcattctacctcaatttctccaaagcacatgagagaacatgaggtttctgatgacaggataatgcaatccactgtggtgatgctcactgcttaccgtccaaaactgctcacccaccccactgcaaaaaacccacatccaccaaaagaaaggctacctcaaccctcaatagactagatccactgcaaatgtactcacgaggcttaatatgagtggtgatttctcctggtggcatttatgtattgtcccaatggcttctagagggctaacccaaaggtatttttgtccttttgcttgagacagtctcactgtatagcacaagctggctaaccttgaattcacagaaaactgacatcctctccccccaactgctggtattaaaggcatataccaccacaaactaaggtattttgtcttgtaagcacttgggagtcaaatttaggaaaagctatgttgtatgatagaatgagaatttatagcagtgggagttgggcatcctgaaagggggagctgagaaaatacgaagatggaagtatttgccttctaagaggaaacaacatgctataccactctcaactttatcaactttaaataataaaattattggcaaatgaatggtgcaggtgaatttctttgggaaaaggggggattaaatcatactgatatggaactggagggccccaaaatgaaaggaatctaataagagcacaaatgtcccttgatccataggtttctggatctgtactgtttagtttcaaagagagttgtttttaatatgtctcttccttcttcaacatgtgtgcagacaatcatgatcatattcctctactccttccacctactctcatgtcctcttcctttaacaggccccagacctcagcacaactgatgccgtgatgggagtcacattcaggcagcaatacctatcaaaactagaatgaagacttgatccatgaaagtccatagttctgggaaagcccctaaatgtactaatcttgctttttgccttctgtagttccacttatacctatctattcttgctaactgaattatgtcaccccaggatgtgtgtagttttgtgtgtgtggtttttgttgttgttgtttgtttgttttttttttaagctcaccctgaggaaagtgacttcgctgaggtcctgaacactcagtgtagtcaatggctgcctaataaaggcttaaatctgtgcctgagcagtcttttctggtggatacctcacatttctggagatcccagcaagattcttagagacctcaagatattaggggcgtccagagccccttggagcaggtaagagcacaatggtcaagcatctcctaggaggaacactccagagatattccatggctctaggactccctctgattaattaatttctaaataatactttatagtatgtattttggagtcaagttgtggatgtgagtctctgttttctccctctcagcatgtccaaatgctctgcacactgagctaaaaggatgatgtggagtccagagcaggtggggtcctacagaatctgggtctagctgggagttagagccaagggagaggaagagggagaaggccttctctgataatcttcaatgaaacagctctctgagatgatcttagattgtgctttattcggagtgggtttgaatgcatacactttggagtgaaccaggggtacatatggaccttgaagagtagaaaggagttttcagggtaaatgctaatcattggctagagttttaaagttctgtgaatcccttgtttgcatggagaggcattccaggaatctcaggtgcttgctggacaggttcttaactggccctgaacctgaaatctcaccaagtctacatgacattctgcaggtagagggtatagaggtttcaggctcctcagacaagatcagaaaaagggaagccctgctggttaaggaaatcccccattttatacagagctcaggatatctggacaatggtagaatttgaccttaattagcagggcccaacaacacttcaaaggaatctgacacctccagcccaacagggaacaaaatgaaagtcagctggtctggtccttccagaggttaactctgcttacggtgccttctgtgtaggacacaaaagagaggcaggatggtggtaaccactgatccggtgtccaggatccatgtgagatggcactggattcccctggtttgttcagacgcatgaatgtgtggtggccatccctaggtgtatttactatgagtgtattacaggaaatactttaaaatgtaactggcatgtcctccaactctctgccccaccagtctggcaggctatgtattggcgggcaatggccgacctgtttttaatctcatggagactctgacttggaactccacagtctctccacccatctcactaggttcccactggcaggttgttaccatgacaacaatgtgcttcaaatcccccacagcctttgtggtgcacctcaggcaaacctaccctttgctgctgtacctttctctcttgaacccagactagccacccagtgaaggaaaacagaacacaaacttagttcagaaatggcggtaacacaatcactttgtgcagcaactaaaactctaatcttttaactttattaaatctaaatcctacagtggcaaatcctgatggatccacaactgaaaccattgtagctacatcttgtcctgtcactctccctgcccaaaaaaggacctctctcctgcttcctctcttcctccatccaacccagaagtactgcttactccacagtgattggttcctttatacattaggggattggttcacaagaacagcaccagacccacccataacacttccccatttctgttctaataaaaaaagaaaacctttctctcaaatataagtagaacacaactattaccattttgtagtttttaaactataaaacagacctaacacccagcccatcatttgtgtcactaagatagaacattgccatctatcctaaatttaaaaacttatgattctacctttacttatgtcctggctttatatagtgtgccatctgaaaaccatcctctcaaatctattccctcaaagtaaatagcctgggttggctatgagactataagtagtttttcaaccctgccagaagttcaagaacaactattattaactgaaaagatatacgaagcctaatacagcttccagacctaagacaaattgtagagacagctgcctagctatacagcaccagtataagtcagtaagttggaccatccatctggtttcacccttctggcccaggatcatctgaaagacctagagaaacaggaaattaaggactagcctattctgtctcagcagaactaagctatcctaacctgtaaattttgtcctttttctggaaactacaggtctgggtcaattttctgcccgatggcaacctagccacaaatgtacaggctcacctggacatgtaatgttcagttccttctttgaatccatgaatgggaaattgttaggagcagacttgtctcaaaaagcaaataaataacattaaatgttacatacattctgtggatctctgacattgtttaaaaccaatatatatataacctatataaatataatctatataaatataacctatataaataaagtaatctggactgtgctccattaacttctctcagctatatcttttttttttctggaataaaattttttattatatattttcttcatttacatgtcaaatgctatccccaaaaccccctataccctcccccaaccctgctccccagcccacccactcctgcttcctggccctggcattcccctgtactggggcatatgatcttcacaagaccaaggggcctctcttcccattgatggccgactaggccatcttctgctacatatccagctagagacaccactctgggggtactggttagttcatattgttgttcctcctatagggttgcagatccctttagttccttgggtactttctctagctccttcattagggccctgtgttccatccaatagatgactgtgagcatccacttctgtatttgccaagcattggcatagcctcacaagagagagctatgtcagggtcctgtcagcaaaatctttatggcatatgcaatagtgtctgggtttggtggttgtatatgggatggatcccagggtggggcaatctctggatggtctttcc

SEQ ID NO: 456 - DNA, 1837 bp, Mus musculus
agcaataagctgcatccacagcttaagacctttacagccctaagtctgttcttcacggcagtagaacagcaggagagcttgaagatgcagcgtcgaagctgggtcttggcacatcaggtgctactctgaagtgaggcaggcgaggttgctgggctggtggtgtttattcatctcctctcttgtttcatgtgtatgtatgtatgctctccgagtatatgcacggctccatggttcagggggctggcaaatgcatgcgtagagcgtgtgtatatgtaaagtagaacctgaacctggatagcaaaatgaactactgtatgccagaggtacacgaagtgtgcccagctgccagcagcaactgctacatgcaggtcactgactacctcgcatatctggaagacagtccggctctcagtggtcgtgatgtccaagctgtgcccagtagcagcatatatatggaacaggcctgggcagtgaatcagccttatacctgtagttaccctggaaacctgtttaaaagcaaggactctgacttggacatggccctcagtcagtccagccagcctgcacatctccctgaagaaaagccttttcctcaagtgcagtcgccaccgcactcacaaaaaaaagggtatatccccagctatttagacaaagatgagctctgtgtagtgtgtggggacaaagccacagggtaccactatcgctgcatcacctgtgaaggctgcaagggcttctttagaagaaccattcagaaaagtctccatccatcttattcctgtaaatatgaaggaaagtgcatcatagacaaagtcacccgcaaccagtgccaggaatgtcgctttaagaaatgcatctatgttggcatggcaacagacttggtgctggatgacagcaagaggctagccaagcggaagcttatagaggagaaccgtgagaagaggcggcgggaagagctacagaaatcaattgggcacaagccagaacccacggatgaggagtgggagctcatcaagacagtcactgaggcccacgtggccaccaatgcccagggcagccactggaagcagaagcggaaattcctgccagaagacattggacaagcacccatcgtgaatgccccagaaggtggcaaggttgacctggaagccttcagtcattttacaaaaatcatcacaccagcaattaccagagtggtggattttgccaaaaagttgcccatgttttgtgagctgccatgtgaagaccagatcatcctcctcaaaggctgctgcatggagatcatgtcccttcgagctgctgtgcgctatgacccagacagcgagactctaactttgaatggggaaatggcagtgacacgaggccagctgaaaaatgggggccttggggtggtttcagatgccatctttgacctgggcatgtctctgtcatctttcaacctggatgacactgaagtcgccctgcttcaggccgtcctgctaatgtcttcagatcgcccagggctagcctgtgttgagagaatagagaaataccaagacagtttcctgttggcctttgaacactatatcaattaccggaagcaccatgtgacacacttttggcccaaactcctgatgaaggtgacagacctgcggatgattggagcttgccatgccagccgcttcctccacatgaaggtggagtgccccactgagctcttcccgcctctgttcttagaagtatttgaggactaaatttactggacaagttcttgtcattcctgcagcatgactgggtgtcattgcattccacctgtagcattctgttgttgtttcttcgtttctttgtgtcaagtgagatc

SEQ ID NO: 457 - protein, 480 aa, Mus musculus
NLNLDSKMNYCMPEVHEVCPAASSNCYMQVTDYLAYLEDSPALSGRDVQAVPSSSIYMEQAWAVNQPYTCSYPGNLFKSKDSDLDMALSQSSQPAHLPEEKPFPQVQSPPHSQKKGYIPSYLDKDELCVVCGDKATGYHYRCITCEGCKGFFRRTIQKSLHPSYSCKYEGKCIIDKVTRNQCQECRFKKCIYVGMATDLVLDDSKRLAKRKLIEENREKRRREELQKSIGHKPEPTDEEWELIKTVTEAHVATNAQGSHWKQKRKFLPEDIGQAPIVNAPEGGKVDLEAFSHFTKIITPAITRVVDFAKKLPMFCELPCEDQIILLKGCCMEIMSLRAAVRYDPDSETLTLNGEMAVTRGQLKNGGLGVVSDAIFDLGMSLSSFNLDDTEVLQAVLLMSSDRPGLACVERIEKYQDSFLLAFEHYINYRKHHVTHFWPKLLMKVTDLRMIGACHASRFLHMKVECPTELFPPLFLEVFED

SEQ ID NO: 458 - DNA, 194534 bp, Homo sapiens
  misc_feature (1)...(194534): n = A,T,C or G
aaaggaaataagaattgagagatctgaatagttgcattactagtgattttttaatacttttctgtagtttaaattttttctccaaagagcatgtgttccttttatgttctaaacaaataaactttagctcagactttaccatgttatttctcttcagtaaatttaaaactaattcatggtttcagatagtgttcagcatacacatggcactgtgtaggatatcaaaatttgcttgccaacatcagtgagtatatacttgtttagtttaattaaaaattattgccaagtaagaaagtaacattaatattttattataatttattattatatttataaaaacagccaagaactctcatatgattcatttttttattttgagaaaaaaagaatgatctgtaattgtggtttgcttttaaaatatgactttttttagaaccagatatgatagactaattaattggctcctaataaatagtgtgcctacctaagtgattattaaactctatcagttaattgtaggaaagtaaagagacaactgtttacatccagatagattttagctctcttgagaagtttcatcaaactccaaccgtacgtggttacagggttgtgtatcacattctgcaaggtacagtaatgtgccaattcaaagactttgagcaatgggccggaggcagagggtgtaagcctaacactttgtttcttgacccagtagccaaagtatgctatgccttagaaaaaaaaaacctgagatcagctgttctgatcaccttgcaaattttgtgatgcagccaccaccattcctagagtcgattttagccagatacatgcaggaaaatacaaagaatatttatgctatttttctttgggataatttttcccttgttccccagcccatttataattcctgctttcagggaatctatatttatgacaacccaatcatcttggcctgtgcactgcatctcactgtgaggaaccagagccctctgtggaaggcagctttatagaggagaccacactgttgacagattcctgcctcctccctgtgggtggtctgaagcaaggaaatctgagctttccagcgcaggcctggcatgtgccaggaaatttagattcgggggagctgctatctattacagttatgaaccttctgaaaaccagaattgcaggtaaccagtattccttctgcatgccaaagcaaaccccgggcccttaatcttcaaatgactggactattaatattaaaatggtttctattatatagcctgggtaaagatttgttagtttctgaggtaaagcaacaacaacaacaacaaaaattgaaggacttttactttgaaacatgtctaaattagcaagaggaggaagtatgtttgttatctattggaagaaacacttttagaagcccattgggggaggagatagactcagatttcttgggagtcagcccagtcttggaaaaaaagttctaagaagtttagtaggagatgccaaggcacgattagaggaaggtaaacctgattttgaatgctgcatagaactaggtattcttggtaaagttcctgaaattttctgaacctttctgtcctcatctaaaaaactgagctaataataatactttttgtggtagatacagagggaaatgagataagaatggatgtgaaatgcctgaaatttgtggtgtgaagctcacataactctttacctcattattaaaatatattaaaatgcttccaacccattataaccagtttgcttttacaatgaaaatataatttttctcatttggtaatgagaatgcagtatgcaaatggccatgtctaaattagttttggatcaattaccacttatgatttctaccactatataagcagctgctaacattaatactgtaattgtaatcccccttgaccttaccctacacatgcaacttctattgctagaggaagtcccaaccctagggtgttggtgctacatccaccacccctacccaacctgtagccttttgtatataaaatgtaggccagctacctctacagcaatggttttcacactttagcatgcacttgaatcatcttagagtcctggatgcccaaccccagagtttctgattcagtaggtctcaggggaggacagataatctgcctttctaacaaggtcccatatgatgctgatgctgatgttgctgatccaggaaacatactgtgagaaccactgatctatataattcataaaataaactcaggaggttttcgtctttttcaatgggctagactagtttaaatagcattggaattatctgttctttaagagttaaatggaacccagctgtgaaattatgtaatcctgatacttcttccccccatttaaatgatagacttttaatcaccatttctgtctcttcttattacattttagtgcttcctcttgggtcagttaatttctgttttgctaagaaatcatccattttttctaggtttcacatctattacaatggggctagttctagtactttcttaataatcattttcatttttgtgtgcatgtttttctctatttgctcaatcctagtatttccccctcttcttcctttaatcatattaataagatggttatatattttataaaagaaccagcttttgaatgtatttgttctttctactatttttgttttccactatatttcagcatctatctttattaattccttcttcatactttatttaggtttacatttttgttcttcatgaaacttactaaggttagtactatgttaacgtcttagttcttcagtaatgaagctattatagctataagccacacatttttcctctgagtatagctttagctgtgtttcataactttggatggaacatattctcttttttattaatactagatagcttatgattttaattttgcttttctcatgaatcttacagctattataaaggatgtttcttatttttcaagtagataagatttactagctattgctttatttaaaatcaattttatttgcttacgatctaagattatatcctatcaaaatatctacttttaaaaaaaggtgttcattttaaccttgtgatttatattttattaatattccatggacaatcagaaatctattttattaactcatatgatgtgagttctgtgtacaaatctattagattgagtgtgtagaatatgtcgttcaaatatttatgtcctttcttgtatttgggctccttgatcacttccaaaagtttcaaaatcatttcccaaagctaatataatctttattctaaaatctgaccaagaaaatacagactaaaaaaaaatatgagctaatttcacatatacacataagggcaaactttggaataaaatattaccaagtacattccaaagccatctcaaaagaaagaatactctatgatcaagaaaaatttattcctggaattaaacatcgttaaaaattaggaaatctatcgaaatatttgtccaatcaataaattaaaggaggaaaaagattataaaagtacatgtaggaaatgcatctgtaaaattcagcagccatttttaaaaaacttagtcggtgtatccttctgtttcacttaaacatgataaagactatccaccaaaaactaacaagtaacagaattctaatggcaaaactctcaggctccttgtagtaaaattagacgtaagagaatgtatcaattatctcttgtcccagtaatgttgcataactatcaaacttcagtgacaagtgataattaacatgtgtagctcacagtgggaatcaggggatctcagctgggcctgcttgcacgtctgtggtcagctatagatcatctcagcagctctgcgatgataatcgggcatgctcacgtgtctggtgtctggggctggctagctgtgggctgattgaggatggcctctactagaacattggaaaaactccacaacatattctcttcctgcagcaggctagcccaggtagcggccgagaagcaagagcaagtctagtgtgagaagcacttttcaggcatcatgtttgctgaccaccctttggcccaaacactcacctcactaagcctagactcaaaatatgagggcactgcaaagattcacagcaaagattcatggcacagggcctagacacagggaggagtctctgtatttgttttttctttgtatttgttttatcaagtgaaaaacaaataaggatctctgcttccatcaacattattcatctttgtttcaggggtccctgtgattttagttggccaagatgtaactggcataatgaatacaaccaaatgagaaatattaccttttttgttgatgatgtgattgtatacctgtaagagtggaaggactccagtaaaaaactggagtgcaacaatcagtaagaatatttgacaaggctgttggactaaaaaataaatgtagaaaaatcagtaagtcttctttatagccattcgttcaacaaatatttattaaacactcactgaataataagcattcatctggtccctagtacagtcgtgaacaaaagaaaaaaatcattttctgcatagggcttatatattagttgggggtaatggaaaataaatgagtaggtaagccagatggtggcaagtgctatggggaaaaatacaaagccagagaagaagtatagtaaatgcttagccgatggactggatggcaggcagtggtgtgttgttttctatgaggtgattagggagggcttcacttacaataagttggcatttgagcagaaacttgaggtttgtgacaaattctgctgtgcagacaactgtgacaagcacattccagttcaggaagagtgaacagcaagttcaaaggccttgagacacggttgtatgtggtatactttatttacaagaattatcaattacaaatggagatggaattttcaccataacaacataaattttaaaagacttaataagatacaacaagaaatgattatttagaggacataaaacaaaatctataaaaacccagggaaactatttaaaaaacaaaacaagaacagaggctaacttgtcttttaccaggtacttgaatgtgtagaagtgactatatcaaaacaactggatattggcaaaggagtaaacaaattgatcagtacaacagaatggagggtacatctagaacggttgttgccctacttgctaatacattcaaaagtaaatgataggtggataatggtacacattaatttaaattaagcagcaaacatgtattgatttgctattgctgccataacaaattatcaccaacctagcggcttagccaacaccaagttagggccttgcagtctgtagggaagaagtctgatacaggcttcacaagggcttaggtttcagcctggagcctctgagggagaatcaactttcttgccattctcagaggtcagccatactccttggcttccttcctccatcttcaaagtcaacaatgttgcatctctccaacccttcttccatagtgacatctgccgctcaaggattcaggtgactagattgggcctacctggataatccagaataatatccccatctcaaaatctgtacccttaatcacatctgcaaagtcccttttgccatgtaagatagcatttttacaggattcggcaataaagtcatggactttttggggaaccatctttgtgcctaccacaaacattttagagaaaatttgggagaataattttataccccaagtgtcagggaaatgtttataatcaatacagagctaattaataagggatagataaaaagataagcatactgtaccatgtaattttttaattgcatgaccaaacatatcataaacaaactaaaaaatacaggctagataggtgtcttacaacatgtggcaaagtgttaatgtctgctttgccacagcattcataagaatcagtagggaaaatggggaaaagatataagtagttaactcacagaaaagcacattcaaatgatcattaaaaccacatgaaaatacgctcaacctcagaagttttcagacaaacacaaaagtttatggtaacaatgagtatatttagtttcctagggctgcagtaacaaattacatgagcttggtggtttaaaacaacaggaatatatgctcacagttctggggagaagaagtttgaaatcaaggtgttgacagggccacactccctctgaaggctctaggagtgaatccctccctatctcttccagagtctggtggctcctggtgttccttgatttatgaatgtgtaattccagtctctgcctccatctttacctggccctcaccgcttctccctgtgtctcccctctgtgtgtctcttataaggacacttgtcattcaatttagggccagccagataagccaggataatttcatgtagagatccttaattatatctgcaaagactccctttccaaattaggtcatattcatagttttgggggattaccacatggacatatgttttgggggtccaccattcagtcactacaatgagatacccctcccatcaaattagtaaaattttaacttttttcattgacatatacaagcttgtaatatattccaaatacaaatctaccaaatatatgtattacagatttaaaaaataattagcaaatatttcaaaggagcgataatatccaccactgcagttagatgaagagatggggggagtctaatacattcctgtggtctttgaacttttgaaaagcaatctggcaaactctattaataaaaaacacagggagatatcatatatgacccagcttttggaagctagcccataaaaataaaagcattgatatgcaagattctgtgtacaggaattttattgcatcattgttgtagggagggaaagaagaatctggaaaccaagcgaatgcccagaaattggggaatagttgggaaataaatgtggtgcacgtgtatcatggatattatatactgtatgcatagagattcgagaactacatggatggatgagtattaggttttatcatggccagagtggttggtagatcatgcaagaatccatgtttgagggtttaagtgaaaaaaattcctttcttttgagtcgcaacacctggaatagtgtatcaactttgtccttaattcctggtgtaactgagcaaagtcacgtgtaaccagccaccctgggtctctggttgctcagcctcaggtgaggaggtggcactgcctgtgagtatatgctaaattccaggagtagcaaagtgttctgccctccctcaggcatagggaaaatattgttttgtgttggctggacagatctagagatgtaatcggtggcttttgaagagtcattgctgagtaagtgagaaaaattttatgccatttagtctaggaattgagagtcagtgttgggatgtgcaactcaaagctgtcctgctcctctttcctgtaattcccctggagtattttcagcaataggaacacactgaaaaagtacactgcttcctcctccagagaaaaccacatgcatttaaaggtataaactctggtatgtttgctaaaaaaaaaaaaaaaataaataaataaataaaaaagcatacttccccagaagcctcaaggcttcctggaatttctgttaagaattcagatgtactgatgataaatttctaaataccacaatttcagccaattctgttaacaaataggaaaaaaaaagaaagtttttatgaccacagaaactgttttaaaaaattgtgggggaaatgcagttacacttggtaatctgtgaaaaacagagatcagatagagttcttgatcttttcaaattttttgcatattgtataggatacagcatcgggtctgtaccaactacaggacacttacaaataagttattcacattaaatttcttgaaaagcatccaaagatcaagttactcattctccttcccccaggcaaggctggagaactacacagcccaggctctttaaggtctttcttatttttaaagaactcttagttataatgcatgattcttagtttcctctacatttttattttattctacagtgaacctgaattacttttcttttttttttttttttttttttttatgagactgagtctcactcggtcgcccaggctggagtgcagtggcactatctcggctcactgcaagatcagcctcccgggttcacgccattctcctgcctcagcctcccgagtagctgggactacaggcgcccgccaccacgcccagctaatttttttgtatttttagtagagacggggtttcactgtgttagccaggatggtctcgatctcctgacctcgtgatccgcccgcctgggcctcccaaagtgctgggattacaggcatgagccaccgcgcccggcctgaattacttttctaagcagaaaaaaaaatattaacttaaaaaacttatctatgtgatttgagaactatagttcataaagtattttggaatgaatttttaaaaaacaatcaaatgagtcacaatccataatcatgtctagagaccctttttcatgctgatttcttacaggaggttacaaaggtgagagacggtgtgcatgcagcaatggagggaaaggccttccatgtaagaggaacatgaggccaaatcttggcaattcacttcctccctaaggctctatttttccatctgttaagtagagatgacgataattcttatctgtacagagttgttacaaggcttagggtaaaaagtatttgaaaattgtacccagtaactaacaatctatgaaaatcagagacggtatttcttcctggcctcgttttcttcttccttgtttaaaataatcataaacaaatgcaatacaagatgtgttaggccatttgtcctcaaaatactattggcctcttaattatatctgaataattatttgcatgaaattaagtcaactttactgcaattgtaccgaattggaacaaataaaacttcaggtgggagaaatgttagaatcaggtttgtggttcccatggggcgtggatagtacctagaagggagggattgtaggggactggtaagcttcagatttttgatctgggtgccagtgacacaatttgtgatcctttctcaaggcactcactttcaatctctgcatgtgtctatttttaagtatgtgacactttaataaaaagttgaaaccaaaataaataaataaatatcctctatgtagtctttaacggacctattttcattttctcacatttcatatgcacaacattaaagaagaaatagaaattcgatgctttagaacaaggttttcaactaagggctggaatcaaactgacctaagagtttattagaaagtaacatgaaaatctgccccccagagatggtgattgagtagatctggggtggggcctagaaatatgtattttttaaattcaaaagttaggagccactgctctgaagtctaaagcacgggcccttacacgtgctacaagttggaatcacctgaggcatttaaaatgcattatgggctgggtccaaacccacagcttctgatttaattggtctgggatgtgtgacccgagcatccaggttttttaaagctcccaggtgattataatgtgcagcatcaagtgtggaacagctctctaaaacagagggaaggagtttggaagtctgttgtagctacttaacagcaggcgagaacagtgagggaacctcacatcatttaactgcctcaagacgaagccgccagcatcccaccatttccctggcctgtggatgccacgtaaggcaagtgcttactatatgtttctgtaatgagtatgcatttgtttatagggccttcataactcgtctgggtcatcaccatctttttagcctgtaaatttctaaatggcaggggcaaggacaggagaactgctttgtaaaagcaactaagtgctacaatgaaatagatgatcacaataatgcagaaattcctttctgcagctcgccagagaggcaaactccagcattttatatttcatctgcccccagtgacttcactgtaggaagaggaaatgcagaaaaacaaacgtcttgaagactgaaagcctgttattcaaagaggttagcagtagactgttggaagtaaggtatgtattccaagattcagtctgtgtggtgataagaaatggttgttttgatggaaaaatttatgcttcctattactcactcatcacttacacttcttattaattcattgtctcctttctaacccatggatactacctggcattcagtgccttcaaaagatgtcttccctcagatatgccttgtgatttctcatactatacgggtagagttaaatggggttagaagtactagggccactcattgtttatgaaggaagtgaaagttgctccttgaaatcaacaaagattcagaacccaaagtttgaatcattttacctatttgagaaatcaccttgctaaagggctcttcggcaggaagtcacaaaatcagtactcagttcttgctgagttccctgaaactcaaacctaaagtgtgtggatagccctatttaactgacatcccttaaggagccatgctcctctgccaggaacatcctccccctccttggtgctggagttaactcctgatcaccctccacaggatacctcctttatgctctcccggctcaccagaaaggaggacagggcttgctctgttctctgtactcttacagcacttttgttcctgtactggtcataggatgtgtcacagtgtgttataaatatttatcttctggtcaggctcttctgttagacctaggcttttattactggagggaaacttactcatattctcagcctctgaactcagtcctgtgccttggcacatagtaggggtcacaccacgtaattgcagtagacggtgtttgcaaaagaattgcccgtcctaacaatgtggccatatttattagcaggagctttgggaagtcaagcttctaaccgaagccgacattatcctaaaataggaagccacatcaacgctgccttttgactcaataaatgtcagatcttattccatccaaataactcttgactctccaactgagctctaatggaagatcaaagagcctctgagagctggtccttttctccatttcaagaagtgggttaatgcttatagttaattctaagctcttgactctaggctggaatggcaataaaggcatatctgacctttaattctaagtaaaataaaaagactggagagttgttacagaggcaaatgtaggaaagagaaaactaagtggaaatttggggtaggaggagcaaataatctttagatcagaaggacctagatcacctatctgtgctgtccattactgcagccactagccaaaggtggttaaatgtaaattaataaaattaaataaaattaaatggttggtagccacacagggctaatggctcccatattggaaagtgcagatgtagagcattgacattatcacagaaagttctattggacagtgcttgataaattccatcgctttacagatagggaacctgacagctggagaagttcagtgactgacccaaggattcatacatagttggcctagacctgagacccaagcctcaggaaccccaagctggcctcattaacactctgtgatacggggttttcctaagccaaagaaaatgaagagggctaacaagtttcaattgaattcaaaagtgcagagtagccattaagtagtgttatacaggcaaacttactgaaataaaatttgcaagcaaaaaactcctggcacaataattgtcttaagtggaaaacttaacttctgaacaaaaacttgtctttgtacttaagtcaaaacactaagttatgtcacagtaaaaagtaccattcaatcactcaatttaatgtcaggtgaagcagttgcatactaatcaataacctcagatgcacacatttgtgcctatttaaatgcctgccctagtaatcctatactgtattattgtgtagtaaaatagtccccaaagaaaaatgtaccttcttgcatcttcgaagtatacatgcatgtggttagggctatcacttaccatctttagatattaattacttggcttttccaaatgttgtgaaatgttttttcatatttctatcttgagctagtttcgataatacaatgctgtgcctatgtttgacctcctataaagaatatcagcccccgttatatatttaaatctggtttccaggtggtgagttttcagacctaggacagcatttaaaatataattgtgtgaggaatttgagttggtatcatagttacagggacatttttggacatagtatttcagaaagctaacatggattttattgaattcacaggtgatttcttacatttcagtgaagacatctctatcctgtttgttttagcaccttggatgattgtgctgagagccagtgtattattagaaagcagcatgctgctagcattaagggaaagtttccttgctagtccctagagtcaaacaaataagatttgtgtcatttgacttgaaatacagaattctagacccaaaatgacttaatggagttccttcacaaagcaggaactccaaggtagtgggtttaatttagttaattgggtggcatgacaggtcatcaaggtgccctccatcttgttgccctactattgtctccgtgttgccttttgttcccaggctgtccgctcagagtcacctctctaggcagcatatgttcacacagccacatccaaagaccaaaagagaagcagtgtcttgtcacatgtgtcttcattacaggaaggaaaatatctcttccagaaaccctcctcatactacctctagcaaactgcctcttacatctaattgcccagaattgggtcatgggctcataccttagcattaagggaggttgggtgagtcagttactcaataatgtgtaacaaatcactctaaaacttagtggctttaaacaactattttttacctctcatgattcttcagtctgggctgggctcagcaatgtggtatttctgcttcacatggcatctgctggagctacaacatccaggatgtcctgggggttggccaggcatctaactttcttcacgtggtctctccgtttagctagcttgggcttcctcacagcatggctgcctcaggatggtctgactgtttacatggtagctggtttccaaaagagtataaaagtggaaactacaaaacctcttaaaacatagtctcaagccacacagtgtcacttatgcactctgttgatcaaagcaagccgcagggtcagctcaattgagaaggagtccacttctcttgatgaaaggaatggcaaagtcacattgccagagacatgcagggtggcagtgattattgcagccatttgtggaaacaatctaccacactggaaatccaagtaccaggcattttcagactctgaaggaaaacaagatggttggtaagaaagagtctgagtagggtgggtaattaacagtgagtctaaactaaacttgatgctgcagccgccacaatggcatctgctttgccgcactgatcacaacctggacacagcctattttagttaagcctccctaccctagatggcctttgggaatgtaatcaggccatgctcaggaaattataccctatacccaaattccatttgaatgaactgaattcatctggcctcattttattgaaagttttagttggtaaaagaatagattactgtacctttgtaacagaataaaaatgttcatgggacagataaacactacattcagcattatggcaaaatgatacaatttgattaattgaggtagcatgtccttggattttgcaatattgtcttcttttcttttttgcatgtttgacatagtatataattttaaataaaatgacagattaccataatgagctagagttttcttagtaagaaggggaaaggcatttctagttgattttcattcctttctctatgattttcatttctttctcttgctaggggcacagcctaggaagggagaactctgcagtatgattgaatgatactgggatgggtgactccacattctagggaaagctcaatagcttaatgatcaacacgtctcaacattctcaaattcattcaggtatcagagcttgtagaagtcgtgataccctttcagaccaccccaaaatgatgatggccaggaacttttaaaagtaacatgcctaattttgggtaaaaccagcttatattttatacttgattctgggacagaccagtgagtggtagcaggtgcaaaaaattatgagcaacaaacaaaaactttgcagctgagaaattctatcaaatgctatttttagaaaattgataaaattgactaaattttaaataaattaaacttttttaactttagccaaagttctgttttttttcattgaaatgcctcagtgtagtttatgggaccccaatgttttgtatagtccaagattcccttgccatagatcagtgagagggcccaggagccgagggatctggtccaaacatgcagctaaaatcccttggttatagcattctattattgttattgattttcttaactctaacatttaattatcctgttagaactgtagttgaaatgagaccactgacttctttactcgacaagatttattgagagtccactatttgccaggcacagtgctgagaaccaggaagtcattaatgaggacaagatggttcctgacccccagcaggaagcttaacgtcgagccagggagaagggcttgaaacaaggtgatgcacacagtggagaggacagggagcttagaggacggcaccagcacagcacactttggggtcagcacctacatctcagttcagagccttgccaccatctaaaaatataaatattagaattggatgtgtccctgatgcttctggggactgaaagacttaatttttacagctactatggccctggagcacttaaaaaagcattttagtaaaagcaatccatgtttatggtaaaaatagtaataacattgagcagttcagaaggatataaaatgaaatgtagaaggccccctccctatcttccagccctactccctgtaggtgaccactagttgcattttttcattttcttgtataccttaccagaaatattgcagacatagtacaaacatgtgcacacacattgtatgtaacacagattaaattttttccttaaataataaaatttggcaccttttcatacctctctatataactttcactttatgttactcttttttctcaacagccacatattagtccattgaatgattagatgtaccaaaatttatttactgagtcttctgttaatggacatttaagttatttccagaatgttgcaatttcataaaacctacaatgaacatatatatatacatatatatttacataaatgactatgtctgcaggataaattccaagatgtagaatcacagtgtcaaaaggcatgtacatttggaattttgtcagatattgccaaaatgttggactaatttgcagtcttgttgacaatgtgcaaaagagccccagttatattttgcaagaaatgtagagtcagccctccatatccatggattctgcatccatggattcaaccaactatggattgaaaatatttggaaaaaaaatgcatccatactaaacatgtataaaccttttttcttattgttatttgctaaacaatacagtataacaactctttacatagcatttacattgcattatgtatcataagtaatctagagattatttaaagcatatgggagaatgtctgtaggttttatgcaaatattacacccttttgtataagggacttgagcatctctggtgtccaagggaggtcctagaaccagtcctccacagatgccaagggacaatggacaataactcatgtgcgcacagaaacactgatgaagctttgaaagcaaagaggagtttgcactttatatttaaatatgtctaggcagagccctgtgtcatttgctaataaaaggaagtggcaggactcaatattcaaaaggcctcccattttctgtgtctttcttctaaagtctttaaactgctgcatcataggaatttagtttactaaatccaaattacaaatttcaagtacaacttggcttctaatctcctattgtgagaggaaggctgtaacaggaacctattttgtggatctctcttttgggtaacgctctcaggtggtaaggtgtggaaaggtacattaaggaaaatgggagggcagttggaggggatcaattagtgttttttgcttaattaagcacagtcctctgtagtcccaaagcctgggctctgttgatctgcctgaaccacttctctttggtacggaaattcatgagaacaggacatcttacttgagtaacagatgccacctccctatagtcaagttagtcaagaaaattccaagaattattttaaggtattttatttcatgcctggcagagcatagaaaaatattagcttctagggctagacgactgctttggggtttccaagaaaaaggtttcaaggttagtcattactatgcaattctgctgctgtgactgattttaatgccatcccaggatcaacaattgctagaaaaatcaggcttcttgtcagaaaaatacatttcttcccctaatatctaattaattaaggtattttaaccacttgattgtgcatcgtgtctcttggaggagaaactgaattgagttgtcagagaatcaaaactttaatgaccaaagtcctttgaatataactagggaggaactttgattcataatcattttgtttcaaaatgctgagtatagtttttgaagtttacagtgaacatgcccaggatatgatgctcactggagagaacattttgtttataagatgtctcccgtgttaattcagacatttcagataggcccaaagagggtctcggcctggtgcctctccgttgtttgcagaacatggcaggcagacactccaaatgtatggcccaagagagagacaggccttgcatttaattaaagtaacccagtaaacttcctgaaagatttatccccccaaccccaccccttcatatctcaaaagaaacgtaactaagcaccaaatatttttctttctgctagtgttttgaggtttttcttggctcattttttgcagctcagacactatggaaaactttattgccttgcaaacatgtctctgggtggctgaggaaacagggaaagcacaacctaattcatttcttttctataggaaataatgcccagaagagtaaatgttgtctgccacagttaaaaatcagaagagaggagctaggcattgactttaaaagtaaggaggtttttcatgaaagacactggaggcctttgctggggatgggggaatctataagtaaaggtgaagagattttaggtttgtcaccatgatagggaacatcccaatactctgaggtatacatatagatataatgaatttttagtcatgtcagtaagtagggagattgacttcagcctcaaggtatttaaaaatatgttagagagatttcatgaaagaaaaaatgtgacagccttttcgatattttagcctaggctgcaattaatatccactaaccaagaaacagactcctcgaaataattaggttttctttgagtagctgctataataaaaagccaagtggtattttaattttcacgtcatttctgaaaggcaacttgtattttagttcttggtccctccctcctcaactccaaaaaaagaaaagactgatagagggatagataggtagatgggtaagtggatgagtagacactgatgaacttgctatttacctgaagaaaaaaaaatggaatgcaatctctttgaagggaaaactatataaaattgccatttttgtaggttaaaatgactgaatgttggcaattttttatgttttaacctaaaagaatatgcatccaagcacatttgaacttgtgtttgtctttactaaacatttagaaatttgtgatacagtttatgaaacatctttctcatagtgaagttgtctacctaaagatcttgttggtgctttaaatcctacgtgtttcatttctttaaaaattccttagtattcatgcagctaataggcagcagtaatgaagccctcgtctgtccacttgccagccttcccatttggccagcaagctctggcttgaaaccccacactgggctcttgtccatttttcatgaggctcctcatcccctccctcttcttagccagcactctggacaacagtcagaaatcagaagggctttatttccttaagcaagtcacttctttcagtgtttctggcattgctttggtgcagtggctttccaattgatgaccacagcccacagtaagaaatacattttacataacgaccaagcatacaaatggtgtgtgtttgtaaatcaaacaaaagtttcacaaaacaatcctaactcttaagaaacgcagtgaactgacgctttccagtctacttcatttcattttttaaaaggcactgcttgctacccactaaattgatttcacaacccacttatgtgttgggacccatagtttgaaaaacactgctttagtgtacttgattcaacccgggaattttaagtcttggcagtcaatcacaggcttgcttatatcggcagaaaaagacaggactattcattgctgggaacacggtaaaaacatcctttggcagccttcagaaaaattttttaatagcagtggaaataaacaggtattaaatctattaatggaggacagcctcagccaaaaaataacaaggggttaaaaaaaaagagcagtcacatactcacagaaagtagacagaatcctgcagaacctagttctagaattttgtgtccaagcacaactctcagctgagaacaacaggttagcctattttctaggtagtatggaatgtgtaaatagttcagatgtagacggtggaaaactcacaatgttggtttagaaatcctggctctgcagctgccaatcatacttcatttcttgttaaggccaggaactgagacttctctgggcttccagccactggctgtcttcatccacatcttggccttcacccagccttccttttactaccttgggtcacaatttgtcctgctccggccacttggtagaaaacttgccttctatatttgggacagaataaaagatgctcttaaaacctagaggaagtcacgtatcaggtgctactggtatcatgatgtgttaatgtaccaaatcagaatcctattcagtgcaactttggaaccacagcttttgtgaagctataatgtggagaaaatccaagacaagtgcacagtaaattctgtgcttggcagtgttcactatttatatgagtaaatgttgttcctttctcttcttggcctttggctactggtgtttccttttaaagttcatgccaaagtagggtgggaatttatcatttgacaatagaaagtgaactggatctaatcagtccaggagcctacatttgaattgtgttcctacaatgcaacatcaggttctgccttcaaactttcctgctccccacatcatcccaaaaacattttaaaggccatcaaaagaatgctgtcataataaagattctcaaacattctctagaattgcagaaagctgggacaacgctcctgttgaaagttagttttcttctctccctttcaagttgaccaggaagagctggaagagcatttttcaggatatcagaatcccagaacaactctcatctcacttacaaactaaaggacagtggcctcatacaagttatgcttcactagaactgattttcttcttctctaggctgggaaagccactcttggcctacattgctcataaaatgaatgaaagtttaaataaaataatgcacataaaaatactgtgacaaacatacagtccaactgcaggttctttttctgtttttgatcaatcaagacctaaattgaagtcttttaagtccttgtagccctaggaatctgatttttaaggtaaatgtgcaggtctcagatctgcttaaaggagagtgggtaaagctgaaggcgctgggtaggggacgaacagagttattcagtggcaaaggaaagaatatgaaaaggaaatgtgtgtaagatatctatgtagaacccactgcattgggtctgcaagtggtggtagatattctgaaactctgcaaaagcctggatttccacaagctttggggccttcaaaaggttgcttgagtacctatctgtgaatgttaaattttattccttggaatttacccaacttcaacttctgtctaacttgatcttcaacttcttactttacacaagcacatctcacttaaaagtgagaagggtcattttaagccccactctcgtgttcctcttggaaccccatgccgcccaggctaacggtgagaaaatgtagcacatgcccttctcattgccacatgcttgctcctcagagaaataaaggtaaagaaaggtattaaaaaaatagtgttttcatagaaggagatgttgcaatgagaaaactttgacataaaatttctattttatctagtcatactatggttactgggctttgaaactgagtttcaacatgaataaacaaagctgctagtgaaatgcgtcgagcttgaattgagtgtcctcagcctaagagtggatcaacattcttcagctatatctacaagccatctagctgtttgtccaaatgcagatttttgagatgtttggagaagaacctaacagttgaggctgaaatcttaaaccatatgcattaagtctcttatgtacaaaattcctctcttgcctcttagccaatgatggtgacagggttgaacggtgaagaaatggagcatgtctgggatttctttctttcctcccaactatgaatatcttcttgaaccaagctaaaaagagtacaaaaaatataatgctttccttagaaagttattgttttatgaaagcatgttggtattgttgaagctgttttgccaatacaggcttctaaatgggaagaggtatgtcatagttcaggctgctgtaacaaaatatcatagattaggttgcttatacaccaaacatttgtttctcacagttcttgaggcttgggtgtccaaggtcaaggtatcagcagattcactgtctggtaagggcccacttcctggtttgcatatggttgtcttctctttatgccttcacgtggtctttccttggtgcatatgtatgaagagcaaaatctctccatcttcatcttcacataagggcactaatcccatcatgaaggtcccaccctcagacctaatctaacccaactaccgcccagaggccctacctccaaataccatcacattgggggttagtgcttcaacatgtggatttgggcagaggaagacacaaacatttagcctataacaaggcataaccctccaagtgaacattataaagcactaaaaagactctaaccttaggaatcaatgtaatgcaaaatcacttttactctaggttaagaataggtataatttagcaattgtttatatgatagcagaagcactgttttcttgggcattttagttaaatttgagacataggaagttaccaggtagttagggttaaatggtcagtattcctgggagaaaataagattaatatggcatcagaaattggttctatggcttttttttttaattacactttaagttttagggtacatgtgcacaatgtgcaggttagttacatatgtatacatgtgccatgctggtgtgctgcacccactaactcgtcctctagcattaggtatatctcccaatgctatccctcccccctccccccaccccacaacagtccccagagtgtgatgttccccttcctgtgtccatgtgttctcatagttcaattcccacctatgagtgagaatatgcggtgtttggttttttgttcttgtgatagtttactgagaattatggtttccaatttcatccatgtccctacaaaggacatgaactcatccttttttaaggctgcatagtattccatggtgtatatgtgccacattttcttaatccagtctatcattgttggacatttgggttggttccaagtctttgctattgtgaataatgccgcaataaacatacgtgtgcatgtgtctttatagcagcatgatttatagtcctttgggtatatacccagtaatgggatggctgggtcaaatggtatgtctagttctagatccctgaggaatcaccacactgacttccacaatggttgaactagtttacagtcccactaacagtgtaaaagtgttcctatttctccacatcctctccagcacctgttgtttcctgactttttaatgattgccattctaactggtgtgaaatggtatctctttgtggttttaatttgcatttctctgatggccagtgatggtgagcattttttcatgtgttttttggctgcataaatgtcttcttttgagaagtgtctgttcatgtcctctgcccactttttgatggggttgtttgtttttttcttgtaaatctgtttgagttcattgtagattctggatattagccctttgtcagatgagtaggttgcaaaaattttctcccattctgtaggttgcctgttcactctgatggtagtttcttttgctgtgcagaagctctttagtttaattagatcccatttgtcaattttggcttttgttgacattgcttttggtgttttagacatgaagtctttccccatgcctatgtcctgaatggcaatgcctaggttttcttctagggtttttatggttttaggtctaacgtttaaatctttaatccatcttgaattgatttttgtataaggtgtaaggaagggatccagtttcagctttctacatatggctagccagttttcccagcaccattgattaaatagggaatcctttccccattgcttgtttttctcaggtttgtcaaagatcagatagttgtagatatgtggcgttatttctgagggctctgttctgttccgttgatctatatctctgttttggtaccagtaccatgctgttttggttactgtagccttgtagtatagtttgaagtcaggtagtgtgatgcctccagctttgttcttttggctcaggattgacttggcgatgcgggctcttttttggttccatatgaactttaaagtagttttttccaattctgtgaagaaagtcattggtagcttgatggggatggcattgaatctgtaaattaccttgggcagtatggccattttcatgatattgattcttcctacccatgagcatggaatgttcttccatttgtttgtatcctcttttatttccttgagcagtggtttgtagttctccttgaagaggtccttcacatcccttgtaagttggattcctaggtattttattctctttgtagcaattgtgaatgggagttcactcatgatttggctctctgtctgttactggtgtataagaatgcttgtgatttttgtacattgattttgtatcctgagactttgctgaagttgcttatcagcttaaggagattttgggctgagacaatggggttttctagatatacaatcatgtcatctgcaaacagggacaatttgacttcctcttttcctaattgaataccctttatttccttctcctgcctaattgccctggccagaacttccaacactatgtcgaataggagtggtgagagagggcatccctgtcttgtgccagttttcaaagggaatgcttccagtttttgcccattcagtatgatattggctgtgggtttgtcataaatagctcttattattttgagatacgtcccatcaatacctaatttattgagagtttttagcatgaagtgttgttgaattttgtcaaaggccttttctgcatctattgagataatcacgtggtttttgtctttggttctgtttatatgctggattatgtttattgatttgcatatattgaaccagccttgcatcccagggatgaagcccacttgatcatggtggataagctttttgatgtgctgctggatttggtttgccagtattttactgaggatttttgcatcaatgttcatcaaggatattggtctaaaattctcttttttggttgcgtctctgcccggctttggtatcaggatgatgctggcctcataaaatgagttagggaggattccctctttttctattgattggaatagtttcagaaggaatggtaccagttcctccttgtacctctggtagaatttggctgtgaatccatctggtcctggactctttcgttggtaaggtattgattattgccacaatttcagctcctgttattggtctattcagagattcaacttcttcctggtttagtcttgggagggtgtatgtgtcaaggaatttatccatttcttctagattttctagtttatttgcgtagaggtgtttgtagtattctctgatggtagtttgtatttctgtgggatcggtggtgatatcctctttatcattttttattgcgtctatttgattgttctctctttttttctttattagtcttgctagcagtctatcaattttgttgatcctttcaaaaaaccagctcctggattcgttaactttttgaagggtttttgtgtctctatttccttcagttctgctctgattttagttatttcttgccttctgctagcttttgaatgtgtttgcccttgcttttctagttcttttaattgtgatgttaggttgtcaattttggatctttcctgctttctcttgtgggcatttagtgctataaatttccctctacacactgctttgaatgcgttccagagattctggtatgttgtgtctttgttctcattggtttcaaagaacatctttatttctgccttcatttcattatgtacccagtagtcattcaggagcagtttgttcagtttccatgtagttgagcggctttgagtgagattcttaatcctgagttctagtttgattgcactgtggtctgagagatagtttgttataatgtctgatcttttacatttgctgaggagagctttacttccaagtatgtggtcaattttggaataggtgtggtgtggtgctgaaaaaaatgtatattctgttgatttggggtggagagttctgtagatgtctattaggtctgcttggtgcaaagctgagttcaattcctgggtatccttgttgactttctgtctcgttgatctgtctaatgttgacggtggggtgttaaagtctcccattattaatgtgtgggagtctaactctctttgtaggtcactcaggacttgctttatgaatctgggtgctcctgtattgggtgcatatatatttaggataggtagctcttcttgttgaattgatccctttaccattaaataatggccttctttgtctcttttgatctttgttggtttaaagtctgttttatcagagactaggattgcaacccctgcctttttttgttttccatttgcttggtagatcttcctccatccttttattttgagcctatgtgtgtctctgcacgtgagatgggtttcctgaatacagcacactgatgggtcttgactctttatccaacttgccagtctgtgtcttttaattggagcatttagtccatttacatttaaagttaatattgttatgtgtgaatttgatcctgtcattatgatgttagctggtgattttgctcgttagttgatgcggtttcctcctagtctcgatggtctttacattttggcatgattttgcagcggctggtaccagttcctttccatgtttagcacttccttcaggagctcttctagggcaggcctggtggtgacaaaatctctcagcatttgcttgtctgtaaagtattttatttctccttcacttatgaagcttagtttggctggatatgaaattctgggttgaaaattcttttctttaagaatgttgaatattggcccccactctcttctggcttgtagagtttctgccgagagatctgctgttagtctgatgggcttccctttgagggtaacccgacctttgtctctggctgcccttaacattttttccttcatttcagctttggtgaatctgacaattatgtgtcttggtgttgctcttctcgaggagtatctttgtggcgttctctgtatttcctgaatctgaacgttggcctgccttgctagattggggaagttctcctggatgatatcctgcagagtgttttccaacttggttccattctccccatcactttcaggtacaccaatcagacgtagatttggtcttttcacatagtcccatatttcttggaggctttgttcatttctttttattcctttttctctaaacttcccttctcgcttcattgcattcatttcatcttccatcgctgataccctttcttccagttgatcgcatgggctcctgaggcttctgcattcttcacgtagttctcgagccttggttttcagctccatcagctcctttaagcacttctctgtattggttattctagttatacattcttctaagtttttttcaaagttttcaacttatttgcctttggtttgaatgtcctcccatagctcggagtaatttgatcgtctgaagccttcttctctcagcttgtcaaagtcattctccgtccagctttgttctgttgctggtgaggaactgcattcctttggaggaggagaggcgctctgctttttagagtttccagtttttctgctctgttttttccccatctttgtggttttacctacttttggtctttgatgatggtgatgtacagatgggtttttggtgtggatgtcctttctgtttgttagttttccttctaacagagaggaccctcagctgcaggtctgttggagtacctggccatgtgaggtgtcagtctgtccctgctggggtgtgcctcccagttaggctgctcgggggtcaggagtcagggacccacttgaggaagcagtctgcccattctcagatctccagctgcgtgctgggagaaccactgctctcttcaaatttcagatggaaatgcagaaatcacccatcttctgcgtcgctcaggctgggagctgtagaccagagctgttcctatttggccatcttggctcctcccccggttctatagcttatgaaggaaagataataaataattatctttgagctaaggcagccaagtgtttgtaaccatttttgtgcgctggaccctattaactatctggtgaagtctatggaccccttcacagaataattcttttaaatgtgtaagataaaatacgtaacaaaggaaactaattctactgaagcagagctttatccctagacctttggggaccatggtccatggatcacagattaagaactcctcgtacttgaagcctaccaggagataagtaagggagagtaataaggtttaaaaaggaatttttcagtgttataattactgtcttacaaggcaatgtgaggatgaaatacagagttttgaagtgatctaaaagtagaacaagaactcattgcatttggccgggcacggtggctcacgcctgtaatcccagcactttgggaggccgagtcaggtggatcacgaggtcaggagatagagaccatcctggctaacacagtgaaaccccgtctctactaaaaaaaaaaaaaaaaatacaaaaaaattagccagccgtggtggcgggcgcctgtagtcccagctactcgggaggctgaggcaggagaatggcgtgaacccgggaggtggagcttgcagtgagctgagattgcaccactgcacctccagcctgggcgacagaatgaggctccgtctcaaaaaaaagaaaaaagaactcattgcaatgcttgaggagagagtgcccgagaatgactgcagaaaccatagcttctttcactgattcacttctctctcatgaactttccaggtgtttttcaatattagatgtttttatttttctctcaggcaagcgaacatgttcaagttttctattgtaaatagttccagttctccatttatggaatcgaagtaccaatcaaattatgttctttgaaagttgaaaattaaaatgtaagccagtcatagaggttcatacctgtaattccagcactttgggaggccaaaacaagaggattacttgaagccgggagttcaagaccagcctaggcaatatagtgaggccccatctctatgaaacatttaaaaactagctggacgtggtagtatgcaccggtagtcctaactacttgggaggctgagggggaaggatcacttgatcccaggagttcaaggctgcagtgagctaacatagcaccactgcactccagcctggacccagagtgagaccctgtatctaaaaataaataataaataaataaatgtaatataaatgtaaggaatgaatggtgcatattcatcagtgagcagttctgagcagctgccacgttgggtgctgtgctggttactggaattataggcattttgagacaaggttcttgcccacaagaagttaaaaatctggaaacagttacagagaagtagaaagataatttcaataccatgtgatgagtaatttttttaatcttgttgtctcaaatgttgcaatttaaatagagggttgtgatatggctttcttttctataatcctaggttctttgtaagtgaaaaatctgtcatcattttgtataaatgataatattatgctttctattcagaagcaaaaataggtttttcctggagatgctgagcagagctctagaggtcaaatattctatacccctgcttttgggccaggcatttgcagaccacacaaatagaataaaatctgcctgatttttaatatattacataacttctcagcaagtcttaccaattttaacactgttcaaattatttctcatttcttttccagtttctttatagcatactttatgcctgcttctgccagtcctgaaaatggaaattagccagacatcattatggcttttatatacttcatatattttatcaaataaataataattagtgagagagtgaacaaatgtacttgcaaggcattacaaatctttctgttgtgtaatctgtaattcagttccctttaatttttctgcatatcttctgttctctaacattattatggatttctttaacccaccttaaatccccaagcccttcatcagattagaagaacagaactagacttctgcctatttggaggaaaaacccagcataatgaaactgtccatgcatggggcaaatatcataccataattattggcaggtgaatgcattattaatgttgtcaccccttaattgagaacatcaattatttgataaatgtcaaagggctgatttattgtaacaagcttgaatcttagagactgccagtaattctttatacctcatatttatatgtaacattagttttggccaggaaagctcttgagggaaggcatccagaaggcagcagctgaaatttggggtaactttataactagcttaattctacatatttctagaactcactgaataacctttgttggtaaatgacataaatataactttggtaacttttcacccaaaatcttgtatagatgaaaaaactcacataaatcatagattttagatttgagagggaatatatagttatatagaccagtcattctcaaaatgggatcccaaccagcagcatcagcatcaccggggaacttgttagagatgcaaattcttgggtttgctccagactcactgaatcaaaaattctgggggtgggactcagagacgtgggtttctacaagctctccaagtgattctgatgtacactgtattttgaatattactgatttagattggcattactgacattttgaaccagatgattctctgctgtgagagagtgtcctgtgtattgtaggatgttgagcagcatccctagcctctacccactagatgcccgtggcacccgctcctcagtcatgacaataaaaaatatctccagacattgccagatgaaccctggggtgggatggaaggtgcaaaattgctcccttcccaaaattgcaaaattgataaccactgttccagaccaacttccaaccctgacacaggaatctcttctatggcaacgttgacagctacgattgttaccagtgtaagatatttgctttcccttctgcctttgaaagccatggaattgagaacttatacccctcctcctaaatcattactggaaacttaaatattttaagtagttttttattttgaagtttgcatataacttttataaatggtatacatttaatcatataaaagacaagagtaaatatgttttataaaatgtagttgattacgaatctttcttcaacactttgctccaacatcgtatcattcaggcttccctgagcacatacgactttccctcccctacccactcccagcagacactgggtccaccaggtgttttctgcacacttactccacgtctgttatagcattggtgttgcctcctcccttctacagtcttaagtcatgtaatcgtatccatcactgcatcctcaggacctagtcccctgccttgcacattgtggtaataataatggctaacatgtctgtacagtcactatgtcctaggcactgggctaagagttttcaaattcatttcctcataccttcaccaatgaggcaggctgtatcattattccttttgcagataacaaaatgtagatttgtaaaattaggtactcttttcaaggtaaaaatgttgagaaatgatgcaacctgggtttgaaccctggaattttgatccctgagctcaggctgctaataatcactgcactattgaaaagtgcttaataaatgtttggtgaatgcattcacgattaagttaataaatgaatgactgaataattgactattaagagctaatggtgaatgctttcagatgagttacctaaaagttcatacgtcaaccaattgtacaatgtgaataccaattattatacactaactggcaatattttggggaaatgatttagcaactgctaaaaacaatactacttagcatagccatacacaatagatgtttaaacttgtccttgagtctccaagtatgataatggcttaactcagaaggctgtctacaagagcatggaaaggaggttattaaaaaaaaaaaaaagtagaagactgcagggagatttcccacacttctttcttctcttgcagtccctggacatttcagtttctgggaaatgagtaaagcctgtggtgtgtgaaaatccagtagttattcagcctctggagtatatcagaattacctggagggggcatatttgaaatgtagagggttatggggaggtgaaactgaactgtagaatcagaatctcaaagggcatagcccagtctttcatgtagcgttttaaggtcctcaattgattcaactgtacaccaagaactgagagccaatgcatttcactgtctcctgtcagtcagttcataaagtccaaagaaggggacagaaaagaagccagcaaaaaccagagttggatggctctcaaaaacccaaacaaaaatacacattttcatctcgctcatgttggaatctaacaagaaacagaagtatggccccccaaaacagtgacatgatgatggtggcaaaacatggctctccaaaccattgcctcaaatgtcagctttttccccctgacctcttccccttagaagaaaactgtcaaagttttcaaacagcagatacattagccacaaaggtgcctaactgtaggctggcccctcaaagcagagaatttttaagaaagttcagagtgtcctgagagagtattcgtttcaacttcatttaatagatgaagaaggtgggacccatttgtgtggccaattttaatgttgcataaacttagaagtggttattaatgccttgggaaaatgcacagagcatttttttaaaacttttatttaatttttagtttttcaagactataaatcttttttgcacgaagaaaataagacattttatttatccttgtgtgaatttaaaaatgactgctatatattgttttctatattttttccaaacaaatatttatgtttttcttaaaacccaagatacaaagttcctgtttcaacaagctgccgtgtaaatcaagaactaagcttacttgcttctttgctctttctcatttttctcttcaatcgatgagtagatggatagataaggaaaaatagatgaatgcgcaaattctcatacatacacataatttagagttcagatattgtacattttataagtacacaaagctcataaaacacaacataaaaaaaactgtctctctcatagaaaataaatagaaaggcaaataatatatgtgatatgtaagtgaaacctttgctggaagtaaaattttctattaggctcagtgtttcttaaaatttaattaaccaacaaccaccaattggggaagcaacaatgccacattgaggtagtgaaccaaataagatgaatcttcccttcactttttctaggcagacacctgtgaaattgagctgctttgtatgtcatatataaggtataattgcttttgattatgataatttaaaaaaagaaatagacaagaaagagagaagggaaagaaggaaaggaaaatggaaaggagtgaaagtcaccaaaattgttcattacaaaggctataaaaagtgtttagacacatactcattcctggcttcttgagataattttttaatatttggtaatactgtgcatgcatataacccacaaagaaagagaacacaaatgaatctataggctcttcaaaatagcactattttgcttccctaggtaaccctaattgcttattttttgttttctgttctgaacgttctataatttaagtccatataaacagtatttcaatatagtatataccattattaggcctgtgtaagtgccatcagatgctattcatggcaagtgatacaggctttccatttatggtagtgatataatagttcagttttttaagtggatcattgtaaagaagtataataaataatagggcagatgtctagaatatgaatgtctaggcaacaagtttgttagatcaggtcagtatcgcctgagtttcacatttcacaggtgagcataatgttaagaaaaaaaatagaggattgacaatctttctattttgctaaataaagttatctgaaaacagaacaaaccaatatttatgctatcacaacataaagaaataatattttcctacccccaaagcaagaaaaataaaggataggcctttctgagaaaatatggttggtagattcaaaaagatacatacatacaggcccatagttccttatccaaaatccttgccagaaataattcagttttgtttgcttgggtttttgaggggtgggggggttcgggaagatagtattgtgctctaccgcaatgggtagaactctaccccagtgacatctgggggaacgccccattgcaaacacatgaatatttctgcagtgaagcatacaaatatttacactaagttggatcaataaagactatgaaacactcatatgaaatcaggtcagcttctgccaccaactaagttatgaaaaaactttctgtcttcacaagctttaggattttgagattaaagctaaggaattatgtgcatatatatcattgccctttttcttctcattttgttgtggagcagggaccactctttctgacaggcacaatttattctaattattcagttataaccataaccctgtggtagatgataagagatattaattaatgtcatattccactttaatcttattggagagatttccaaatggacacctgttagaatgtaagctctatgaagcagggaaatctatattgtccactgaattaccccaagcacttaaaggtgtgccagagtgcctgacacattgtagctactcagtatttcttaaataaatgaaagatttgcaagttaacagcctcctgcaaatactaaaattattgttggcaggtcctggatagaaagagtggagttgtggtgtgtgtgggtgtgtgtgtgtgtgtgtttaattcagagcaacctgttacattctttctattagaaaaagcacgtgtacatttgaatgcttcacacggattcttccattgtaaacagaatttgggtaagggagctccaggtgatgatgtcatatactgaggtatctgaaactctgagtcaaaaccaacaagtacttagtattgatatttgttttttaaaaaactgaatatttaattttctttgctattttggatccagagggtctaaaaataggtgaagggtcaatgaactttaataggaggaaagaccataggaagagtaaaataatcctgcgaatgaatatttgaagtttgaaaaggaaattgcttagtgctaaggatctgaaatgatttatatggtcacaacaaaagtgactacagctaggtgaaatatgatgtcaaaaaagaaactagtgtaattgtgacctaatcctaccagaaatgaattagttctgtcctcttgtcttgacttacatgctatggttttgagaaaagtgtgagtcaatgagcaaaaattccttgccagggaaaagatgtacccccaaataagggtaaggtagtatcagtatcctttaagtgaggggaacatgtgagtgcattacaaattgttggcaatgtttttcagaactaagacaaaatcctgcaggcacttaacaaacatggtatatagggaaattttatttggttttctggggggctttgagagggtttttggttggtttttttgtttgtttgtttgtttttgtttgttgttgttgttgttgttgttgttttgagagagagtcttactctgtcacccagactagagtgcagtggtgcgatcactactcactgttgcctcaacctcctgggctctagtgatactcccacctcagccttgagagcagctgagaccacaagtgcgggccaccacatctggctaatttttaaaattattatttgtagagaagagatctcgctgtgttgcccaggctggtcttgaactcccgggctcaagcgatcctcctgctatggcatcccaaagtgttggaattataggcataagccctatgcccagactataggaaaattttaaattgtccgcaatcctatccatccaaagattatggagctaaattattaatgagtagccactatcttctaaacataataacccaagaccatcataatcataatagctaataatcaaatattaacttaggacctgtatccttttctctacatcatttaccatgtgataaatattttcccttctacctttactattgggaaacaaagttccctagagcttacatacctgtactctgactattaaattaattattaaattaaattaaattttctcaaggaaaaaaatactattgtaatagtacatgtagtatatactgagacatacagtatatacttgattaagaaattaggctatgaggaatagccaggacaagcttttaagctaaaaagttattacattctaattctggtaagaataggagcttcttggaattcaaagagggcccaggggggtgtattttcttctaatgagaacctctaacaggaaaaaaaataataatagaaatactctgttcatccctgatcaagttcagtgtgcttcgttttaaaggatatcagagaagccctctctttgccctgcaaaagccctgtagtaacctcacaccacagcattggttcccacagccatttgctttacaagtttagccacactcaggaacggacattctagaaaggtccaagtcttatcttcattactctctttcccctgtttttttgagctgctgatcctgagagatagaacagagaaaaaagagcaagttctgattgtttagtattttcataagccgcatgcatacagtttcaggaataaaatgctctggtttaaaaacaaatggttgtttgattttgtaagaataaaaaaagaaggaatgacactttggttccagcactaaatatcctcttggtatatagaacttttttactgcctttctatcctcaacgaaaatatccagtaaaaaattttgtctgagaaaatagtgacaagttatcctcacatgcctagggagggctatggtttggatgttatctctaaaggaaaaatttgttagaccagagcatccaagggagaaggtattttggaaagggggggagcctttcacacccttgcatcattgtaatgaaccttgtcaggggtcactaaataggtagaatcctaaacatttctgtgtgagattagatgaaaactcaattctttttaattaacaagaaatgttacagaaggtaagagcttcagaaataaactagtcaagccactccactttacaaaaagatccagagggcaaaaggattttcccaagagcccctggctgattgggaacagaagttaggctagaattcactctgcccactcccaggcctgtaaatttccaggacactgtctgatttaaatctccatgacctgatgaactgacccccgttagctgtcttttcaagacccttgcaagaattgcatggatgccaacaatgcttctcttaagctccagctggaagggctgggacgtatctaatttctagccagtctgagtaatggcattatagataggtgctcataatgttagcacctaagcctgcaggctcacttgattaaatggcaacatggatctcttttcattcttgttattttgataattaaatgggatttccagctcatctctgacctgacacatgtttttcatttttaaagtgagtcagggagtgagcaattcatggtagtttagtagtacaaactatacccatagctcattaaaatgtgtttaaagattaataaaattgcaccctgtccagtagtaaacctggttaagtgtctaacacatcaggcatgcctttaatggcctgtttgcttttcaaagatgtgaagcaagaccaattattaaaaagaaagatgcaatactgccttagagttgcagtttttaaaatttattttgcatagaaccatcttttagcttttatgttttcaaaatataaaattctgatcagtgtgaccacattaaaaaaagtttatttcccaatctgagtaaacactatttgtaaaaccttaaatagcatagtttaatttttgatgctcaaatacattagatggtgcaaaaaaaaagctaagagttttgtgagaaaacaattcagaaaaagccaaagaaggaaggaccaaaattatttttgcagaaattattaaggtacatgtcaaaatttaaaaattacacttaatttcttactgataaagtgggcatctccttgctcaaaatacttgtcaaggtgaataaaatagtgatggaacacagaagctgatgccattacccttaatcagaaataacttaaggctgggtactgtggcttatgcctgtaatcccagcactttgggaggctgaggtgggaggattgcttgagtccaggagtctgagaccaactgaggcaacatggtgagattctgtctctacaaaaaaaaaaaaaaaattaaaaattatccaggtgtagtggcacacacctgtagtcccagctacttgggaggctgaagcaggagcatcacttgagcccaggaggttgaggccatagtgagatatgatgggtgtcattgcactccagcctggacaacacagcgaagataacttaagtgtgtgtgtgtgtgtgtgtgtgtgtgtgtgtgtgtgtgcgcgcgcgcgcgcgcgtgtgagctatgatgagctatgatggtgtcggctgcactccagcctggacaacagagcaaagataacgtgtgtgtgtgtgtgtgtgtgtgtgtgtgtgtgtgtgtgtgtgtggtgtatccattttaataagcctatgggaatgtctgcccttatttcctgagataacattagtaaatcattaaaaccttaatccttctcccatttgtattatgtttctgtgactttaatcaaattgacatttcttagaaagaaggcaacattttataattgtgggaaaatgactgaagcaatatgttggtcatgaagcaatatgttgatattgccataattccatgtccatctgtgggactaggtcactgtgacaaactatataataccctgaggacatgggccatgttgcctgtatggctaatggtgcctacccagaaggggaatttacattaataatgccagtgctaaaagtatgtaagaaattttctattttctttttatttttaagatgtcacttttataaaatataataatgtatattgcttaattatttatataatagaatgtagcacttcctgttaaaatttaaatataacataaaatgtaagaaataaagcagaaaataactcaaagctttaacacccagagataacaggcacaaacatttgaagaacattctttctagattatttatccattcataggtataaaataggagaaaacaaggagaaaggaaggatgggtaaatagaaatagttttataaatataggatcacattataaatgccattttaaaatgtgtttaattttacttgaatttgtcaggagaaaaactaaaaggaaattgaagaaattgctgaatttcagttaaatgttcttcacccaagggatgttaagtttcaaaagatccccataaaattaaaagatttttctaaatgaggtcttttttaatctactgtttcaacttgaaacaatattaattaactacagcaattttttaaaggatctcatttcttcccacctcgctgcactatcttccagcttttgttatattgcattatttttatttgtcagggtttacaacatttgcattctaatttcaccaattgtttagtcatattctataggtaaataggtgatgctcactactggatttcactctccagtttttttgtttgtttggctgttttttcaagaatcactgaggggtgccttaatttcctaagttcctccatttttgagaatgcatgtcttttataatctcgatgatgttggctgtgtccattcactttatttcagaattttgtagatatttgtctcattgtctttggggttgaatgtcatgaaaacatcataggctgaacaaaagtattgcctttatagagaactttctttgtgtgcctaattgactaaagaattattttcttgaccctgaaattcataatttatctaggatagggctaatggtgttgaagaaatgttactcaatgatgtttgttaattcatgataaggaagactttcttcaggaccattgggatgggtaccgggaccacagcatggggtgttgcagtcagggagagagattgggctcaaccccaaaagcagcgtgggcaagtgggaatttatagtcaaggggcagagtgtggtcagtggatgaaaattactaagaggcaacatcaagtgtacaggagattctggctaaaccaacctaccgggattattctgaagacaggctagagtgttagacatgacctgagggttggtggaggatgatgaacctgatcaaatatcaatggtgatcagatattaaggataaggggttttggttaaactgacttagcagggttctttgctaaaactggattttacaaggaagtgcatagatgagcccaggagaggcttcaggaggctgactaaattttggtctagcagagaatttttgtcagtggtcagtcattgtttatcactctttatcctggaacactgtagtttttttgatctgcagattcaagtcttttttttttttcaggaaaagtttctaacattatacctttacatacattttctattatatttctcatctctagaaacactaatccttatgttctattgtcttggttctccacctctacccacttatgtaactgctacaaattctgtcattttcctcttcactgactattttatgaaattttcttcttgtcattatgttagctttatattcctcactgtttcaatagttttatttctgtaactatggcattttggttctcagtttgtttctctcgttctgtccccccttttcatcccttttcatcttattctgttcttttataatcttcttttaatcttattttatttaattaagtattcaggggaaactttcttatttttcttgggttatgttttctttatagatggagctattctatttcttctctctttttctctctctctcctccacctctctcctccctctcttccttcctcgtcctgtcctccttttctgtcttcctctctttcctccatccataggttcatgttatatcttttcatcttatttatgtttaatatggaaggtctgtccagattttttcactctactagagtatgggtgaatttttattggcattttctccatgtcatctcaaaatccttcatcttcctcactgagtacattttgtggactgggtattagcttccaacatcagtgtgttgcctttgctggggacctgggcttggctggctccctctttaaatcccattcgatgtgctaaacccgagtcccttccatcagctgcagtggatcctgtggctgtgggcttcagctctttcactaatttgggtcagagccctgcctctgccaaggtttcatgactgtacacaagagctcctgttttctaaggtgtttttcttgactttttccaagcctgcctcttcactaccctcagatcatttcttcccaagtctaaagtcatcattagagattctttggattcggcccactccctttctttcctcagtattgtctcagaggtggaggagctggagccacaccgccacagcccagctattcctactctttagccaaaacattttaagatgaggatatggcgttacactcctttcttggttttgtggctcctggcaacactttgttttgacttgttttattttaatatatgtttttgttcgttcattaagtgttaaaagagggcagagactctatgatctaacttcactctacaaaattatcttttctccctgtcatctcaaaaaccatatcaatttctatacaaaatgcagtactaaacagattttgaaagtttagggaagattaaaatttcaatgccagatatttaatttcattattatgactgtgaaatagatgcattctttgcagaaattttaatacaaaaaagtattataaagaaaatacagacattcattctcatattatttttgatattcttatactaatttgcttatctgtgcatagttcttaaaaattgggttcaaacttcatatatcatttttattttgttgcttgtctttcctctaacagtaccctatgagtatgtaacgtagccttacatattccttgaaatgatattttaataattttgaagcaaattaatacactcaaataatctacgattggacatttatgctatttataatttttgttaacattaatgctgggatgaacatccttctatataaatcttaggatgtatttcctttaaaatatgttagtaatactttttaatgaagacatttctaagataagtattctttgccttagcaaaataatttaatggacattattataaaccttgattattatacagtaccatataagtagataaagagaaatcctgcacctgattagacttagaacataaaattttgaataaatttaaatatatgtccctcactaatttttcctcataatttcaaggtctaaaatcatgtgatttctgatcaattctttactgagaagcactgagacatttcctaaattattttcattatttccaaaaaataccacttttactgtcttgatcagtgccctttggctttttcttcagagttcaaagtagcatagtgattcagtgaacaaactccaggatcagaaaggcctgggagctgctcattacttgcatgatctaatgttccctcctcacctctttcttcactttctttcactgcccttctttctgtcccccaagtagaccaagaccatgtccaatttggtccctcctattttttccagtgtaatactcttccccccagtctactgatggctaacccttttttatccaaaggtcagttctccactcagttaatgttcccattaactttcccctcgaggcattctctgtctaattactctgctttattttcttcatagtatgcgttatcactcaaaagtatcttaataatggctcccattgatggtattattagcttacctcatcacccacaattcccttccacccacctacggttctggggccctctgctgtaaggaggactgccctcttgtggacttttaggatattgctactaaaagcacaaagtctagttttttttttttttgcaacaagattgctgttttagggggttctctaagtgtcaaatatttgaaacattgattttcaggtttattctttttttgattaattgaagtttttaatctacctggaacaagaataacttaaaatgtgaaatgaccttggtaataacgatagttctgtttaatgaatgttttgtcagtagcaaccactgtcctaagtgatttttcatatattatctcatttagtttacgcattgtcagctgggaaaacaaggagataatttaagacatataaagaaagcttttccaagtgtcagggtaaagctgattccctatgtccaaactttgtctgcaacttttcaggaaaaacaaacaaacaaacaaaaaatttaagaggtacaataaacacagttatttttttaagcaccaagggggcctgggttctctactcaactctgaccctaattattgtgtgtcatttagaaatttgtcttttcaaggccctagtttcttcaaacgtaaaatgaagctttgcagagagctcatgttcaaaggtcctgaggcacaagaaacactgatatatttgaggaaaagaaggaggtctgtgagactagaatggagtgagtgaggaaaaacagccagagatgcaatcagggggaatggggaacttggtttttaccctgagtgtgacaggaaagcattgcagggtttggtgcccagggattaaatgaactgacatgtaatttggccaatagacattaatgtcagtaagacataaatatgttctgccaatgccaagcaggagcaaaaacatcattttttcatctttcctcagttcagtgcctccaaaactctaagaactgagacatcactttggatgatgacataggacttgtgtacttattacatgtagtatcaactgtccattaatacttttaaaacccatgctttccaacaaagttacttctttaaagcttccagaggtcatctttaatttatgaatgaaagatatgttctaaaaataagctatgtactagtataattatctatgtctatatttaagtcagcaagtatctattctataaatgtttattgagtgcccactctgtctaggccatggtgctggtatggaaggaatgccagcaaaaaaaaaaaaaggcctgtaaccccaatccacatgaagtttactatctagtgtgtcattaagtcatttccagtataatctccaaaaataattgagggtgaaaagccaaaatttaaatactaggaaactggacatataagatatattatgcatattggtgacatcataatataattttaaaagcgtggactttaggatctgacacattctgcttcaacttcttgttaactatgtgatcttgagcaagccactttacctctctgtgcaactgtctcctcatttggtaaacagagataatgctccctaattcacagtggttttgtaaggattaaataagataatgtgtataaagagtctggcatacacattcggtacatggcagctgttgggtgaaaaagaacaggaaaggagagagaagaaaattggaagcagtccagcaggcaaggtgggattggaagaatgccaaaagtagcaaaatattttaatgttgcacataaatgactgaaaggcataaaaaagctcaagaataatgtccccttctattatgtttaaagccaaaaatggaatggtttacccctgtatgtcacactaatatttattgtctttcaatgctgggcccagatactctagaagacatgttcagttttcgccagccacctaaactggatgaaagaatatttgcaagaatcaaattctacacataaatgtattgagtatctgctgtgtgcccagcaccattgtagtttctagagatagagtaattaacaaaatagaaaaaaaaataaaaaaatcccttcctcatggtgtttaccgtctagtagggggtaggggaaaataggcagtatattagaagtatattcaaaggtgaaaagctctctggagagaaagtggaaaagtgattaggaagagaggtgtaatttaaatgggtgattaggcaaaatcttattgaaaggtaacatttgggcaaagacttaaagaaggtgttggtataagatctctgacagtatctgggagagaagctttgcagagagctcacattcaaaagtcctgaggtgagagcaacccttgatatgtttgaggaacagaaggagttcagcaagactggaatggagtgagtgaggaacaacagctgaagacacaatcagagggagtggggaacttggtttttaccccaagtgtgataggaaaaccattgcagggtttggcacccagggatcaaatgaactgacatataatttgccctgtggagtcatgggacataatttatgttttaaaaagactacctctggctgctatgttgagaataaaatgttgggggacaaagatgaaagcagaaagaccaggttattataaaaatccaggtgagagatgataacagtaatgatggaggtagaaagaatgttttgattctgaattatttagaatcatcatttatagtgattaaggaagacagaggatggaacaagtttgtttgtttgacttttaagggaggcctggggaagctctgtaatctagtttggacatatcaagtttattaaagtagacaattagatatacaagtctagagttcaaggagaggtctggggtctatagagacacatatttgggaaatgtaaccttatgaataatatttaaagccattgagacagaatgagatcaccaagggagtaagtacagatagagaactgaagaataaaaggtatccaaggcgtaagtcttgtagcttgtaaaggctggatggaaaagaaccagaaaagtctgaaaaggattgttcagtgagaaaaatcagcaaagtgtctcatcctggagggtaaatggaggaagatttgaagaggtagtgagaagctagctgtatcaagtgttgctgataggtctaataaaatgagttccaagaattgcataggatttggcaatatgagcctcatgggttggcttaactcagacagttttgaagagtggggagagaactaagtctgattggagaaactttcagagaaaaaggcaggaaagaaattggaatcagggagtaaggacaactcctttgctctaaaggggagcagggaaatggagtggaagctgaagagtatagtgggatctagagagttttttttggttttttttttttttttttttgagacagaatcgcactctgttgtcaggctggagtgcagtggcacgatctccgctcactgcaacctccatctcctgggttcaagtgattctcctgcctcagcctcttgagtagctgggattacaggtgcgtgccaccacgcccagctaatttttgtatttttagtagacggggtttcaccatgttggccagaatggtctcgatctcttgacctcgtgatctgcccacctcggcctcccaaagtactgagattacaggcgtgagccactgcgcctggccgagagatgtatttttgaagattcaggaaataacatgtttgctagttgacaggatggccaagtaaagaagggccaagtaatgaggcaagaggtaaaggagagaatttctgcaacatgtctctaagtgggagggcttggggtcgcattcccaagaagagagattgagcttagataggaccaggtgtgggcccagaccagcagcatcggcatcacttgggaattattagaaatgctaattttcaggcccttcccaggcctactgattcagaaactctggggttggggccagcaacctgttttaacaaaccgtctgggtgattttgatgtaaagtctgatctgtggtaatagaatacgtaggtatagatcctggtccgagagtagatgtggtcctaagaattgtagggaattatcttccagttgcttctgtgttctcagttaaataggaagacaggacatagctgagagtgaagactggagggaagttgttggagatctggggagacaggagaagtttgatacagttgtctaggagaatggaagagtcagtgacctggggaagaactgtgagtgcctgagagcatttagtgcgcacctgagttcatggccatgtgtctacccagagcccatcagtatgattgtgtctttttctccagtgatgagcagctggaattgacatgatgataaagagaaagccagagaaagaataagtgaataaaatgactactgtctcataaacaggagctttacaggcaaacattgctttccagcatggaaattgtaccatttcctgaagaccaccttaccttttattcttgcagtccaaaatccaccctgcaaccccagcctacttgcctcctggtgagagtcatgtctacagtcttggggctgccacacagctcatgagtccagagtgctggatacggcaagggctgcctggctagtaagacacaaactggtcagctagagataaagtgtgactcaccgagtgcccagaaaaaaacatttcttcattttctctcctgacaactgtattttcctaaattattatatagataagagcttgtcagacacaaaagaccacaatattatataattccatttacatgaaataggcaaatctatagaaacagaaagtagattagtggttgcttagggttgaggtgataagggagtgacagctgaaaggtatggggtttctttttaagatgatgagactgttctaaaattgaccatggtgatgaccacacaactctgtgaatgtaccatgaaccattaaactgtatactttctgtgggtaaattgtatgatatgggaatcatatctcaataaagctgctttttaaaacttacatacacacacacacatttaattaatctatttgtatagatgaaaacaaggacttgttaatggaaataaaccaaatcacttaaatctataactgaatttctttgtacctatctttaaacaaatagaacttcctttaaatgctgagggctttccaatatattaaaaacaaacaaacaaacttctagtctctgatatgggaaataacttgtaggagttaagcttttttccttaaaaaaaaaaaaaaaaaaaaaaaaaggtaagcagagctaattcccactttgtagtgctttgttgtgaaaaacttggaccaaagtggctgttaattctacttttcaaagctgaattctttctgacccttcaaaacgtatgctcccaggagtcttaaggcggtgtgttcctctctcgtcaaagcagcatacacatacactgttaagaacatgttcatttctgcttctgtcagctttgtgtctgagcactaatagtgtccatggtttcacttttgcatgaacgtttttgctctaagcttagggaaggacactcttttccatgccgtagttgaaatgtgtaacttgtccctgtttagaaaaatgccgccacctacttgcttcatgtatctggtgatttaaagcaactcctgaatcattcaacttggccagcttgtctttgtgtaggaacaatcccaagcccatgtagagtcttgccttgcagcacctgaaaataaattctgtcgagactgatgctccatcctcgaatttttgataaatctttatggaagagttattggatgctcatggagcaggtgtgggtctgcagtgggggcacgaaggaagcatcaggaggccaagttagcttctcagctagtggctctgtgaccttgggcaagccatttaattttccatttccacatctaaaaataaggactgaatcaagcgatctctggagttccttccaactctacactctagaaaaggcagtgtacttctgagaggttaagagctggggcctccagtcagagtgacctggtttgaattctggttttgctacttgctggtaacctcgttctagttctttggcctctgtatgtatcaatgacttcctgttgaaaaaggaaataataatcatacctgctgcccaggtagagctgtaagttactgatcacaggactcatgctagagtaaaagctgttggtattcaaagtaatgatgtgcccgcacagatccacactgagcctgcactacagcgtatgcagtaatgtatacatctgtactcaacacaaaagcagatgagatggccccacctgcatgcttttagtctagctggggaacaaagctatcataggtgagatgattacccgtatggtactaagtacagagcagcagtccttcaggggaaggttcaatgccacatgagaactggagttgcaggcagcttggcgcaggactggactgtgggttgggagaaaacataagctgaagctccacttgtttgtttgtttctttccttcctcccctctggctctcctaagtttattttggttttgaaatcaggcctgcccaggggagtgaatcaagcagcagacccttcggccttttcctgtctctgtgcctcagacggacagggcctcccaccctgttggttcttaggcgtcgcttgcattgctgggtgccctttttaacttttccatcttcccccaaatgagtccgaggccccagcctctgtgcctaatcctgcctcttggcatgcttcctttcaccttattctcctccctctcttctctgttcaaagtcactcatctccagccctgcggtgaataaattcatacaaagagagtgttttgatttatgtcaccaatttgatctcaaaaaactacagaccctgattctccatgcagtccatttattgttcatgcactcactattttggaagtgttgctccaagtgtgaggtgccaagccacataactgagcttctaattgcagagttctccaagctgaagctgaatgaatggctgtggaatattagcctctgctagaatgctcaaggcctcacagtgactgcaggaggctgtcccacttgtgtctaacagtgtgcattcacttgttttgtttgtgtgttgaatgcattatataattcactgtggaataaactgtggaaagtgcccactgcctgtttttgtaaataaagttttattgggctgtgctcattcacttaacattgtctgtggctgctttcacactgcatggcatggttgagtaattgcaaaaaatactatttggcccaaaaatcctaaaatatttattatctagctctgttcagataaaatttgccaacacttgatttagatgtggacatcagatattataggtctgtagagaatagccatataaattatctaaatttctttttttactatgaagcatgtattttcctatagatcttaaaaagatctatttcatattctataacctaaaattaagatatttagtttcttctcagagttttgcttttgttttgttttgctacttggataatatcataaacatctggacttgttggttcccagagtagaattatttaatgaaaaggtatcaaaaaataccttttgatataccaaaaaatatatcaaaaaatttatttcattttaaaataaaaactaaaggcatcaatagaaaaaccttaataagcttaaagggcctctccatgaatattgaggacatcgtgaatgtttagagctggaacaagacttcaggtatcatctaaactgatctcaccatttggaaaattgaagaaactgagaaccagagaaggatgtgcttaaggtcacatgacaagttacagctatcacaaccgagaacccagaactcctatctttctgcaaagggcttttgccagtcctgcaaaaacaaaaaaggtcacagaacagagctaatttgtgctactatgaattcagatggccaccttcaaatgggccatcaacatttccctgaatcctactaaatatctctgttcaacatactcttccactttctgtaatgctgtttcagacttcatcttccataaccctctaacatctctttgtcctcccttgctctcatcaaataacctcaccttctccttcagagaaaatgaaacctatctctctgtaactctaattgtcctgacaccagacacatgagcctacctacatctgtgtccatcctcccttcctcccaagtacagtagaggtgtccacccttcttgtacatacttgagacacgtatctctctccttccagatgggactccctcccaggatctttcagtatgagttatctttttccctctctcaaaaacaaattactatcattattattattaatatatcttccttctaaacatgtccacatcttccattaaatttttttaaagcatatcaccatttattccctgcaacgaactcacaattatttattctcctctttccagccaaacttctgaaagtttggcttcccagtctttggctgggaagaggagaataaatgtgcaccatttctgtgtccttatctcccatttactcttcaactccatctgtctggcttcaggccccttccactaaccaagtaatactcattaaggcctctgatgaccctcatattgctaaatccagtgaccattttctagacctcatctcccttgacctctcagcagtattcagtaccactgattactctgtccttcttgtctcttcccttagttccatgacacaaaactctctgggatttctttgtacctcacagactcttgccagctcacttgatcctcagactctctcactagctcgctgtttcttcctgacttttcaatattagagttctttaaatagtgggtgctcctcttcttgctctagctgcagttctaaagcaatagcatccatgttgacaccttcagttaccatttatctatatgacaatgaaggcttcccctcaccccctcaacacagtggatacagtggtttttgaaatgtaaatctaatcattgctacttccttcacttaagacccttcaaccttttctgacttaggataaatataaaatcttgtctatggcctaaaaggccctgcccggccagtctcctgtctgtctctccagactcatctctctccagctccctgtcctcacccttctgcctacaccagccatctatcaccctgtacataagtacgggtccctcccttctccatgaaacccacacatgggattgcccttccctctccttccacctgggcaactcctactcatcctttgacttcattctagttggcacttctgggagtctcatcccactcatcactttgtctagaaagccttatctaagtgagagcccacattttggccataaaggaaaatgacacatagctttaattttacattggcttgcataattaacttcattaatatatattctctccaaaagacagcaagctccctaaaggcagatattattattgtatatgtgttgtattgtatatgtatatattgtattatatatgtgatatacatgttatttttgttttacactgcatgcctagcacttagcacaggggttaatcagtaaaaggcactcaaagaatatttcacaaaaggatgcatagagggagggaagagtagatacatggatagacaaacagttatggcatatttgatctaagatctgtgctttaacaaaaatactggaccgatgggatgaatgtttacagactttccagtaaccaagagcaaaggaggcataagcatcagacaacaatggaattgataaagcctatatcttggtggatgtctcagtgccatttttccattcttcccaaggacactctatttctatgggaatacaataagtgcagtatgtttcctaactaccacaaatatttctgaaatgcaaactagtggcttctgattcatacatgttattagagaggaaaactgaagctgtcaggggctcatagaaagctttgcattcttcctcaatgtgattctacatggctaatgtcactaactgaccacagaaactaagtcattggtcataggaaaataaaaatggtgtacgtgctggttatgtttggcacaaggcctttgtttgggtatatgcattccaaggatccctagaatgaactgccttatagcactcaatcaggtccaaagaactgagccctttagaagcagaagaagaagaggaaaaaccctgatagcaatcaacagaatccaaagtattgagtgttttattaaatgcctgtaaggctgggacacttgtgttgactcctacacatttaagtgcaatcttcttcaatgattaccttggaagatgcatatttattttagtgacactgttcttactctaaatatttgcagccactcttttgggactacctttaaggccaatagtatatgtattattaaacacatcctgagcctttggaaggtaaatttggttttcttttctttttttttttttaagatggagtctccctctgttgcccagactggagtgccacaatctgggctcactgcaagctttgcctcccgggttcacaccattctcctgcctcaccctcctgagtagctgggactacagacatccgccaccatgcccagctaatttttttttttttttttttttttttttttagtagagacagggtttcactgtgttagccaggatggactcgatctcctgacctcgtgatccacctgtctcggcctcccaaagtgctgggattacaggcgtgagccaccacgcccggccggtaaatctgatttttagaaaaacccaaatgttatgaataatcaaatctagtgaatagactcagggtccaaacaagatttcagttcaaaatgataacagctttccttgtgtggtaagaaaaaaaaaaaatggttctgagggacaactggttctctctcggtgaggagttccagaaacgtttgaagacatggaaaacatgcatagcttcataagatgacagggcttacaagttctgctgtgtttgttttcaaacccaatctcatttctttagagatctgaactgatcatctacctggccagccttggctagcaagatgtgttttatttggccaacgtagtggttttctttaaaaattgagtcaggattgaaaaaccaggagatttccagtacaaatctgaatttcttatctccttggaaaatctgaagatctggcaaaactctttccacagccccatgtgacaattccgtcctggagcagagtatctgctgcctcctgtatgaaagagacagttaggccagcagctctcaactgctatcattgtctgtcctgacctcactatttaaatactgtactcccagtgcactttgctgcttcttattccatgtgacatttatttgtttaattgcctgtgtcatctccctctagaccaaaagctcagtgagggcagagattttttttcctgtgtttgttcaatgctgtatctccattgtctggggtatggctggcacttgatgcctatctgttgaatgaattaatgtctagcccctgtaagcagtaaagtttgcaacctttgctctagagttgcactttgtagaaaagaagactaaatggttacctttctatagatatacaacaatctataccatatatacttttcattttcctttttatattatttattttatgcctctattatgttattgcatttcatctccacagcaattttgtaaaacgtacattatctctgagtgttacctcaaatttttctacctttctttctttcccccacctttatttgtattcactgtattgtattgtattgtattgtattcatttattctttttgaatagataccaaatcctatacatgatccagaatctaaaatgtatggaaaggtctgcaataaacctcatcccttaaccatccaggtcccctcctcataggcagtgttgttagtttctttgtgtctatccacagatactctttggatacccttttatattcttctttctctttgtatatatggatgtcacataccgtgtacactgctatgcactttgcttttctcacttaaccatatttcttaaagattatttcatattattctataaatgttctcttattctttttttacatttatacagcattccagttggtgatttattcccagatggtttatttaactagttcctgttgatggacatttgcgttttacatatctccttttataggcattcgagatatggttgttacaggtgtttaagaagtgagattgtgggtggtttctagatttgtgccatagttagtaagtcttcaccattttaaagctgtggaaagattttcttgtggtttcttctagggcttttatttgttacattttaattttttcatatacttggtatttaaccaggcataaggtatgagttatagattcaactgtgattttttttctagatgtttactgtttatctcatctttaggagttaaataagccagtttttattatattgtaaatttccatatatattgaggtctgtttctgaacttctgtcctgctccattgatctgctaacttttcatgcaccaatactgcactgttttaattactaaggcattatactatgctttcatatctgatgggcttaattctccctgttactttttgttcaaagtgtttcgtatatttaatattcttacaggataacattcatatagtcttacttccctgtgggtttttaagtcatcaagaacaagcagtgactattatcacataccattttagcgtctttcaaggagatcaaatacttttttattcagtggacttattactctgattagcagtttcagcattcctaatgttgacttatccttgctttcctagaaatattccattttttctggtgtattgttcttctaatttttccaagagtcatttgctgatattttatttaagattttttgtctcaattaaaataagtcatctgggcaaatttcttttttatgctgtcttttccaaatttttggtatcagaattatgctgatttacaaaagtaattgaggaagtttattttttccctgtgctttcaaacagtttaaataattttttttatctatgaaataatcacacacaaaaccatctggatttggcattttcagggaagggagaggaggggggttccttgacagtgtttaagtttttcccatgattttcagtctatgcaaatttgtcttttctcctactttatgttttttaagaaaatcaaacaattcatcaagattttgaatgtattttcacagttactgaaagtcatctcttataattattctaatcctcagtatacataaataattccctttctttttcctaattttgtgaatttgttatttctccctttttttctccactaggttaactgctagttcatctatttgttgttttgttcttggtttttccaaagaatcagctttgggatatctttacacatgagacctgttaaaatgttttctagtcctataagctttctgacttttattaatttctctttcagctttcttttatctgtggttctttttctacaaatgcttaactcatttatttttaagtcataaaaatgtataaaactatgacatttaagatatttcctttagtaagtacagcattgagggtctcacataggttttaacatttgttatttagatcataattattctttacatatctagcaataaggcttctatttactctttgacaaagagttgtttaggagataattttcttggcttccaggtaattgcagtttttctttttttatgtgtctgattttctttcttttttttctatttagtttctaagttaagtatattttagggagattgttttgtcacatttctacctatttctactcttggaaagtttctttattgcctttggtcacatgctataattattctatttttgcagtattctgtttttcagatatgggtatctgatcctagattaacattagtgatgttattctggtattctttcttattttatatctacttaatctttgaaggaatgtaaggtaggttaaacaaccactattgtgtttccatgtatttttccttgaattttctacagggtttgacttcatctatttctctttttctttttaagagacaggatctcactctgttgcccaggctggagtacagtggtgcaaccatagctcactgcagcctcaaacgccaaggctcaagggatcctctcaccttagtctctcctgtagctgagactataggtgtacaccactgtgcccagctaatttgattttaaaatttttgtagagatgaggtctcattatattgtccaggctactcttgaactcttggcctcaagcaatcctcctgcctcagcctcccaaagtgctgggattacaggcatgagttaccatgcccggcacttcatacatttcagtactatgttacttggagcataatgtatggttatatctattttctacctgataaataattttaaggcagatggagactgaaacattgcaccaacaggcagtcaatactacctgcgagctatgagaagatctcaaagttggagacttctcaaggggtacagggaattggtgacaggtatacctgagggttaggcaagaacaaatgcatctaatactaagatgttttattagttaagaaaagtgacatgaggatatatgtgcttgatcttttaatttcttctttctggattttgtttcttataactatgaattttgtgtaaaaagaccaacagtcatgtcttatttctgtgcccagcaactaacacagtgctttgccctcacctttggtagatactctggtactaggttggtgcaaaagtaactgcagtttctgccattaaaagtaatggtgaagactatatcactctaagagtttaattcttcatggtgccatgtggaaatactagcaaaaacagcaattacttttgccccggcctaatagttgttgtgaataaatgaatgagtgaagtagcaaaatatgaaataggtgttgcagaccagggtaattagcactgacatttgccccacctctctgtccaaacatgccactccttatagagcagactgttgagttctatattctttcaaaatttttcatagactcactcctggagccagctcataatgtattaagtattcctcctgaatgtgtacagatttcttgtttactttatgaatccaactgagaaggtataacagatataccagagatgggagtctgtggccctagccattgattgtttaagttctgggttagaggtaagcagcccttgccagagtgatccagtcccaaagtagaaggaacaagttttcttgtgatgtggcaaggttatatcgctctaagagtttaattcttcatactgccatgtgaaaatactagagaacaagggttggtttaaaataattatcaccttaaagtattagaagtataagggggaaaagatcagaaagaatatgccaaactatccactgatagtttgttagtggttaactctatggtgggttttaattgtttctcctttatactttctgttttcaaacatttccagggtgatcaggaatcatttttatgcaaaaaaaaataagaatttttaaaagtttgatcctttgaagacttctactctactatcctttggattgggccttatcatttctcacacatgctggctctttgctggaaataataatttctcacacttagcagaaacagatttgcattaagtcaacggtgttgtttctgctactgcacttttacaagtgtagcactgacatgcagcagtcaggatccagagaggaaacaaaatcacactaggtaattcaaacagaaggatttagttcagggaattggttgttacatcggaattggagcactaaagcactaaaagagcaaaaaggaacactgagggaacccaattgcaagaagtagctgtcaccctcagagttgggaaacaaaaagaggagatgaaattagtaggacctaagaactcaaggaagtagtcctgtggagctggtgcttggaccactaagaaaggaagccaaccagctgctgctagaacctctgagggacgcaaagggactggttttggaaatgtagaaagaggcccatactccagacagcagtgactactggaggatgctcctggggcatgaaaaaggagaaaggaagttccttctcctcaccttccagtcttcttccagtgaatagaaagccctctggcaagggactctgggaaatagccacatcccagccccagcatcacagaatagagcaaagaagggtggatctggagctgaggggcaacaggtaacaaactagcacccagcttttgggtcaaaaactcagtagttttataaatggcagctaaccagctttattcattgtactattccaaacctttcctttaaacaactactgatgtcctaaatttccaaatatctcttggcttttcgagaaaagagtattttctttattagaggagtattcatttgtagtccctttagaaatgtctccagcagcatcaatatggggttgagcctgatagctcaatgcgtggggttagggttcaagggcagttcatttgtatatactcctacccagttcgtatactgttagggtccattcttatgaatttgacctcaaagtaataggaataatatcctaatcaaatggagcactgattattaatagaagttctaattttctgagaaaccatgtaacctttactgaactcagaaatgtctcatatccaaaaagaaaggttttcctgccacttaagtaatgtgtctcactgatacagggttggccatgtgaaaaattccagactcatcaagagtaaacttttcaaataattggtttcagcctagccaaatcctgtgctttatatattaaaaatttggttgcttgatattctgagctataaactttatttttgaagtatatatatcccatagatgtgatttttgctcatagaaaaattgtagaaaattcttaggacctttcattcagaaaagattgaagctctaattcttcacaaagaagcttggatttggggtcaggaggcatatttttgggtcctgacttccccatgtaccagtatttatctttagacatttaacatctgagcctcagcttcctcatctgtaaaagagatgataaaatgaggttgtaagcatcaaatgaaaaaatacagtgtaaaaaggcaatataaatgcatgtaatcattattattcttgcaagatgcagtcaagtttagtgatttagagcataaaggatttgctccctgtctctcccactttaaaattcttgcagttttgggcaagggagtcacatctcttaactttagttcccccaactgtaaaatgtggatggtaccacctacgtcataggttgagaatacaagtaataagagtaataaaggaggcagcagaatccttagcaggttccctagaacttatcagaaccctttagaacatagcaagcactcaacaaatgttagctgctattgctattatcgcctttattgttatcatcattactattcttactttttaggaaaccgtgcacacatgtgtaagatgtatggtgattaagatatttattcatcataaagaagtattgttattttcttttttctgtactcaatttcattgaacacaacaaatagaaactctttacatttgttgtagatttctactcaaagccaagagccacgttttgtctagttggcctttgccatggagctaagaagtgactccagaaacacattcaagcatatcatatgggatccgcaatatttctttggcattttagaaagagattaattcctctttctctggtaatctttgttttcaaattacatgaatttttttctgaaaagtgaaatagttcatgtttgtttatagtaggtaaaatcaacaatacaaattgatgaccaagatccactgtctttccttttcatgtacaaaaattagtcattaagtgggccttgtttatgataaactttttcttgactctagagatggtacaactgaggcattccaaattacacctataaaaactatcattttgggatcaaaactatattttttgagggaaagtaaagttgtgaaaatattcttctaaatattctctcactgggaaagcgttagttgaagtcccaacagagacatcaaatggttcctattaattgttgcagaattgctgaaaagagtcagttatgcaaatgctgctgcccccaaagaactgggttatcccgtcattaaatctcttctactcagtatcatgctagagaatagaaatcccactctttcctaatgttaccaactattatataagaaatcatttcacactgagaaatatcaataccatgcccttttcaaaaactgcaaccgtacaaccagtgcatgaagtaaatcaagttctcagtaggcagcagtggcacttagtgagtgttccactgccttctttcttgaaaccccatgaaaggaacacacttcacatgccagctcttctcttggtgtgtaacaaaatgaccaggaccctacggaattaggtctctggtacccaatactcagttatccagaacctaggcttaactatgcataacaataacaactcacatttattgagcacttactatgtgcaaggtactatcctaagcccttttcttgcatgaactcatttaattcctacaacatctccgtaagggacatgctatcttctttggggacacatgtacaaatgatattaaaacaagctgatgtagctattctgtccaagcatccagattgcatggtcagaatgataccaacccaataaactacactttacgtaacccacattatgaaagaccctctgtttgttttgttttgttttgctttgtattgttttgtgacagagtctcgctctgttgcccaggctagagtgcaatgccactatctcagctcactgcaacctctgcctcccaggttcaagtgattctcctgcctcagcctcccaagtagctgggattacaggcacgtgccaccacacccggctaatttttgtatttttagtagagatggggtttcaccatattggccaggctggtctcaaactcctgacctcaagtgatctgcccgcctcggtctcccaaagtgctgggattacaggtgtgagccactgcacctgaccaggccctcagtttatagctggatcttgacagagaaaattggcgtggtccctgtgcggggaggcatggtaatctgtggagtgtccatgttttgtaaagttgggtttttttgttattctttccctttcacacacactaatggccctctgcacttctgacagagtattaaatacagcctcccctaattagaattgtttgtgcacatcccgtcttctctaccagtcaatatctgtcagaaggaaaggggtggggcttagtcatctctgcacccatcatggcacccagctgagtgatgtgcaccttgcaggtgggatgcagaatggcttagcagttaaaagcatttgttgtggttggcagtctaactcttccccttgccagctgggtcacaaagggcaagtttctcagtcctctggccctctgtttcatcaatgagcagaaaacttaccattcattcaaacattctaattattaatggcatagtgactgtgtcctcctcaggagttctccagacacatagcagcagtccccaagagtcttctcatatcatcacgttgctcacatcttagggattcccaaaagagaaggttgaagccaggactctggatagccccctgacctttgttcaaacagaccctttgtgcactgatgggcatatgtcaagattttgagcagagaaacaggcagaagagcagaaagaaagtttcccccttcacagcttaacaaggtatgctgttaagctcccagaagagggagaatggtcttcattgagttgtaaccatgcagcattttcattgcaatgtgctgttattgttccatatatgttattagattaccataacatcagtgagttctcgggaggaagattcacagggctgctagctaagcaacatctcagttcactgccacagacactttgagctctgtttgtgtggagcaattgcccatcagcagatggtactgatgtcaacatgcctggagttttccttggcattataagttcaaaagtgtcaaagttcagtttcatacaaagtagctgcttgttttccaaaactgacctggaggcctagaaaagactgcagaattttgatagatgtggaagttattaaggaaagccatttaatccaaataaattgctcttgaggtaggccttgatcaagaagtttcaattacatttctttaccaataaatagatgtctctggcagcaaatgagagataaggaaggttctctctcactcccaattcaaaactcaagccagagaaaatccacatgcctgacaagaaataataatagcctatttctttttcagctctgtctttaacaccctgtatgatgcttcagttaggtgtgtatttttaacagttttattgagatgtaatttatataacaaagtttacccattgaaaatatatagttcactggattttggtgtatttacagccatttatatactgccgtcaccacagtctcctttcaggataccttcatccaccccaaaaggatcccttgtatccatgagcagtcactccccatccttaaaccaatccctcacccccaccacccagccctagctgaccactcgtccacttcctgtctctatagtgtgcattttttttaacctagacattgcctggcaactcctcataattagaatttaataagtgtttcctcaaaatctgtcatttttgagaaaatttatttccttttgtgtcactgggcctcccttcctccattcagcacctgtccctagcacccccaacaagggtgttctccatttaacgagtatttactaagggcctgctatgaactacacactgtgttagcacttggggtcatcagtgaacagaatgaaaaagatccctgtccccgtaaagctgacttcctagcagagggagaaaaaacagtcaacaacagcagcagcaaagcacagaagtaaaatgtacagcatgttaaaagacactaagtactatggcaaagagagacaggagaggaagataaggggtattgggaagcgccgtgcccagggaaggggcaggtgacagcactgggatgttcaaataggcatcccgagaacttcaggtgttcaacccttaatggaggtgagggagggacccaagcaggtgttggaggcatgagcatttcaggcaaggaaaaatcctgacgcaaaaggccctcttgtagggggcacatatgacacgttcgaggaagaggaaggagttggtgaagctgaaactgggagaggagagacagagaggcagatggggcagatccttgtgggagccacagtgggattttgagcagaggggtgacaggagcggaatcgtatcctaactgttggaatgccattttaaacagagatgagaaggggcaagggcagatgcaggagacccctggatactacttcagaggctactttagggcctctaaacctaagtggctctcaatcttggctgggcatcagaatcacccacgctgctttacaaactgaggcctgagctacagacactaattggcctggagtgcacctgggcactgggatttttttttttttttttttttttcaaaggtgcgcaggtgattttgatgtgaaagccaggttgaccatgagagctttcagagcactaagtagtccccctgatttgactttgcagctaggaaacaaaaccccacagatgacccctcttgctcattggcaaagctgtgctgagaggcagccaaaaatcttgctgctatagcagtggcaggactggtgctgcagacagtgtgcaaactgggatggggctggctggagcccacctggatcatcagaccttgaggtcaatctcattctttggctggatgcaaacacgagcctctgaatgtgagagcaaggctttctctctgcacctaagaaagggcttattgtaatatattagggcagaagagaaggataaggctagaacctcaagaagaaggtatgtgattcactcaacaaacagtgtttaagaataatagtgacagtgtgccaggcattgtgcaaggagcagctgagaaaaaaataaggtttaactgtccttgcccaagccaaatggctcaaagtgagcaccgtctaatatttcaaaatgtgttatttgtgggaaggctttaaataagccagaggggaggggggattcttcagttgcatatctgagctgctggcatttctaattcagagggatgaatagaacattattgtgttgcatcggtacaagtacagcaggaaaaaaaaaatgcttggagccgtgagccgaacatgaatcagcaatctggttctattgttcggaaaataatcaccatgctgggagcatggaatttaagaatcatgcagaaatgcccttccccctcccagcaggaaacagacattggctaaaacatgccatcttgtttttggcttcctgagctgaaaagaatgtaaaaaacttggagaggatttagggaaagctgatttgtaaatatggaaaatacaacccataagaaatgggagataatttagacccagtgttggcaacctctcagaggtggcacgccaagggagtgtttattcactcttgtgagcaggcagtacagctgccctagcttcaagaaataactcatgttttttgagttcctactatgcactgatcagtgtgctaacttgtggggggaggaaggagagtggtccctaccttttgaagaccttctaatttgtggcgatgggcaggggagtgcaccaatactataaagcagtagttctcacactcaagtgtgcatcagaaacataggacccgaaccccaccttcagagtttataactcattaggtctgggatagaggcggtgcatctgcattgccatcttgttcccaagtgatctgattctgctgcctgcatactttgagaaccccgctctaagaaaataagtacaaggggcaggcaaggagggttcaatacagaagtccactagaaaggtgcacttggtttgttggtgcaatagcaggtacccctttttggatctgttctctagcacctagctaatgagtgttaattggcaacgtgctttggatagatcacactggccatgactgccaccatccaaggaagggtgacaagaggcacaagaatagatttctctgtaggcctgaggaagttgagcaggacataatacagtaagacatacacatgtggcctcgcagtggcagagcaaatggctgtagggttaagaggacagtagggtgacctgtctccacgctcaaactcaagcacttctcccatgagcagaaggtctcagtggaatcacctgagtggcttttctaagtacgcattattgggcccaggcctggagacggtgagcaaagctcctcagatgattctgccgtgaaaacccctccttgagaactgagaatgctttttctgcatcctgtgtggttgtgccccatacttacaagtaagcagagtgcaaagccaatcttttggaaaatacaaaatcaaagtgcccaatgggtacactccccttcccattgtgtctcattgccgttttgttgccacaggagttgagcgtcccaaattcaggtgtgcccatttaaaatgcaagtggccctcagtgggcacagtccaccaacacagctggacgtgttggccagagtaagctgccgttcactggaaatattctagagaaggctgaccgtgtgctggtcaggatggaaaggtgggggtgcctgccatgtgttgagtgagtacagcctaccaggatggcaccttagttcctccaacatgttcttaaatggatcaggctggtggttctcaacatgtgggccctggaaagtatatccagatcacctaggaacttgttagaaatgcagactctcaggcaccccaaactaactgaatcagaaactctgggaatggagcccagcaattggttttaacaaacccttcacatgctcaccaaagtttgaaagacactagtttagcttatgctataggtagctccttgctacctgtaagtcagaagcagcacagaattggaatgcaggcaaccggtcatttattcatctactgaggtattcgtacaactcttccaacatggtgaacatcttgtgctcatttgtctgattttcacctaagaatgtgaagtgttcagtatctagccagcttctcagctatggttggcatccgtgtaatttccagtgataatctgacttactgcatcctcttctcagattatataagggctgtgttcttttactttttagattcttcgtcacagcctccccatttgacgcgggctcagtaaactactgaataataaccaagcctgatttattcccaggactgccttaaatcctgctaagacttcactctgtgtctctttctcatatcctccacaccaagtggtaagccaggccgactcacttggctgtatgaaactttttaatggcacctttaggtcaaatgttgtggccatggtctcacaaagagtgaggggtgaaaggagatactgcaaatcacacttctagacttttcactgattttcaaagctgttatagccatggttcccaaaatctgtaccagagcaccttgggtaccacagcaaccccacagaaatacagtgggatgtttttaatttttgagggaaacccagaaacaactgtcagacaccatgcaaatccacctgtcaagctgtttggacctcataacttcataaacagggcatttaagtatttcttttgacctagggtcaccgtaaaaaatattactgaaacactaagagtgacatacactgagaaagttgggaatctctgttacagcatgactgtccccaggtatagtttaactgtacacattctggcaggatcatgcattcaagccatcacattgcaggaaatacacattctaaatttaaatattagcaggggagaagctgaaagaaaattagaactatatgcatctttgagggacttctttcctttataaccttcctacccagacctacccatcctagctccctgagacaacccttaaccaaggctcctgtgatttttcaaaataataaataataatgatagaggccaagacaggagaattgcttaagaccagtagtccgagaccagcctgggcaacatagcaagactccatcaaataataataatgatgatgtaaattctcatttagtgtcccaaatatgatggattaattcttgcaaattggaactaatgattgctctaattgctctggtgcattcctgaaaatcacctttgatacacactgttgaaagacaaattcaggctgtgtgtgctataccatgcacctgacacctcacagaaagccactggaatttctgataaagagccaacagaacctttaccaagcagaattaaacaagaacctaatgtgcgactgaatgcagtggctcacgcctgtaatcccagcactttcagatgccgaggtgggcagatcacttgaggccaagagttcaagaccagactggccaacatggtgaaaccctgggtctacttaaaatacaaaacttagccaggcatggtggcttgtgcctgtaattccaactactcaggaggcagagataggagaattgcttgaacccaggagaaagagattgctgtgagctgagatcatgccactgcactccagcctgggtgacagagcaagactctgtctcaaaaaaaaaaaaaaagaacctaatgcgtgagaatggagacaaagtttccgaagtcaatttctgcaagagctttgcaatgtagccccatgtcccctgccccccatttgacactgaagaagtagtaaacagttatatttattaggataattttattttcatcttcaagggaatttcaggagcacagcagtcttcataacactccatttaggaagattattctttttatcccagggttaaaaatctgaaggagctcactgcagattccagaggcagcagagcactggctcagactgagagacactgtctccctgggacaagattgaattttcttttaaatttcagatgatactatcaaggggtcaagtactagagtcttttcttatgacaccatccagggttgcagaagggagtggattgtttgttattgtcttactcattatcaaactctttttaaaaatcaataataaatcatttgctgcagtcttaatgttttattttcacattcttgtttgttgtttttcatgcatgtgtctcagtgagtcacctaaccacaattatatattctggcatctggtggttctgcatggtaccctcattccttaggaattaatttccctgacatgatgaatgtgtttccaatccgttcatcacacacacacacatacacaccccacacacccccccccccccccacacacacacatacacacacaccctctttagcagggagaagttaccctactctccaccaggtgtcagtagagtcagttttaacagcatgctttggccaaaggggcatctgctgaagttgtttttcctgctgtcagacgtttcctcaaactacctctgggctgtcctcttaagagactatcttccatttcttaggagtgttcggagatgatagtccacctgtagagaaagacagccataaggaaaccgcactataaacagcaggtggccaagctggtcctttcaggttggtctcataaaatttttactggctgttttcttctttacttttctatcactaccttatttggcttaaaagtgctccatgtttcactcaatgtgacaataaattagatgtggttgatgcttttagatttgcagggggctttgtttgtttgttttaaggcccattccacctctgccactgctgacctagtcctcaacacaggaatcggattttactctgcttgtagccccagaacccagcattgaagggtatagaatactaccatggattaagtgtgcacgtcccacttaacccaatgtcacctttgagagctacggccttattcccattttaggaatggttactcctgactcagtatcccatatttaagtggcaaggccaatgctctttgtaacatgccatggtgactttgtctgggagagaggtggaaaaggagaggggaagaggaaggggaagagagagaagaggacaatgatttggcctggatattgactaacataaagagtagggggaactctagaatgagattgttgaactggagttgagagagtgggtggagtggaagtaaaggtgaattattttactaagaataaaaagaaatatcagcaacagcaaattaagctcagtttcaaccatagaccctggttgaattatttcccttcctgaaggcaaaacacttacagagactgcctgaaaatctgaaatgaaaagtatagctttgccattcaacagtcatttgctaaagtctgttatgtggggcatgagtctcctgccatacccagtggagaaattctgactgccttcccctccaagaggtgacccactcagattaatacctgggatacggtacagacagagctttcactagttttccacatttttactaactcagagttttatgttcctctttaggctcatgcccagtctaactacgctagcttttcatattttttctcttactgattttttgatactacattcccaaatagggttagttttactgaatacaaaaggtggatcacagcgtggtatgatttgaaaacaccttgcctctgttctcctatttgagttcttaactgattcctatcatgagaaattcaaccattatttattcacttcattgggtcctagatttaatattaaaatgcaaagggctcggggaaggataactggggctgcactcaggatgctatagacttgggaacaaatttatttctgtgtccaaactttcttactccccacagcaaggttaaatgaacatgcaaagtaaccttgaaagggaaaaattttttttcacaaaaattcagccttgcaagaggaaaatggcagggcaggtgaaggagaagcaatttcacctccttttaatctttgtaatgacagcatctggggaggtgggctctgtattgttcttgagtctttaaatgacctcaggtaagcttaaagttagaccaggcaagagtttcagttcccccatgcctttgggatgattgaggctggccaggagttgagatcatctataataatgatgatgcctataataataaagaagtctcccaataccttacatttgtgtcctccttttaaatttacaggcattttccaattgctttggtcctcagcataatcctgagagggcaggaattgtgatttatctttacaaatgaggcttgaagagttaaaggaacttgtccatgatccccaaactactaaactgagacccaaagccatctggaatgacgcccagtccaggagcctttcctccatacctgggattggacttgttctttaaaatattccccaaataccagagtcaaaggtttgatgtatagctctccctctcctcctatgagggggataaggaaaagaaggggaaactccacttttacccccaagagatccacagcctcactgccctcctagcatgggtgcagcccacctagggggacagccatttgcatttattcagctgtgcttccagatgccacagacagagctgtgggaaggctcaagtggggacagggtggggtgaggggttcagccccatcccatgaactccagtcatacccagcaccccacaataccaaataaacttcataaaaatagttgcttgctacctaaacacaacttcaagacacatccctaagctatgcccccctcttacacggcaacttcctaggaaatctagcatgtccactgattctgcatctagtcacgtttgctcaatgctaggtgagaagatggatatgtccttctctgaaggccttcccagttttaatggtcttgggctagggtatgtaataacgtcacactcatgggtctgaccttttaaaatgaaccaagagaattgctaatgaaggttccccaacccacagcccccaacccagtcagtcatggcttttctgggctgcccatgaagcacctgctgaagtattaatagatgagccctgttaaatcttatcatctgatacatcaggctgcatgacactctgctacccttcctcctgagagagccaaggagaagaaaaactaaggaagacagtttgaaaaggccacaaaaggttgatgatgagctgtgaggggaagcatgttttgattcagtgcacaggttggataaacaatgactcaccaggtctacgtggaaagatttttcatgaggtaatttttacagatgccccttcagtgctgtagtttcgatacagagaaaggaaacacaaggggacaaaggtgtgtggtcagggcaagcgtgctggagttctacaagaaggagtggaggtgttctctctggcactggtctagccttgtgaccttgaatactgagacaggcaagtattaggttggtgcaaaaacaaaagcaattagaagtaatggcaaaaactgcaattgcttttgcatcaacctaatagcaatgatcccactcaaagaggtgccaccaaagggtgagcctcccaagcaggcctcctccacactgcagcagggctgcctttctcacactggatcactgcttaaagaccttccgtggctccccatttttcacaggataaagcccaagttccacagcaactctttcaagactcttcaccatctggcctgaaactacatttgcagtgtcattcatggtcacttcctgccccgctcctgcagtcacataccctgggcttttttggtacttctaagccatgcttttcatccctggcgtggaaaaaaatcccagctcatttttccaaagccaaactcacatatcaccattgggttccctcatacaggtgtaattaattacagtctcttcagtgccttcaaacacatcttgtatccctcttgttcagctcttctgcccctgagttacaggttggttcttcacctaagccttgcaggagtgggctccatgagtaattcatcttgaatgatctaaagcctgagttggtgtctgatgggattaatggggcagccctagacagatccttgggttgatggattcctcttcagcctccaggcttgttttttagaaactcatcttccacccacaaaggaatttactgctggtaggttctcttctctttgctcccaaccaaaaatagctcttgtgtctccttttcattctattcactagatcacatttacatcaacttatatcttttccattagctatctgcattttaagaatgatcaaagtccatagccaaagcttaatatggcagctgtgagtagattttgcatgtgtaaagtatctgtgaaccctctgaaaatatataccaaatggcttacccatttttcaaggggaggggcaagtgatataattaaatggaaatgtaatttttcattacatttcttgaggagagcacactccctaatagttgagatcactcagctaaagaatgaagctttaaaggagaatttgaaggagtgagggacatgcagcaggattttagcttgtccctgaagccatttcatacacacagcgcctgctttattgcagcttaaagacccaggtcatctcaagagaggcttaacatgccctgagagcaaaaagcagtgcaaggtaaggagactgtgttcttctgtgtggccatcccagcctatgagacatgcatcttcttagacgtcaggcagggcagggaaaggcccctcagcagtctccaacagcatctctccacccgttctctgtccactgaacatgcctgcactctgttccacgtgacagcttttcagatatttgaagaccactctctacccctcatgtgactcttcccttttctaggtttccttcaatgtttccttaagatacgttttccatcgtccaggatattgtacatgagacatccttcttaaaatgtagcagcccacatgtggtctgaccaatgtcctacaggctctttctctttctttctttctttctttctttctttctttctttctttctttctttctttctttcttcctttttctttctttctctttctttcttttccttccttccttccctccttctttctttcttcctttctttttttcttttcttatttctttctttccttttttttgagacagggtctcactatgttgaccaggctggtctcaaactcctgggctcaagcagtcttcccaccttggcctcccaagtagctaagagtatcaagtgcatgccactgtgcccagctacaggctatatttctgtccatgcagcccaagatgctgttagagtaattagcagcagccacagttcacagtgtggcatggaacccaaggccttccaaagttcctggacctatttactaagtgttgataataattccatttacttttcagtttcagaggattcaataataactttaccatcatttggatttttaaaatacaaacacactttgtgtgtttgagaggtgaatgcctgcttttctactcttccaatgagtggaatgagctttatttaagggacacagcactgggctgagaacaggtagaactggcagaggaaggctccacctgcatgattctcagcaccaccccttggcacatggcatctgtgacttttatttttagctgttccttcccaaccagcttataaaatggattgtaaattccttgagggcagagagcctccaatcttaacctatctgcatccgcagtgtttatcccagtgttaaatgctcatatcacattcttcacaagtcttgtttctacctcttaaatgtcacttaaacacctagccctctcaccatctccaccacctccactcaagttccagcacctttttctctattctggacctgccgtggcctgaccagtctgctttccacccacgagctgctgtaaagctttaaaaacccacattgggtcttatcacacccctgcttaaaacctgcgtaatgtaaaggcaccacccagtttttctgtatgaagctcattccttgcagagtagtccatgggccttaggagcacaaggatgagaacaaagggttaaatcataacctggggataggtctatttgaaagaagggcctaaaggtctggggtcacctccactcaaaatcctccccaaataagcccaagtagaaatgacctttccttctctcatggccccagtctactctgaagagacaggtaaggtgaaacctgtatatatttttgcatttatttggtgcaattctctccctatgttagtttagaagctgcttgtggacaggccacagtgttgtctttaaacaaaacctagggcattgcctaaacagagtagcctcaaccaaggcctcgcgataaccaaacaaatgaatgacccatgtcaaagggatattctctacttgggtagcagttgcctagaagactaaatggaatggcatttcccttcccctagtgctgaactgttgaagcagttaaaggaccatcgactttgaagggccgtggtacacagaccctcactggatctaactgaaaacccttccctgaccagagagaaacagggcatgttttaatgaatgacacacagatgctaggtgtcaatccttcattagcgtagccacccctttctaactcaacaactccttgacccttcctcctcactgacctacaaagcccttcgctgtttttgtttccttcctggcaaataaagaaactcagcttgctttacttttaagttcttttggactttcttttctcctttgatcccatgatttgctggtgagctccaggcctctgccaaggctgtggaaaggaccatcttgggattcccctcctcagtacagagcattttaccaacacccaccatgtaggacaggagaccaggaaaggaggccccgggacacctgccttccctgggggattgttagaagctttactggaattacattgaaaactctagagctcactgaaggaaaattgtactaaatactactaaatactaaataataccaaaatactacagtaaaagtaacactagtatactattaatagtattagtaatactatatctgttatatagtaacagtaacactaaaatactgaagtactaaattgtactatagttgaaggaaaatagtactaaacagaaaaattggtaccaaattttgtggtgataacactatttttaaagtcttatatagaattaagattttttccattcctagatactttccgccccacacacaataatttcctatagttcatatgcctattcaattggaattttgaaaatgaagatatttttaactgataatatcataaggacataactgggattttatagcttcgccttcaagacaataaaaagcatacaaaactatgctgacacatttgtattaatgttgtattttaatattatcagtcaggattcttttggttgcaagtgacagaaacctaagtcaaaccagcttattgtaaaaagggtaatattttactgagggcatccaaggaagggctgaatagccaaatccctggaggagcagaagaggatacagctgggcctcaggaagagccgagagacaccacagctttctccttccacttcaggctgtctgtgaatgtcagatggatcctctctctcaccttcaaatggactttttccaggtggctgagagatatggtctcagtgttagagttttaacttctgataaattctgtccctagagaggaactagataatatctctttctctctccctcaatccctccctttctttcaccctgaaaaatcatcttactagtccacctcaagtcttaagccagttttgccagaggtggggcacagtccaagccaagttcctccacctctttagaatattcaggagtggtagcatgtgaaaacatggcagcttccatgggttcagagggggtggttaatggcagcacagtttctaagaggagcaacagagtcaggacccgcaatactgtaggtacgacctgtgctctcacctacagcagctcagaacttggtgcctctcactcaaaatgctgctggacaggtgaacaaagatgggacaaagggcttgtggtagagacccttgacgagctaatcagaggcaagaatgcattttcctagcagtgaatactcatcctctccatcaggtgccaatttggcagcttacactatgctatatcaacttcattcatcttattttatttagttgttcaacatatattgttgagtacctgttatgtatctgacattccgctcagtgtagaagatataaacatgagaaaggcagtctctgccataaagagattacagtgtggtgggaaaggcagccgtgtaaacatgtaatttccacagaatgggacaagaagtatgatcaaggtttgaagtcattgctgcagcattagatgtggagacagagcatgaatggctatgtataaatctgtgttgtaaacataatccacacacttcctctgcctcgttctttttcttctccaaccagttatttaacaagattgttcctccctttcatgggcacagtacgttatagattacccagcacttccactcacagcatcttcaaacctcagaaataccagccttgtgaaataagtgggacaagtattagtttcctcatcttacactgaagaaatcgtgtttccagtgctttgaaattacttcctctgatcccacagctagtagtatattacaacgttggacctcaagcccatgcctcaggcttcagtgctattcctaagccaaaatgctaccaccatctaccactggccacagaacacactccagaaaaagaaagctaatcctaatctgtctccggcaatatgctgaaggactgtgacccaggttcatcacccaccagtgtccatctgtgtcatcctgggtgcacccttccttggcattcttccctgggtcagtgcacctctggccactgatgcataccaggcctccatccccagcctgagggccaagtctgactgttgctcttggatctcattaaggtagtggtgaggtggggagttcagctctgactaggacaagtcataaatgggcagatgagaatatggattcagttctctagggcagtgtgtctatgacttgaaagtgcacatgaatcacctgggggtcttgtccaaatgcagattctgactgaggggatgcccaaattttctatttctcacaagctctcaggcaatgtcgagactgctggcccacagaccacaccttgagaagcaagatctagattagagatgctaatacatcttagccactcttgggataaacagcaaatctgtgagctggtagctttcttaaaaatctgagatggaaaaatgtgcgcttgataaaaaatttatttttaaaacatgtttatagaaggaaccctgagatgaaaattaagaggtcttacaaatttacacatatcacatagcccacctatgcttcggtgtccccagttctgagttgagagtaacaaatattgcttcaaggtaattaatgcatatgatattgtttggaacaaaaccattatggaaaatgcagattataatctgtgattttttttgtattttttccttgtaggagatgtcagtgaaaaaagggatccagaatgattactaacctatgactcccaacagtatgacaggtatctttttttttttacattttctttgtgtgcctccatttttgttccacctagagtgaaattatagattcttaaagattaacttgcgagttttagcaaccgttatttccaaaccaataagtgttattaaatcctgtgaatacctccctagaaatgtacttccatcttcttctgatataagatgcatcctcaccagaaaggtgatggagaggaaatgactattcatttttagccatcctttagccattgcacactaagtttactattttcttttcttttttttcctttttttttttttttctttgagacatggtcttgctctgtcacccaggctggagtgcagtggtgcactcacggtttactgcagccccaacctcccagggctcaagtgattctcccacctcagcctcccaaagtgcttggatttacagtaggccactgcacccggtgtatgtttacttcttacagtcattccaattaatataataaatggctctacatactttgtgaccacagaaagtgtatattttcagaagttggctgtttattccattcagcagtagagtcagaatggaatatgattaggtcatgtaaggtataagtcagttataaaactcttagcaagggtcaaaggagagacagaatgaccttggaggaatacaaggttgcaatagcacaaattctttgtgcaatttatagagcgatggttgtacactcagtggtgccagggaataggccgataacaccagtgatgacaaaggttaggtaaaaggaaaaacaagtaaacaaagctggagaactctggttctctctaaaaggaagccatctcccactctaagcaatcactgacaagaaggaatgaagccccatgtgtccagagatttcaaatttgcaagagaagttggaaattcggattttaaatgaaatatcccaaattttagatgttagcaaataacttataaaaattttatagacttatggctcagtcgaaatatgtctgctaactagaatcaacccatgagctgtgagtttatgacctcagctatataccttccagcctagcagcaagtccaccactgtcctttttgttaccatggcaacagggcaggtcctcatagacctctgtgtgtcgaggatgcagcctgacctttgattatctattcatgtcacctccccaccctatgataagctaaacatgtaggacaaattgctccaagaacttattctccagtagacctgagaaactgaagcaactgaaagttgccactcagccttctaaaagttttgaagcctcccaatgaccataaactttaactctcccagcatctttgcccagcctctctacccacccgtactggagctcctgatatagcaaaaagatggggtgcctgggcaaatcacaatgattcacacctgtaggagctgagggcatcggaatcacatatcttcttatttcacatcaacaggcaccaaaacgcacccactcccacatctattccactgccaactaggtcaaattctccgccactaaaattgcactccttctacgtcataaaccaacacattcaaccttagctacagcctcaatgtttctgttgggatgaatggcaatctcagtcaggaggagtgatggcctaagtctttgcaggcacacgcaggtgtgagcacacagataccagacagcaggtagccacgctgcaaaatggagggacagtattcctttctgataaaggaggacagtgtgagagcaagtgctataaggatggctctctactccatgataatttgcccacctgaaaaagtgtccaaagatctggactcaaagaacataccccaagacatatgaaatggcaaaacatggtgtaaaagtaggtaataaaatggtcttcgcttgctgtggggattagttctaggtacagtgcagttcatctagggagagtgaccattcattccagctcctctggatcaggggctggcaatttttattgttgttgtaaagggccagtgaataaatatttctggctttgcagcccatacagtgtctgtcataattactcaattctgccattgtagcatgaaaagccatagactatatgtaaataaatagacttggctgtggtttactacaaatttataaaacaggcagcaggtcagctttggcccatactttgtggacccttgttctagagcccagggtggtccaggcagttctcttctagctacaaaccatctcattactgagcagagcccccaggtctgagtcagcttgagagctgagctaggaatctaggcccactcctagacagctctagggtaagccagcttttcagcccatcttgtggaagctgggatgctttcctcgcagactgagccagaaccccagctgcctcctagtgaaggagggagttttcacttccagcatttgcttcatagtggagaaactaattgtagttctattttcaaaagaaacctactccagacacatacatgtacagtatacgttagtgggctcatatgagaaaatcattactttagatgcccttgtttgtgtatgagataaaacaatgttcttttccctccttcgattgcagtgggctcaggggtacatgttttaagaaacccaaaggaagaccataatgaagttataagctgtcagaactaagtgcttgctctaggagcatacttcaaaggccaaatgtgcatatttttcctttgaaaagcttaatagataatattactgctattcaacacaggaaatcaattaaacccttatgaaaagaaaatcattttttagatgatcagtagttaatatggaatctattttcctcaaacagaacaggtcagcattttcagataaatgaggcatgttttttgtaggctctttcaaccgcaatgcttattaaatttatgtactttgcactaactcgaatgaataattgtttattttttgaggttacttaatataagctacagtagagtcaggtcttgccaaaattttctcactgctttacgccacctaatttgaaattaggactatatgaaatcattcattgaaaaatgcgattccttccaacctcagcagaaacaagaaaaaaaatacaattcttaaagaaggaagtaaaaaagtaccttaatacaatattttatctgtctggaattaagcatcacttcctagataatctgagggaaattctgctgacattgatgacaatataatgagctctatttttaataaaaccgtgatcctcagcatagggaaatttgttccaagatatgagtagctaaaatgttaaataccaaagttagaggcttttggccttgactgaacaggaaaccaagaattcaaactgtgctggaagaggcaaaaacaaagacccattatgtttgcgctgaacctggctgtatgatattaggatatggcataaagctggcaaagtacttgacgttttcattgaaactgggcctccagtaatttaaagtcactctattatgatgcctttaatgtgaataatgtattccccattcagttattaacttggacttctttgtgacttgcttgtttgtttagcttccctactgtgggaaggtattttctttatcaaggcattattcttgagtatccctctgtagcagggaagggatgcgtgccaagatagataggagctttcagatgttaccccaaaatttcccaccatgtgatctttgtactgtttcctgtgagcttgctttgggagggctcatgtgttaagcaaaactgagaacaacccaggtttttaaaaatttcccttatgacaactgaggttgagcattttttacatgtttattcaccactcgcatttctgcatctgtaacttgcttgttcatagtgattgtccatttgcccactgtagtttttgtctttttctcattaattgtagaacctgtttatgtgttatggatatatgagctctattttggataaaaccatgatcaacagcatagggcaatttacgctgagatgcgaatatgctaaatgttgaatatcaaagctagagtctccttttgctaagttaactaagcaagtcacgtcatctccctagatcttgaattccttatctaataatgagaaagtgaaagcagttcatccctagttccccttccacttctcaaatttgaatatttataaatcacatgttcataaagtaaggcatacatacattgatggttgagtataaagaaaaagtgaacactgaggcagtgcattttgtgttttgagactgtcctactgaacaagcttttcagagtcagacaaaacatttaagttgggaaaactcggcattttattgtgaagcccatgccatttttcaaaggtggaccttcaggtgtcccttaggtttttcagctgcttcttaatggccatttcttccttcagaaatagattcacggtggtgcatatgtcctacaacctacgtagaatggctttccatggtttcaaaaggttactgatggcaaaataatgacaccattcaaaaataactaatgttaacactgtacatattgttaacatttcctgctgtcaataaacacgcttcctcaaagggatttgttcatggctacttagtaattcatcatatggtgatatagtccctgattattaggctattaacataatattgttataaataatatacgatgaatacatatttattacatattgacatgatgaatatataatgaactgccttgtacataattttgcatctttccgataatttccctctggataaactctactatgttaaaggaaatgatgggtcaaagggactgaacagctttaaaaactttttctgttttcacattttagccagattattggaccaattgagacatccaacagcagttcagcctccatttaagtatataccctccaaatgtagaaatttttggtatagttagcctatttctttgtttttgaggaggtaatttattaggcaaaattgtatcaagcctttcaaaactttatatttttcttattgattataaatttgactatataccccccccacacacacattgattggtgactcaaacttcaccttttataacttaacctgtttgtttaacttttctattgtggtatttgtctttttcttaatgatttagatattagggaattaattcattttctatcttaaacagtatatatatttttctcaatttagtacatatctcttctttttgtttatggcaatatttaaccttaatttttcttcctttgaaataattttatacttacaggaaagttgtaaaattaatacaaagaatttcaagccatcctttaccctaagtcttaaaatgttaattttatcacatttgctttaatcttctttctctctctttccatctctatctaatttttatttcaaaccatttacaaataaattgtaaatatggttccatagcatttttggtcatacaaaagcttttaatttatatagaatgagttctattgaggtgtcatttatgatttatttctttgttgtcaagcttagtaatatcttctgatgagtactgagggacagacctcaatgggctctttggaatgtgttagcacttttatttcaacatgtagttctttttaattagacgcaggaatgacttgcttaaggttgaagatttttctctctcatacttacctttaacacttgcattgttacctttgtgcaccaaacactcacacaaagtggtgagcctctgaggcaagggaggggcaaacctgattggtggaggtccttctgtcccttctcccaaactcaggacagtcaatccccaggccttaggactgattacaggtgtagatgaagtaataacagaagccaaaggagagcaacgatgcagaatgccaacacgaccctcggctccgcttcccacagtgccatagagctgggaggctttagatagatggacacgctcctggcatagccattctgaagggaaatctggaggtttattgcaatttctcctgaattcctgtctccccagatgtgaccaaaaataaaacttggccttggattccatacagccatctatacacattacgaatgctgccatgaatagtttggcagaaagaaaaatagcccaaatagctagctctactgttggctaagctttgattttatttcttcagtatttaaccacacaatgtgatgggggcctttttgctcctccctctgcatgctgtcacttctaaaagaaataaaaatctcactgcaagtaggctagaaaggaagcatctgtcttcccccaaattccttgagggcagaagggaggctattacacacatcacacagaaagtctttaaattcatgctcagacatctctcccacagatccatgcctcacaggaactgctgaaacctcacatcctcttctccctctctccccagaggctaaaaccctgatgagtcggctgtacacactgcctcccctccccgctgcagtcaggaatctggacccttcgctcccctccctcttctccccactactacctccaccttcaagactgtgagcctcttctctccacttcctcgatatgtatttccttttaaaaccccactcagcaaaataaacagatcttccttgggacctcacttaccttggaaagcaaaggaagggaaaaccataaatatttgtcatcttacttttttttcctgtcacacacaaattggtagaagaggatgaaaatcactccatggcttccatccagactagggaagagaggagaccagcacctcagttcacgagtttctctagtttctgccataataaggggcaaatcaagagaccaccaggaagaatttctgtgcagctaatacatcacctttttctttaaaacaagagcaaatgctccttttttcctcatgaaacaaagaacggtaactcttcatgtggtatgactgggtaaaagatgccctataggctacatgaagaaggactggtcctcttgtgctctgactgtctctgtcctcctttcatccctcctgtttaacttcctgagcttctcttggaagagaaacttactacagaaaagtagggagctttctgaaagagaccagattaacaaaatctcaccaaatccagacagactagcgaaaaccttccctcaaatctcccagcaactcttagacaattacttctagaacaacttcagtttccaaatttgagcagctaggtaatcaggaagttgaaatgtcaaaaggacaagactttatagagagtagaaggtgggagcagaagagtgaaaaaaaaattctttctcagcaacccctgtattcttcctagaagtcaccctttacagaaggcaccctttacaaagctggcttcttctcataccccaaccacaatcatcatcacaccaacctccactatgatcattgcctcccacatcatcatccccattatccccaccatcaccactctgctaaactcatctcagtctcctgcaagccctgctgtaaccaagagctgtccagcacatctctacctaacttttttcctaacagtcacaaataacagctataacttaacaaggttctgttatgtggggatgtatcttcctctctagtctcctaaatgccactaaagtccacagcagttgcacatatataggtgcaaatcccttcaaaagaaaacaattttcccaaccagaatttggtttctaatgactatatggtgttattttgtttgcaatgagccaagagttatttttatacggcaccaccacctgccaccattgccatctgaaaagtcccaggcgcttgttttatccatctttgcttttctttcaagtcttggctatgatgacattctcgctctggaatctggctgtgttgtaaaaaggaaactagtgtggaatgccagttccccaagcctgcagagtgcagatgctttcttgtcttggttctgtaactgaactgagtcattttctctaagccatggttcacacattagcaggctgaagccaatgtggtgaagtgtcttgcccagggccgccacagcagactgttcagtatttggaccatcagttcccaaagactgggaaactgtgggttaaatggcttcaaatggtgattatgtttctttcttttttttttttttcttttgtttaaccttgactgaagttctttgtctttttcgtgctgcatttccaaggaagatgtattaagcattctttcttctcctttttagtaagctgagaccaaattaataaaatctcagcaaatttagtcagattagcaaaaacctccctcaaaactcctagagattcggacaattgcttctagaacaacttcagtttccaaaatgacagccaggtgaccagaaatttgatccctctctttgaaagaggacctaagtttgtcctgctcaaacttggctgcatattagaatccctctgggagctttctttttgagacagggtctcactctgtggcccaggctggagtgcggtggaatgatctcagctcactgcaacctccaccttccaggctcgtgtgattcccccatctcagcctcccgagtagctgggactacaggaactcaccaccacacctagctaatttttgtattttttgtagagatggggtcttgccatgttgcccaggctggtctcaaactcctgggctcagctgatccatcccccttagcctcccaaagtgctgggattacaggcatgagccaccacacctggccactctaggagctttttaaagtcctgatgtccatgccatcctagaccagtttaatagtaatctccaggtgggggcccaagactcagcattcttttaaaactgtccaggtaattctaaagtacaacccagtgggacacagtggttctcaaccctgctgcctattacacatcagctggagatctgttaaaaaataccagtgtctgggccccacccctagagattccaattaattggtgtaaggtgaaacctctggtagctttgtttttttaactcctcaagtgattccgctacgcatctggtgttaaggaaagagctgttgttctcaaacttggtggtgggatcagaatcactgggaaatttagcttaaaaagaaaaaagttctatccaaccatcttacctaatgacaagtgccttggcttttcttgtgcctaattagctctccaggtgattctgatgcacacagaagtttgagaatcactgatgtagagggttttgttttttccacagaaaatgttagtttggccatctgagtacctacaaaaaaatctaaaatattaccctttaatctaggcctaacctgacctagggtgggcaaattgaaatgtaattagtgatgctctactcctgaggactgtgtaggtgtctgttgttacttttgcccacaaatgacaaactcatggttcctgaaaccatgcatttgaccagtgaacatcagcatcttcacttacccaaatggctcatcagaacagcaaactctccagctcaaatgatcacaaagtccttcaggcctgcactccaaggccagcatttttcattgaagtaatggaacagtcatgaggaaacttgtttctctgtcccacaaatgatttgataggcatcgagtttaaaatcctatttttttgtttttgttttttgagacagggtctcacactctgtcacccaggcagtggtgtgatcacagcttactgccatggagacagtgacctcctcctcccaaggagacctcccagactcagttaatcctcccatcttagccttgtgagtagctggaaccactggcacacaccaccacactcagctaaatgtttttattattattattttttgcagagacagggtctcaccatgttgaccaggctggtcttaaactcctgggctcaagcaatccgcccacctcggcttctcaaagtgctggaattacaggcatgagccaccacgcccgagcttagaatgctattctatgctgctttaatgtattgtctttagatgtgtggtacttttggttatgggaagaggtatttatatacttattatttttaatttttttaaataaatgaaaggacttccattttggggtctgaagagaatatagcactctggtgagcagtccccatagggttattgttctcagcctgatctacatgtttaactcacttggggaaatcttaaaaatcccaatgctgaaaatgctgaacttttctcaaaggattgtggtgaggatgtaagatttatataaatcacttaacatagagtctggagcactggggcacaacatacaacagccattatgagggagtacctggcacatagtagatactcactaacttaatttactgtggagaaaacagccaacagaattacgatcctacaatggaaaaaaaaaacaaatgtaaatgagtgtttgtacttttttaagaagtttgttttgcagctaaccttaaatgtctatagctttgcttagcccattcccataattcatgtcttctcactagtgtcacatacaaatttagcaccctagctagaattttctaaaagaattttccgtacagctaaggacttttcttttttaaaaaaaaaaaaaaaaaaagagagagagagagagagacaaaaaatttatttgttattctttatggaaatttttttttgttttttgtttttttttgagacagagtcttactctgtcgcccaggctggagtgcagtggcgcaatctcggctcactgcaagctccgtctcctgggttcaagccattctcctgcctcaacctcccgagtagctgggattacaggtgcctgccaccatgcccagctagtttttttgtattttttagtagagacgaggtttcacggtattagccaggatggtctcgatctcctgacctcgtgatccacctgcctcagcctcccaaagtgctgggactacaggcgtgagccacagcacccggccaggaaagatatttttaatgaagcagtaatctaaacataagatttgaagcaaacaattcgggcaaaaggaagtagatagtttttcatacaatctcttcctttctgcaatccctgataaaataagcatctttaaacatttgttgctatgattattattgttgcttaattttttaacaggcatcagttcctaggccagacaaggcaagggaccacaccacacagtattttcctgaatgcctagcgtcctgcaggatggaggacttagcatgatacaatcacatcatgtaggaagtcatagcagaaaatgggaggggaaacataccttcccactactgccaataaaatgtgtttaaaagcactggcttcccttaattcaatttcattttacttgcttggtgtcaaattgtgattttcaacattttttttttttgccaagatcctcttattttctcccaacacacacgtcccttgaaccccgtgctttcaaacattttacctgccaagccacttttatgaagtaatagcattcattgactggtttttaatcatcaaagacatatttggttactaatctgatgttttcaatgagcaggatgaaatgatcaatgttcccacgctatacagatgtatagaaaaatttctatatctttttcaaaaatctgaaggcatttttcatggaagtgtcacagactgcctcatattattgtacaacttcccttgggccttttcaaactttttaaatggctcatagtttcctctgacgctgcttttatagacctcaggttagaaacatttgaaaaagaaaattctgaatattcttgtaccccaattttctcaactctaagtaggattacattcttatattaattaaatattatattaatatcttataattcttataatatttattattttaatattataagagtgtaattcctacttagggttgagaaaactggggtacaaggactatggaaccataaatgaagccatcagaataccaattactgctggcattacctttcatcaaaaaagtctttcagtattattataaaatcattcttcaaagatttctatgtaaatgaatataaaatagcccatcgaactcagcaatgcataatgaaaatattcatgagaagtttaatcatttaacaccatgctctaaattagattaagaaattattgggataaatcagaacattcgtaaattctttaagtttctcaacagaaaattctaatacaatttaacatttttgagcatctcagatattacatactaaacatataaacatgactgagcaagagttcttgcctttgagaagctcatagtcaagagatcacagtttctaaacacagcaattcatatatttttttttttgaggcggagtctcgctctgtcaccaaggctggagtacagtggcacaatctcggctcactgcaagctccgcctcccaggttcaggccattctcctgcctcagcctccccagtagctgggactacaggtgccctccaccacgcccggctaattttttgtatttttttgagtagagacagggtttcaccatgttagccaggatggtctcgatctcctgacctcgtgatctgcctgccttggcctcccaaagtgctgggattactggccactgcgcccagccagcaattcatatttttaacatctgactcatggaagttcagcattggaaggaatcttagagaccatctagttcaatgccatgaaattacaggtggagaaacaaagcccattaacttgaagtaataaatgtgtggccctgcagcagtgcatcacccagacgattcagttgtttgccttcacacttctcacaccttaagcatccattgactctgactggatttttaaaatattgaatgatataaaagatagccaagctatttggaattgtaaagcgtctattagcaaaataatgctctccactgcaataaatgaaccccaaaatctcagtgacttagtacaacagaattttatttctaactcatgctaagtctagtaccacatgttcttggttggcaggtgacacttgtcaaggtcatttatggacccaggttctttccttcttacatccccatctacctctaggacttcagaattttctccactaaacagaggcaagagaaagacaatgaaacaaaacacataagaggtgtttcacaggccagacctggaaatagtgcccaatgctttcattcattctattggctagacctcagtcacatggccgtgtctcactgcaaggttgctgggaaatgcagtctagctgtgtgcccaggaagttaggagtatgcagattttgatgatgagtctgtgtcataaagggctatacaaatgcctaataacgttatggagatcagttcaggaagggcttgatctttacagtgaagtcatctttttgtttaaaaagtgtctgtttcagtcctctgaccctattccaggttttaccaacatctctagacaggggtaggatggtctgttttacccacctttcctggttgctgttggagttggcatggagtaatggaaagaaaacagactttggcgtcatgtgtccttgggttcaaatccccagttttccactaagtaaccttgtgacttggagcaagttgcgtaagcctcaattttctccttgtaaaatgggggcagatagcatcctagagttgtggtgtgaattaattaaatcatttagtaaacacttactgagagcctactacatgtcaagtcctatggtacactctggggaaatagcagagattttttttaaaggcacagagcctagattaataaatgatatatatacagttattgtcatgagaaagcactcagtaaatgttagtgctcttgcttttttgccctctatagctaagctgtgaagatatgttcatccctagaaattctagatagaataaactagtgaatgatggatctgtaagatggataggtcaagtggaaaacgtttcaaatgttaccattgttcctgttgtttgaaattgatttgatggggtgataatatttatgtctatgaaggatgtttaatttgcaagggcataaaacataatgatttgagctgcaaacaaatacttgttcagtcccaacaagagtaaacagaaacatcaaattggagagccctcttcaagactggtggcctttccattgctaagcctcctttacaaatgagatgaggagggtcttcagagatggtgaggaccatctctggttgcaggccaggttgcaggcttcctgaggaccagaagggcagtaaatttgcagcagcccctcctactcactgacagatcagaaggggcaagcaaggtccccaagagaaggaggataacaccaagtcggcatctcagccactgatgcagccttggtctttgggattcagagactggtgagggtttttgcctgaggaaaccggcaccttcggtgctctttgactccttcttgtctctcagcttttattgtttcctatgatttccaaatagagcagaggacctttatatttgttttgtttgatagcctgcctattttttcctctcttgcttcatgctttccaggaagctgttttatttctctttacttctcttttatctttttaccttaaatgcagaatagtctgggggagaaaaggggcacataatgaggatgatgggtcttcagaccaaagtacataccatcttgactccagctagccctgcaccagccattttatatgccctaaaccacagctgcattgctgacccctaatgccacagaagagctaaaggcacaggctttgtcacatccacctcaagtccattgtggctttacctcttcagctgtgaccttgggcaagtcgctttccctttcttaatactcagtttctttacctgtgaaacggagatgatcattacttatgtcagtattcatgtgagggtcaaaagaaataacagaatgtgcatagcatcatgtctagaaggtaggtagtgagcctctaataataaatgacaggtgccatcatcatgatcccccacagtgaccatatctgcaggccaaatgcaccaaccttgccagaaaagctgtgatgggaacaaatgcagctgtcttgttatcttgcttcaaacttagaggacacatttcacattccccattaaccaaatgccatccagttttcctgaacaacccattccacagctaaacactaaagagtcacaggtttggctcagaaatgagtcttctagtcgcactttccaggcctgatccttgagaattacccattaattttttaaatccctttagaatgtttgtgcagaagacaccactgaaagtctatgactaaagctcctggatcctttgctagggcctccctccacaatacatctgattgtattgtcgtctcctttccagataaggatttttccgaagatccttctatatgtggttcttctctaccctcttgtcttaggagaactggaaatattgaccagggctgggattagccttctctctgtttcaggcagggacagttctatccatgataagtttcctctccttccaaagtacacagtccatggcatgtttaattaatagagtcctgggtaagattccaactttccaagattaagaatgtgctttgcttcctgaccctgtcaagccccatcccttctcaagaattttccatgtgccacaaatcaactaaataaaggcttttgatctccacatgcactggccaagaggacaaaacctaaactggctacagtatgaggctcctggacctgggacagcttggcccagtccagtgataatttcaccaaacacacttcctaatcagttttctctgttcttctcttctctctctcagaaactcttgccatttaagggtctggtctacttggcacccttacagttttttgctgctgttctccactcccattgttcatgtcataccgtatcgccagagttgctcactccgcttaaagaatggcattgtttgccactccccaggggcacactggtttagaacgtctgccagttatcttggcagaaggaatcatctgaatgttttggctcaatattatttaatcctaaatagtcagctgctgccttaatcttgaggacaaattagatacagaagacagaggaatccagtaactgaaatgaggaggtcgcttcatctagatgagggctatttaccttcacccagctttctcccaggctgtctcagcactccctgtactatctggaaagcagctgatggacggttgtgttctgtgtcagcataatagcgggggatcaaggcttggttttgcctgtaactctccaagtggcctggatcaaaccatatcaccttcatgggtctcaattctcttttctttctttttttttttttttttttttttgagacggagtcgttctttgtcacccaggctggagtgcaatggtgcgatctcagctcactgcaacctccacctcccaagttcaagtgattttcctcagcctccggagtagctgggattacaggtgcccgccaccatgcctggctaattttcgtttcgttttttgttttattttgttgttttgagacggagtctagctctgtcacccaggctggagtgcaagggagcgatctcggctccctacaacctccgcctcccaggttcaagcgattcttctgcctcagcctcccaagtagctaggattgcaggcacctgccaccaagcctagctaattttttgtatttttagtagagatggggtttcattatgttgaccaggctggtctcgaactcctgacttcgtgatccacccacctcggcctcccaaagtgctgggattacaggcataagccaccatgcctggccaatttttgtatttttagtagagacagggtttcaccatgttggccaggctggtctctaactcctgacctcaggtgatccgcctgcctcagcctcccaaagtgctgggattacaggcgtgaaccaccgtgcccagcctcaatttccttttctataaataaagttgaactggtgtggtaataaggtcctttttagcctgcaaatattgtctgaattttattactcagagcccattgaactaggaccaattgatctggttaatttgcctctgaaactgggcatgaaatattgctgcacatcatcttagcatacatgtccctagatgagggtcggaaaaacaaagagtctgaagaacaagataaagacttcatgaagtcactccagtgtggcttagccaaggtaggatcactttggtttggcaccatcataagctggcaaaaagaatacaatcttcagtttctaagccttctcattttagaagacatctctgcagtgcatccccactgctcattattttttcaagctgtgtctgcttcacttgcttaagataaaagcctacacagtgtgccatccaaatataggtccacggcagtccagagagaagacagcctgaggtttacggtgacaggacattttgaatacctaacaaatgggctgtatcatatcaaagcccaccagtcaatattagcaatgaagggaaatgaaagtaaggtttgttgagggaacaggaagtttcctgtactgtttctccccttgctggaaagcaattgtgatcaataccaggtgcaaatcattgcttgtaagaaaaaagcattcatgattatatatcacaagcaccacatcacaaatatacttatgtgtattatgacttttaaaagggaatagtgctttataaatcccaccatcttttttttttttttttgagatggagtcttgctgttgcccaggctggagtgcagtggcgcgatcttagcttactgcaccctctgcctcccaggttcaagtgattctccggcctcagcctcccaagtagccaggactacaggcaacctaccgccacacctggctaatttttgtatttttagtagagacagggtttcactatattggccaggctggtctcgaactcctgacctcaggtattccacccgcttcagcctcccaaagtgctagcattacaggcatgagccaccgcacttggccccaccatcttttatatcttccaaaaacaaatgtccacattactatggaaccctcccaaaaactccattgattgaagctgactttccactcaattagtgaccatttaaaataggtttctgctagcactacacctgtcagtcattcataccttacttactgtcaaccagacattccctccgggaatcagtcatgctgactggtagaaaggagataacaggtgtaaattaggaactccagtgccaggtagcccagcgtcagaggatgaacgctttgaatcagaagcattggaaactcactaacctcacagtttctcagtctcagcactgttgacatttggggacagataattctttgtggtgggggctgtcgtgtgcagtctaagatgttgagcaacatccctggcgtgtacccactagatgccagtaacacacacactccaagttgtgaccaccaaaaaatgtctccagatattgccagctatgccccacagaagcaaaaaaaaaaaacaaacaaataaaccaacctgggtgagatccaccagccggggatctccccagccagggatccaattatttggatcgaacaaataatcttcacatgaagggaacatgcaggtatggaatttttcttccagagcagtttcctcactttggcagtttcctcccaccctccccatcttttcaactttctaggtaaatgtgtcctgagaattgaggcagttgtagatagggcctcccaggaagcaaattgccaattctccttggtgtagtaagcatggaccattttgcagcaccgtcccctgaacttgccacattgtcctaagtgaatataacaatgaaaatatacaagagaaacatgccacatttaggttggagagcattttgacatcaccgttttgttaattctgttctctccacagaagctgtcatctgtagacacgtatcagaacaaacagaataattgttaacagcacaatattttttcttattttggttactatttggtcagaaaatatctcaggccagactttcattactagaaatgtttgtatcttaagctgtgattttttttccaaaaattatgtcatttttttttaatattttaagttctagggtacatgtgcacaatgtgcagtttgttaattatgtatacatgtgccatcttggtgtgctgcacccattaacacgtcatttacattaggtatatctcctaatgctatccctccccgctccgcccaccctatgacaggccctggtgtgtgatgttcctcttcctgtgtccgagtgtactcattgttcaattcccacctttgagtgagaacatggggtgtttggttttttgtctttgtgatagtttgctgagaatatggtttccagcttcatccatgtccctacaaaggacatgaacttatccttttttatggctgcatagtgtaccatggtgtatatgtgccacattttcttaatccagtctatcattgatggacatttgggttggttccaagtctttgctattgtgaatagtgccacaatgaacatacgtgtgcatgtgtctttatagcagcatgatttataatcctttgggtatatacccagtaatgggatggctgggtcaaatagttctagatccttgaggaatcgccacactgtcttccacaatggttgaactagtttacagtcccaccaacactgtaaaagtgttcctatttctccacatccgctctagcatctgttgtttcctgaccttttaatgatcgccattctaactggtgtgagatggcatctcattgtggttttgatttgcatttctctgatggccagtgattatgagcattttttcatgtgcctgttggctgcaaaaatgtcttcttttgagaagagtctgttcatatccttcaaccactttttgatggggttgtttttttcttgtaagtttgagttctttgtagattctggatattagccctttgtcagatgcgtagattgcaaaaattttctaccattccataggttgcctgttcactctgatggtagtttctttgctgtgcagaagctctttagtttaattagaacccatttgtcaattttggatttgttgcttttggtgttttagacatgaagtccttgcccatgcctatgtcccgaatggcattgcctaggttttcttctagggtttttatggttttaggtctaacatttacgtctttaatccatcttgaattaatttttgtataaggtgtaaggaagggatccagtttcagctttctacatatggctacccagttttcccagcaccatttattaaatagggaatcctttccccattgcttgtttttgtcaggtttgtcaaagatcggatggttgtagatgtgtggtattatttctgagggctctgttctgttccattgatctatatctctgttttggtaccagtaccatgctgttttggttactgtagccttgtagtatagtttgaagccaggtagcgtgatgcctccagctttgttcttttggcttaggattgtcttggcaatgcgggctcttttttcgttccatatgaactttaaagtagtcttttccaattctgtgaagaaagtcattggtagcttgatggggatggcattgaatctataaattaccttaggcagtatggccattttcacaatattgattcttcctacccatgagcatggaatgttcttccatttgtttgtgtcctctttttttttttgttgagcaatggtttgtagttctccctgaagaggtccttcacatcccttgtaagttggattcctaggtattttattttcattgaagcaattgtgaattaaggttcactcatgatttggctctctgtttgtctgttattggtgtataggaatgcttgtgatttttgcacattgattttgtgtcctgaggctttgctgaagttgcttatcagcttaaggagattttgggctgagacgatggggttttctaaatatacaatcatgtcatctgcaaacagggacaatttgacttcctcttttcctaattgaataccatatatttctttctcctgcctgattgccctggccagaacttccaacactatgttgaataggagtggtgagagagggcatcgctgtcttgtgccagttttcaaagggaatgcttccagtttttgcccattcagtatgatattcgctgtgggtttgtcatagatagctggcagagtgcagctgtttctgacagtaagagtaggctcttttgctggctttggggtttctgcactatatgattgaggtataggaaggaaaaatggggaggaatggggctgtgcagctgggtaatgtgatgggtttcttggagctcagtctgaaggagacaagatgatgatgtctctcgcccccacctggatgtctgagctcttattattttgagatatgtcccatcagtacctaatttattgagagtttttagcatgaagggctgttgaattttgtcaaaggccttttctgcatctattgagataatcatgtggtttttgtcattggttctgtttatatgctggattatgtttattgatttgcgtaagttgaaccagccttgcatcccagggatgaagcccacttgatcatggtgggtaagctttttgatgcgctgctggattcagtttgcccgtattttattgaggatttttgcatcaatgttcatcagggatattggtctaaaattctctttttttgttgtgtctcggccaggctttggtatcaggatgatgctggcttcataaaataagttagggaggattccctctttttctattgattggaatagtttcagaaggaatggtaccagctcttccttgcacctctggtagaattcggctgtgaatccgtctggtcctggactttttttggttggtaggctattaattattgcctcaatttcagagcctgttattggtctattcagggattcaacttcctggtttagttcttgggagggtgtatgtgtccaggaatttatccatttcttctagattttctagtttatttgtgtagaggtttttatannnnnnnnnnnnnnnnnnnnnnnnnnnnnnnnnnnnnnnnnnnnnnnnnnnnnnnnnnnnnnnnnnnnnnnnnnnnnnnnnnnnnnnnnnnnnnnnnnnnnnnnnnnnnnnnnnnnnnnnnnnnnnnnnnnnnnnnnnnnnnnnnnnnnnnnnnnnnnnnnnnnnnnnnnnnnnnnnnnnnnnnnnnnnnnnnnnnnnnnnnnnnnnnnnnnnnnnnnnnnnnnnnnnnnnnnnnnnnnnnnnnnnnnnnnnnnnnnnnnnnnnnnnnnnnnnnnnnnnnnnnnnnnnnnnnnnnnnnnnnnnnnnnnnnnnnnnnnnnnnnnnnnnnnnnnnnnnnnnnnnnnnnnnnnnnnnnnnnnnnnnnnnnnnnnnnnnnnnnnnnnnnnnnnnnnnnnnnnnnnnnnnnnnnnnnnnnnnnnnnnnnnnnnnnnnnnnnnnnnnnnnnnnnnnnnnnnnnnnnnnnnnnnnnnnnnnnnnnnnnnnnnnnnnnnnnnnnnnnnnnnnnnnnnnnnnnnnnnnnnnnnnnnnnnnnnnnnnnnnnnnnnnnnnnnnnnnnnnnnnnnnnnnnnnnnnnnnnnnnnnnnnnnnnnnnnnnnnnnnnnnnnnnnnnnnnnnnnnnnnnnnnnnnnnnnnnnnnnnnnnnnnnnnnnnnnnnnnnnnnnnnnnnnnnnnnnnnnnnnnnnnnnnnnnnnnnnnnnnnnnnnnnnnnnnnnnnnnnnnnnnnnnnnnnnnnnnnnnnnnnnnnnnnnnnnnnnnnnnnnnnnnnnnnnnnnnnnnnnnnnnnnnnnnnnnnnnnnnnnnnnnnnnnnnnnnnnnnnnnnnnnnnnnnnnnnnnnnnnnnnnnnnnnnnnnnnnnnnnnnnnnnnnnnnnnnnnnnnnnnnnnnnnnnnnnnnnnnnnnnnnnnnnnnnnnnnnnnnnnnnnnnnnnnnnnnnnnnnnnnnnnnnnnnnnnnnnnnnnnnnnnnnnnnnnnnnnnnnnnnnnnnnnnnnnnnnnnnnnnnnnnnnnnnnnnnnnnnnnnnnnnnnnnnnnnnnnnnnnnnnnnnnnnnnnnnnnnnnnnnnnnnnnnnnnnnnnnnnnnnnnnnnnnnnnnnnnnnnnnnnnnnnnnnnnnnnnnnnnnnnnnnnnnnnnnnnnnnnnnnnnnnnnnnnnnnnnnnnnnnnnnnnnnnnnnnnnnnnnnnnnnnnnnnnntgctaggttggggaagttctcctggataatatgctgcagagtgttttccagcttggttccattctccccatcactttcaggtacaccaatcagatgtagatttggtcttttcatatagtcccatatttcctggaggctttgttcgtttctttttactcttttttctctaaacttctcttcttgcttcatttcattcatttgatcttcaatcactgataccctttcttccagttgatcgaatcggctactgaagcttgtgaattcgtcacgtagttcttgcgccatggttttccgctccatcgggtcatttaaggacttctctacactggtaattgtagttagccattcgtctaatcttttttcaaggtttttagcttctttgtgatgggttcaaatttcctcctttagctcagagaagtttgattgtctgaagccttcttctctcaacttgtcagagtcattctccaaccagctttgttccattgctggtgaggagctgtgttcctttggagggggagaggagctctgatatttagaattttcagcttttctgctctgttttttccccatctttgtggttttatctacctttggtctttgatgatggtgacgtacagatgggcttttggtgtggatgtcctttctgtttgttagttttccttctaccagtcaggaccctcagctgaaggtctgttggagtttgctagaggtccactctagaccctgtttgcctgggtatcagcagtgaaggctgcagaacagcaaatattgctgaacagcaaatgttgctgcctgatcattcctctggaagctttgtcttagagggttacccagccatgtgaggtgtcagtctgcccctactggggggtgcctcgcagtaaggctactcaggggtcggggacccacttgaggaggcagtctgtctgttttcagatatcaaactccatgcttggagaaccactactctcttcaaagctgtcagggacatttaagtctgcagaggtttctgctgccttttgttcagctatgccctgcccccagaggtagagtctacagaggcaggcaggcctccttgagcttgtggtgggctccgcccagttcgagcttcccggctgctttgtttacctactcaagcctcagcaatggcgggtgcccctcccccagccttgctgccaccttgcagtttgatctcagactgctgtgctagcaatgagcaaggctccgtgggcgtgggaccctccaagccaggcgtgggatataatctcctggtgtgccgtttgctaaggccattggaaaagtgcagtattagggtgggagtgatctgattttccaggtgccgtctgtcacagcttcccttggctaagaaacggaattccctgaccccctgtgcttcccgggtgaggtgatgccttgccctgcttcggctcacactcagtgggctgcacccactctcctgcacccactgtccgaaaagccccagtgagatgaacctggtacctcagttggaaatgcagaaatcacccatcttctgcgtcgctcatgctgggagctgtagactggagctgttcctattcagccatctgagaaccgccccaaaacttatgtctctcaacttcccaaacatcagtgttcagacactattgctccatgggtgaaatgagacaaccctattcatttagacataatgtcctttatatgcttttttaaaattttgagacaaggtcccactgtgtcacccaagctggagtgcagtgactcactgcaacctccacctcccaggctcaagcaatcctcccacctcagcctcctaagtggctgggaccacaggtgtgtgccaccacacccagctaattttttgtatttttggtagagatggggttttgccatgttgcccaggttggttttggactcctgagctcaagagagccacccactgcagcctcccaaagtgctgggattccaggcatgagccactgcgcccggctgggcttctaaagaaaaatgccctttcctccattcattttccaggagagattttgcttcttgaagtggtttttgctaaggaaatagatgaacctctctcaaagcaatagtcctgccgaaatggcccatagtaattacaagagttcccatttgccatcaggccagttgacccatcctgaggaagattccaagtgcagcacttccccttaaattacttttgtgactgtgacaaatgctttatctctgtgggctccaattgcctcacctgtagaagatagcaaaggtgttatgaaagtagctacctatttactatctgtaagtttgggtaacatcttttgctctctcagccaaggttttctcatctgtaaaatggggctaatcacagcatctcctccacaatgttgttgtagtgagtaaatgaaacagtaaatgaaatggcacatagtaggccctctataggcattgacgctcagtatcataaactcaaaattatccttttgtcagttctaaatgatttggcagctttttaaccttctagatggcagctaagaaacaaattgattcttcatgaccttggttgctttgtttttgccatctttttaagtttggccgtttggaggcagagccggtcataaatactaacctttttaaaaatcatcatcagcaaccagtatgggaaacagaatgcttccttgcacagctgtctcttgtttggttaatttactagatgaaaaaaaggagtcttaattacaaaaacagctcttagtatttgaggtgtagggttcaaatatcagaatttgaaacagcattgagattgagcaatgaatttttgttgtataccaaaaacgtatgttttcaattaaaagattatgggatgaagaatcacaagactcatcccagctcttcctccatctcagtcactttgagcaagaatgtgacctctctgagccatatttcagcccatggaatttagtttttgtttttgtttgcctgagatgatcatctaagccctccagtgttgacttcccataaagggtgtcgcatgctcagctaatcctacttgggcctggattctgattttgtcatttatccactgtgtgatcttgggcaagttgtttaacctctctgtgctccaggttcctcatacaaaaaatgagaataacagtctacttcatagagttatcatgaaaattaaatgaaaactgatcaaaatgagtgcctaacatatagtaagcataaataaaatgttagctattgcttttattattttgttggctgtctttagaggagaaaccgacaaaaaaaaatggaagtataatctgaaatcttggtgtttggatttttccattttatgaaccaaatttaccaaactaaccacttaggaaataaagacatcaaatacactgtcttttaatttctgcatgtataatttccctaacctacaattcatcaactactactttcccctctgatttctgaataggaaaatcatggctcttatcactatgtggtatatgttaaatcccaccaacatttcacttgggtaaccacatgtttaacaaattctgtctactttatatggagactgtgcccctagaacagaatgtctcaaacattaatgtgcatgtgagtcacatggggatcttgttaaaatgcagattgtgattcacctgttctggaggcagaaatcccacatttctaacaaattcccaggagatgctgatgctgcaggtccttagactgcactttgagtaacagggccgtagatattcacaagccatttgagcatggaggaggcagggggcacacctgacccaagtagagatcaagcagtagagatcaagcaggcctacaggaactcactgccagaccccctctccagccccaacctcgccaactctaatttaagaaattgaaatgtttcaggggaaaaataacaggaagatatggaaaagacagtcaaaaccctacctgcttctcttcattttcctaaacttaaaaaaaaaaaatcatagaatagattacaccaagcaatttgacccatctgcagttctaaattatcttccacaagacaggcacgtagaagacaatttaattctcccctctttactgttgggactgtatcagtgagatacaggtgctaaaatagaccctcctaggggagcattacataccctgcaggtacttaagtcataccactaaggcccatttcataaaatatgtttttggtgtatttaaaagtattctgtggacctgaaaatatcccaaaagcgcctgctctcaaggagatctcaccagtgtaaaaacctcacctgctattataaccaagaagatagctgtgcatgctgtggcagtgcttctattcctgaaccaaagaaaaaaccaaacttttccagattgaaatgtctcttccctaaaaactatctgccatgatcttgatcctatttatttttttacacataaaaattgaaaattagtctcacctgggtaccaaacaaagtgggaaattgtagtgagattctatgaaaacccagaggaggacctatatgttactctgctaacactagcatatatttgtgtggattttgttaatccctgagagtaatctgttgaaagaatatgggtgttttgctgccaagtactgagatttttacagggtgatgtataccattgatctaattacccaagtcatattttgtcttttatttgagaaattataaatcttaagttttgatttttgtccacaaatcataccctagtcctagtttccaaagtcagaaaagattcacgtgtattttctaccctgaaaaggggtatttcatgtttgggagcataaaatggggcgagtctcataaagatatcttgggtttttttgaaaaatgtgggttcagactggcatcaagaataaacattatgctctgaacttttgcacaggataaacctaatcctagcagtaaacatctgttcccttttatgtgcatttgtggctcgttaatatgaatgtttctgcaaccactgtagcttttctaatatcctaaatggaatctctgtggcctttagagtaattacctcaaagtttgagtcatccaacctaaggactctctgattaaatccggtatgaattatggaaaatcaaatgaccattcctgggggaggattccattgtgtcctccggaaagtattttcccagtgctcagggcctctggtcagtgttcagcagtcagcttgttcctatgtggttaaataattgtaagatgttgcctatgaacctggtcaccgccatgttttcatgcagccaaatgacatttacaccatggtctttgaacacacgttgttttgttttgctttttagttttgtttcaggctgcacttcagattaataagcatcctctataaatgttataaacacaaactttaaaattgttttaatggttttcatttatcaaaagattatcaatcattgtactttttagtttcagagtaattatttcaggtttctgcagtcatgatgattgtttttcattaggatagtgattgcctaatggaatatacaggaaaaccagagaagtgggagcagccagataaggaaaagatttgtttatctcctaacagctcccaaatctcacccacttaatggactgataatccccaccaatgaaataggagaagcactctgtgatagcaaacttaaattcacttgcacacggggacagaaaagcccagtctcaacaagagagaaaattaataggcaggtgctcagtaaaagaaagacaaaaccatttagcaatgaaaggcagcgtacttgaacaaagaggctaattttgcaagactttgcctaaaagaagatattctgaaggcatagtttatgtaaccggacaaaagttgaacatgggcctcagcagaccgtattgatcaagtctcaggagtgaagcagcagagttcttcttgagatgagtgcaccctgattagggatatcaaaacacattatctgagttagataaaataatgtatgaaaagtactttcggatgctatctggcatgtagtaggtgttcagttggtagtaattttaatttatggagcctagtctatgtagcctgacttaaataaatgctccataaatctgagctatcactaacattattatgattatgcccttcagctaccttgtacaaaataatgaatatggttccctccctttctcatccactctatcctcaattcccttaggagccagtggccaggaagacacaccctccccagctatgacccatgcctccatgagtctaacaatgaccagaatatttcactccattttgcaggcttaaattgttgagaataccaaagtaggatctgttcacagtctcaagagctatctaagtcttcattttgggaacactaacatacaccaacaagagctcagaaatgatcatgattgcatgagcttagaataaataagaaatgtattttaaaggaaaaagaactcaccacagactggaatagtaagggaaagctgtgtggataggactgaaactgagctgggagagtccagaatgttcgtgtaaattgagagaaaggggaagcatgagaatagatcctacaggctccttcccaccagttgagaattgtggatttggtctctgtaattactagtagttaaaaaaaaaagggggggggggcggggggagacactttgaacacttactgtatttctgcacaaggctagaccttgtccatgtgttggctcatgtattcttcacatcaacattgtgaagtactttcacaccaacactgtgaggtcctataacctataacgcttccatagcaattcttgaatgtagtaatagcagatttcctttagaaacagccaacaatttaacttttcactattttggagatgtctctcctcccttgtccgaatattccaaatttacaagtctcatggcatcagctggggcagagttcctgcagagacctacataaatggaagcgagcaggcactgcagcttcaggctactgttaaaagttcccaggccaggcaaagccacctgggtagattcaaaggcactgggaaacacaagccaggagcctgccctctggtgaccagctcaccccatcccagatgttagtggactaaccgattaagtcagtgtttcagaggtcttagaaagatggccttgagataccagctccggcatccgatacaaatgccaaagtaaaaacacggttggtttacacagcctgaggacaaggaagaataaagccatctagctgccctttctgtcttccctgctcacagagcttgtctaaggctatgctacagtatctgttgatggctgagctgccttttgttgcagaactttgatgctaaccagttatggctgactctgccttgcatagagcacattattgctcagtaaatagaaattcctaaatgaataaaaacctgtatgtgctctgttcagtttcggggtattttgatctgttcttattatgttcaattatttccaaataatatttattgaggtcccatcatgttatagcattgtgcttagacctgtggagattaagagatggatacattgattagagtccaataagagggaaaagggcgcatgtaccatttacatgatacaaggaggacatggtaagttcttgccttatagaagagacatagacaaatattatggataattcaggagagagattcaaagaggtagagcaatttgccccaaaccacagctaatatatggcagagtcagaatttgaaccttggcaagcagagcccatattcttacccactatcttttcctgcctctgaaaagcaaaataggtttcattttcaccagcacttctgggagaacaatcctattggtagtccatattgaattgcttgtaatgatgagtcctcctagcagaccagtggcttttggataagaaactgggcatgaattatgtccctaggaaatagttttgtgtttgcaaagttactggattatgtgcctaggaaatagttttctctttgcaaagttatgagaggacaataaatattacttcagatgttgtgctagccactatgagtgttaagaaaattatatacatgtatgtaaatggatatatcacaaggtagaaggtagcacatggaggagagagatacatggaaagtgggatggaagtttggagggtggatggattgcttcaagaaagcttaaatgatgaactagaccttgaaggttgagtaaggatcaaatgtgtgtcttcattgttatgttatttgagctaccaagctaatcaagccagataaaatgatggtcaggcaaacctaacaggaaatgctcacttcaccaaaattcttctcccatttgccttgcacagaatctaggaatccaattttagagatacattccttgggccatggcccaatgctttccaggcatcctctttaaaacacaacttctgctgtgaggtgactcatcccaggttcttagccattaatatagtggtatggagtcatttatgaaattcttttttttggggtggggggaatgctctttaaaaatcatgtttagaggagaagagtttggagagtaaggcaagggaagagaggtcatgtggatgcataagtgaagaacttacaattagtgcatgcttacaatgtgcaggacactgttctaagacctttttatatataaacctatttggtcatcaaaacaatagtatattcccattttacagaaaacccacatctctaaagttccagaagcaactttttttatttttatttttatttttttggcctctctaatgaccacctctcacgaggctaccaagaaatataagggatgagccattccttcaaatggcttctggactaggtcaaagtttacagtccttggcaaccagaagcaactttaactgaactatagaaggtcaggtcaggttttagagtcagaagacctgggtttgagtccagttccatcatgtacatccacatcactttctaaattcagtttccacacatgtaaaacagggatgataattctgtccacattccccacccccatacaaattttgccaagcacctgttattcataaggctcttttgcaagtgctagagacacagtaatgaccacaacagtgctcatccctatttctgtcatgcttacatttccagtgaggacagacaaaacagttcccattggtgacaagtatgatgaagaacctaaagtaagatgatagagagaaaatggttggagagctggtcaggaaaggcctccctcaaacctcaatgacagggagctggtgatataaggatttggacaggggcactgcagcataggaaagagcttctgcaagatgctgctgtgggaatgggcttcctatgttagaggcagcccatgtggctggaggatagagagaagggggcagagccatgggtgaggagctcagccagagggaggctcagtggggccttgaggccactgtaaggcctgaagattttattctaatattggtgggaagtcatcagattattttaagaaccagagaaatacactcttatttatacttttaaatgctcactctggctgctctgtggaaaatagattataagtggctgagagcaaaagcaaggagacttgttatgaatataaatgagtaacaggaaaattaaatgaggtagtaagtacaatttctaaagaactttcaaagcacaaataaaacaatagctattaataggtcaattactactcatcaaactaagggcgataaggagaacatatcggttaatagcacaaaaggcaaagaggagcaggtgaagtgcttctcttaattttaggttccttgtcagttaagcagtatatattccctggatgtttgtgaagataaagtgtctagctcagttcctggctcatagtaaatgctcaaccaaacattattctcctgtcctgcacgattctaaaaaaaaatcagttgaggcgtacatagtctgagaattcagcaaggctaaaacttatgggttgaagtaaaaaaattaaaatggaaatttgaggcttcatacctaatagtctgatgctacacaatgataattctacacactctctgggtttacaaagcacgttttatacacacacccctaatgcagaatatggtttgcagtcagtctcagtacctaatattaatggccttttaatgcaagctaaactcttgcaatgagtgccatgaaatcccagcctacgcagcttaccccttctgaccactttgtcataatcctatttcctttgctttagctcttttctaaggtatcagctcgctcttgtgtcctgaaatacttgaatattttaatctaattctcccttctttgatggacagatttattttctatcatctttaatgaaatatccagagataggatgtaagtagttatgttaatgcgatttatgtttgtttctcttttgcaaaagaacactttggatcagtgttgtgtcaatcaaagccatcagaatgatggtcatcgaatgcaaacctaatcattcaagcctaaactcccttgagacacacaagccaatgcagttcacatgtccctatctagttattattttattttgttctacttatttttaattcaccataactaattaaattgattaattgtgttgatgtctagaatgtgaagtattgaaagccagatgttagctgggattcattaaagagtaaacggttcataatttatatgaataacaagatatgatcgtttctagaatgctcgttttttaaaaaaaatattacttctactactgtgtgcattgtgtcccagataatgctcagaacaacaggcttttatttttaattttttatttatttcaataggtttttggggaacatgtggtgtttggtttcatgaataagttcttcagtggtgatttctgagattttggtgcacccaccacctgagcagtgtacactgtacccaatgtgtagtcttttatccctcatcaccctgaccctttctgaagtccccaaagtccaatgtatcattcttatgcctttgcatcctcatagcccagctcccacacatgagtgaaaacgtatgatgtttggttttccattcctgagttacttcacttagaataatagtctccacttgcatccaggttgctatgaatgtcattatttcattcttttttatgtctgagtagtattccatggtgtatacatatatatcacattttctttatccatgagttgattgatgggcatttgggctggttccatatttttgcaattgcaatttgtgctgttataaacatgtgtgtgcaaatgtctttttcatataatgacttcttttcctctgggtagatacctagtagtaggattggtggatcaaacggtagacccacttttagttctttaaggaatctccacactgttttccaagtgacaacaggctttttgagtaaatacttatttacatccatacctgcaatctgagtaaatacttatttacatccatacctgcaatctacaagataatatctaattaacacctgacttttaaggcgtcactcagtagacctcaaaacaatggatgactttttgaatgataatgaaaatttactctgaggttgtgtaaaatattggagtctgaagaaactacacgcttattcaaaatctgtcactaatttattttcttaccttaaatttatcttaaccctgtggatctcaaactctgttgggtatcagaatcacctggagaacttgatagatctatgcatgcccacaccctatccaaatttcaaaaagcctggtcttcagtgttgtttaatagtgcctcaggtgatactgatacacatcaaactttgagaatcactgacttaaccttttgggatgttaatctccctaaaaagaaatatcccatttgtgtgagctttgaaggaacaaaaggatatgggcattagacataggaaattactgaagaccattattgccaaccacaggtatgtggaggtaacttgcagttctcaccaacaacagtatatccagtaggtagaattcaaggaccccagtgtcatgggagtctcatccttccttgggaatggcataggaattgcatgttgcccctctgttcttgcgaggatcagaatcaagaatcctccttaaataaattcctgttgagttttctcatgacccaaccgggacttctcagtctccaggtttcccagcagtgccccaaccaataaacctgccagttaagcaactgaatatcattattacgaatgtaattacagacagtaattatgagcttgtaattgcctcccatgaatgaagcccttttcccaaaccatctcagctgcttttctttggaaaatgaaagcaatcctatcccttaccacaccccaagtgtagccttccttgcttagaaaaaaaccccttcttgctggcccaagggacatggtaagcaagctttaataggctgcactttaaggggcaatgtcctcttggagtggagcccctgttagcatctctcagccaagcattgtttccctagggagtaatgactacccagtttggctgtttttcttaatttctgtggggtcaagggaattaataccaaattttaggaattttctgcagaaaaatcacatcttaaaggcttttcaaaatagtttgagaactttaaccttatttaaattaagctttgcgagatgcaatttgctgaggatttagagtatctgaaaataaagcagacaccataaaaacatgtgtgctgagaagaattttcatgtctgtagaaataaaatcaatctcattaggcccagaattaacccctgcccccagtaactttatatttagctcatgaaaaacctcaagcccttatggataaaggtacttgaatgagttacacatggatatgtttagctcgaaatgcaatacgatctttcaagatctcaatctgttgttgccttttaatggctactgagaataagtgcctgtaattgcaccagtagctagcacagtcgaaagtggtagaagtccacacctttttgatttaccatgcaatgaataatgccatataaactctgaaaaggaagaatctatgtttatataatgtgcctaatacaatgcttagcacagccctttgcatacagtgaattttcagagctcttctctgaataagatcaaatgttacacccaaaagctagcacagtgtacaatttttaaaaggagacttattgcttactggccaaagtaagctatttcaagccacagcatttccatttactatgacaaaggaatcgtgtgttgattgttactttgttactattgttcatggttttctcctggagtagaaatacaatgtgcatgggcattggcattttctcatagtaatatgaaaacccggaagggtaaatgcaactttcaaaagtgactgagtaatttacacttttagagaaaccatcctaaccaacattagctgaagacatctggtagctttcgagagggtgcttatgaaaacctaaagcatttttaaccctcatgttaaataatttaaaattcactttaaatgtttgaaagtcagcttaaaattcagtgtgctgtgcacaggtcaggatagacatgtctctctaagccccagggatatgggtatccatggtcttctcgtaatttcactgttaaaaaaaattcacatataaatttgtgaattatgatcactttaaaaagaccatataaactctgaaaaggaggactcacatatttatattatattttttctaattttgacaaacagtagcttaagaatttctgaaaatatggatgaccagatggattgtttttttaatgtgtacaacatgcatacaaatatgtatatatatatatattagcttgctcatttttgctctctatatccatgtgcagtaaagatatttaaggaagtaaaatttgccaccagggaaggttagtgtcagaaatttttcatcatattattacattttttcccattttctgtaggccagaccctcaagtccctataaattgaatagaaaaaatatatataatatacataaataattaaccagctgtactccaaagaatttaagttcatcattctatcattagggctcttaatttgtcccacacctaaagcactatctgctttccttcatcggttcttattgccaacttgggactgtactgaagccctttacaaaacttctatttgtaagattcccttctttttttttttttctttttgtaggccatcagaggtagaaggtggtaaaaacagagttgccactctcggtgtggccacgtgagcacgtcccacttaagtaacagggtgtccctcaggtcagcttgtgataaaacccaagtcaaacaaggctgaatcctgggtgttttatgtcctaaggatctgaaaagtgttcacggccagccctgaccctcaagacctcaaatggtcatctaagcagtaacgtaaattggtgtgtaaacttgctcctgggccattgctgtggaagtgggactggcgaaagtacagccttgccatgcaggaactaatgtctttctaggcatttaaaataagggggaatgtgttgattactccgacaggcaacccaactgcagtggctaaatgcccaaggctgacaaattctgcatcttatcactcccgtcaagtggcatgtgaatactgtcagcccaaaagaattgagaaacaacttgccttccaaaactctgcatctcagcaaaatcttgacaatgccaacagctcgtcatctcgtgtttttcaaccctttagaaaatggccttacagcctgggacaaaccgaagcactgtccagaccgagaacacgactggaagctagtaggaatgtctgaagcctgcctacataggaagagccattcagagaggcgcagcacgttgaaaaatgaacagtcgtcgccacatctcatccagaccacttggactagctcaatattccatctggaccatgatgatgtgaacgaccagagtgtctcaagtgcccagaccttccaaacggaggagaagaaatgtaaaggtaaccagatttttattagcccattatcatgtgtttcaacaagaaaaaaaatatccctgttgtagctgtgtacttcatctacatttctcttccaatgtatggtgtcccatgttttctccaactgttcttttactaggcgtccttttcttcaaatattcttttaaacataaataaataagtggaatccaaagaaaggcagcttgtttcggtttcacgttgtgctgggacacttggggtgaagacatttttacttctctaattagtagaggggttgtaagttttggctttaattccatttttgggtctgagtagaaacaggcatcgctgtatttttatgaagtcttgctttaaagtgtgtctgtgcatgtgtacatttcttttcccaagtgtgccagtagctaatgggatctcaatgcctacctttaacctagacaattcatgctcaaatgagaggttttaagttgttgtcttctactcattaaatccttgtgtcatcatcctgaaaggagagattatggtgttaggaggttgtcacctcataaggcaaaaaaaacattaaactggcctaagttcctgattgcattagatttaactgttctttacctcaggtcgcctccaccctgacagatgtctttgtgctgatcgctttattgtcttagggctccccaaaatctttgcttcttaaatcaatttgtgtctttcaatgtccaagagatcaatttgcatctttaaatgtctaagttcatttaatttcccattctttttcagtttagtggtttttcttttttaaaagaaaagggggggtctatttagtttttctttgaggattgtgactcatggtaaagttttaaattgtgttttgaaaatctcacaatcatataccaaaacataataaagtttgcaaagactcccatttacaaggcatgaaggacttacacagctgctctactttgaacatatacacatgattatatttatccttcatataaaagaactggtcttttaggttttctgaaaatgctttgaaagctcctgggaattaccagtttacctgggaaattgagtgtttcagttggaaatagagttattcaaaagtaatagtgaaatagtgttctgagctctgatttgagtgcagtcaaaactatacatgtccctttggaaaggtttgtatttggactctctttctctcatatatatatatatatatatatatatttgaggagatctgagaaattgaaagggctatatagaaaaaaaagcaaaataaagtttttcaaaggagtcaggatgtaggacgtatgtgtgtgtgtgtgcacgtgtgtgcgtgcgcaaaatacatttgtttgcaatacaattgagatttacttttagcgtatgtggccagattgtatctcaacattgtatgggctggcactaaaaccatgtcagtttacggtgaaacgccaacagaaaactctagcatccttgtgatctaataatgtcataaacccaatttgattcactcacaattgataccaatattcattcatttattcattcatagagtccatctatgtctctatcaatcatttaaaataaatctatgcatcttaaaagcaaaaggaaacagtctctgtttgaatacaagatgcttagtagagtggttaagaccacaaatatttgagactgatctatttgagctagaatcctagcctttctactttctgtccttgagcaaacttataagattgttaatacaattaaataagatgatgtatttaagcatttagcaaagtacctgacttatagtgctctctgaatagcaactgtcattattattgtgatccttattattaggtatgcattattaagtcatataaatactttgaactatgctgtgagcctggtaagaaatgaagcaagaggagaatttcagatagatgtggggtaggacatgaggcttcagggacgttagagttgataatttattttgcattcattcaactctttttcactgaaagtcagagatgtaatgagaaaatataattaaattattaaagtccttcctcaagatcctaatattaacaggaaaacagctaaaataactctcccatgttttccagagtaaccaccagggtccaccttgacataggcatgaggcaatgccttggttcagcataaaaatgccaccaggaaacctatgtcatcttggtccaagaaacttataaataccattcattcaaaatgggcacatgtgttgagtgaggcagcagtgagtccaggacagcaacaagattatacagtctttccttatagagttggttctccatctgctctgcttgtcagctctatatagttactatgaagagagttatattttgatgttcatccatgttgggcatttatttcctagatggctgtgtatcccacaagaatgcttgacatctcagtcttgggctagtaatctatgcattcactcatcggtgtttattgagtgcctactgtatacaggatattgcccttgatgtccaagcataagaaaatggcagcagggccaaaaggacatccaactagccctattccaaggaccccatgtagaaatgatacgaacaaaatagtcctgaggatacaaaagttaattctgcacaacaggatccaaagaacaaattgacttccttgaagctgtgcagtgagcccatctgccagatcagtcatctagccaggctagaccagtgcacttctaagcgtggtttggggactggcactcttctgcaaagtggttattaccatttctattgatgcaaatacagaaactgagagtaagctttaggaacttttatagcagtttgacattgccactggcatccaaatgcatgatcagtgaattcatttcactgaacaggatatagacagttagttggggattgtcaaacttgcctggtcagtcacatgtggtttgaactatgtaaaagtcctgtgcagtagaaccatgtattgctccataatggaccagatttttaaaatagtctttcacttcaaatagttgatagtactctaaatattgtttctttagggttttgggtagctatctaaggttttgtttttcattttgttctgaatactgctttttttttttttttttttttttgaaatggagtcttgctctgttgcccaggatggagtgcagtggcgcaatctcggctcactgcaacctctacctcccaggttcaagcaattctcctgcctcagcctcctgagtagctgggattacaagcatgcaccacatgcccagctaatttttgtatttttagtagagacaggatttcgccatgttggccaggcaggtctcaaactcctgagctcaggtgatccacccacctcagcctcccaaagtggtgagattacaggcatgagccactgcacccggccttactgcttttattttaacctgcatatacctatgcttctgtctgctgtaagcatcctaagtgaattaattggtaacacatttaattagaatgagagctatggaagagcccttacattctgttgcagatctcacaacagatctctgttgaatctgctggagtatcagaggctattttaaccaggagcaagtgacccattcccttctgcaactcaccccacccacccacacccgctctttccatgccacacttccttggcactttaatcacaatttgaaccaattgctcagccataaggaccacatcctactccttgtcctcctcctcccttcccagtctgagacgatatatccagtgctactgaaagtgtggtagtaccaatcagtggcactaggagaacctggagcttggtagaaataagattctcaggccccacccagactactgaatctctagagaggggcccagccttctatgttcttgccagcccagtgcagattcttaatacctgggtatcatgacgagcttgaaaatactcttcaactcgttgcacaggaaagggtctgccacctggtgggcacttaggaaatgtgcatttttcttcccttccctgactgcacgtggggagccacttgagtccctccattcttggttgggcctgtctttgggcctagcttatctcaattgccagctggaaggtctgcttagtcactgcctaataacagatcaccctgggacttgagcccttctgagaaccccacactgtttgactggggccctgatcctcccctgaagtcttacaaggcttcacccctctaccctctcatgccctactgtacttctctctgggaaccacagggtctccccagtcccacaaggatgggctctagacggatgcatggatccctggagctggacctaaccagccctgctgaacccaggcagtcaggcctttacacttttatgtcaatcagggaccttcctgaaacagtgaaacccaaggggagaaacaaggcagggactcacccacctccctggtggactcagaaaaaggagagcagccatcagtgatctcacagaaatgtctctgtgcttaatatttttaaaactgattctcagatacccaggaaggcaagagggaatcagttaaaataattttaagaacaagttacttcctctcattataaaagcctatatatgttcatggtagaaaaaaaatttctacaaatttttaaaattgcaaataatgttttaaaatcagttgaagttctattccccaagggtaagcactgcacattcttattacatttcagtcttttctctgtgcatgtgtattttttataaacctgggatcatactaggcataccattttaaccagcttttaatgcctagcaatatatcatgaacattttcccatgtcattaaatattctgagtcctgactttcattggctatagattattcttgtttatagatgtatcataatttattaaaccagtcctcaagatttagacaagttaaagtaattttttaaacaatatcttatgtcagcaaaggggaaaactattaattcatgctcttcataaagacaaaaaaaatgaatcaaatcagtgatgacaatttcaaatgatgtgccattctcatttaccaaaataacaaagtgtcttaaaagttggagacataaatgcaagtcattgtgtgcattataatccttcatgttagacattcacattttcagcagatgattgctatctttgtccttaagtaaaatacaagggcatctccaggtgaatgagtattttaaaaggtggaggattaaaaagcttgtgcccttccgccagtactaccatctgctccatccatctctgctctctactctgccccactcatcatacatcaggatctgcagtcccaactgagagtgccagtgattcttatacctcaagggcactctgggaaccttagcaatcaacatgagaacgatggctctctccccactgtgggcatatgtcagatagctgtgtgatttgatacttcaaaggcagggacgagtaccccatacgtatactggggcagacagaaatagaaagccaagggggagaaaagctactcacgagattggagggaagaaaaaacaaaaaactggaaacagcaatgtcaaagggaggtagatatcagaaattcaaggccctggttcatctaacttcagttttcgttgagatgcacacagagcagaggatggaccaccccacgctttccaaggccaactgaacagtgtctgtcacgccaaaggatgcagacgtacccaaccatacctctcatcatactctgtcccagggaaatacttacacagggcacaagtctgttcaaacatgttctttgcatctttgttttttgttactgataaactggaagcgatctaaatgtctgtccactggggaatgttccaataaattgtggtacatccaaagcattcaccagaaaaattaaaaacaggcttttttaaaagaagtgattttaggaatacttattgaaagtaagcatgcattaagaatagtgtaatcccatttataacgttaaaagtctatataattgtgtgtttacaaatgtgcacagaaaaaagttcccagatatacatcaaacttgtttcagtagataccttagaaaagggcggaataagaaggattaactccatatgcaaccacattcaaaaatctttacaagaacgtattaataaatattaatgaatgtattaatgaataatgatgtgcataaatttgtttaatgttattatcatatgctttacagttaggcttcagtttatttcttgctctttaaatcatcagctcagggaaaattttttaacctctgtaaccctcagtccatttagttttaaacagaggaataatatctagctttcagatttgttgtaaagatgaaagatatttcaatgaaggatttaatttaaaaaaaaaaaaaaaaaagatgaaaggccaggcgccgtcgctcacacctgtaatcccaacactttgggaggccgaggcaggtggatcacttgaggtcaggagtttcaagaccagcctggccaacatgatgaaaccctgtctctacaaaaaatacaaaaaaaaattagctggggatggtggcgtgtgcctgtaatcccagctactcaggaggccgaggcaggagaagcgcttggaacccaggaggcagaggttgcagtgagccaagatagcgccattgcactccagcctgggcgacagagtgagactctgtctcaaaaaaaaaaaaaaaagaaaagaaaaaagaaaaagaagaaaagaaaaaagatgaaagataatatgtataaagcccccaacatagtgcctgacacttaggagagactaaacaatgataactgttcttagaatataaacacacctcttagccttgtgcccacctcctccagtttttgccaccctttctgaccttgaaatacattgaactatataaaaataaatgaagggacgccaaacaaaacatcatgtgcacagctctagtagaggcataaacagttgaaaaaaaagtccatagcaacaaccaaagtattttttttctcagactcttttaaaatttaaaactttaaataagaaatcaaggggaaaatgaagtagctgaactggaattctaactcaggcaatctggccccagggtcagagctctctacagttataatcccctatgactttaaagggtaagaacattccagacccaaaggaaagaatttgaaactgcagaggaaatactgctctactgtcaggtaaagatgcagggtggtcagacttgctgtgatgggagcagtagaggtcagcacgtatctacttatacagtccgaggtcatattctggtgctgccatttaccagccattgaaacttgggcaagtcactttgtttgagcctcagttttctcgtctgtaaaatgtggaccctctttcacagaattgtggaaagaaacaagctcttaaatgatctcatgggacacagtgagtgctcaatagatgggagttatttttcttacaatgagccagaaagactatgagaaccacattggacattaggaatgcagaatgcccacgtcagaataatcactatattgtggctggcaggattgaagtttctaaagccaggaatattacggacgcaggcagaacagatgtaatagccaaatcccttgactcttccatcaggtagttttcagacaaaatcagatacaagtggattgctaatgtacctagcactgaagttggaaaggtattattgggagggtcagccttacaaagacatcgtaggtgatcactggaattcagtctttcccttccccaggacatctcctacaagttgccctgaatgcttataattctatcattgcccttccattgtggtctttcttttttttgtttgtttttttgttttgttttgtttttgaaacggagtctcactctgtcgcccaggctggagtgcagtggcgcaatctcggctcactgcaagctccacctcccgggttcacgccattctcctgcctcagcctcccgagtatctgggactacaggcgcccgccaccacgcccggctaactttttgtatttttagtagagatggggtttcactgtgttagccaggatggtctcgatctcctgaactcgtgatccgcccaccttggcctcccaaagtgctgggattacaggcacgagccaccgcacctggccccactgtggtctttcaaaacgcaaacttactggctgaatatcttatcaagtcattagcttctccaaatggatgaattggataagattccttttactcttgacagggtccaataaagacaatggaaagaatgggactagaaggaggccatgaacagggtaaggatagcaagggataagagagaaggaaaagaataataataaggaacaggactgccaagtaacaagtaatactgtgcagcttgtcaggttgtgagcagcactcacttcattgtcaaggctctaaagacaaatgtcacctatctcattgtttgtcaagggctgaccctgagcgtaggtttaaactacaaagagtttccagccaaatctagacaaatgtgtgaatgacgtaatgatcataggctatcaagatatccccaaaggcctcaccttacacagctggcctgctgcatcgtatcttagggattttgcccagcacttagtaaacacataggagaatgtttagaacagatgaccattggttcttggctttgacgcttaccagctatttaaccttggctaaatcaataattctctccaacaaagaatgtagtcagagattaactgaccacaaagaaatcaaatagatgaatctacactccatttttaaagtggccctccaatatgataatcatattttcccttgtggggaagacaaggaaaaatatattaaatcattaccagccccctaaaacaagctatgatcatcatgaaaacataagaccagttccaggataagttgggaaatcagttgccttaaaccatctctttcagtgtccttacttcccttgaggatatctttttcccaggaaaataggagtcttcaggctatccaaacccattttcagtctctacgaagtctaggcttcttccctcttcacattctgaaaacattctcattttccataaaaaaaacttattcccctgaaggtgttggtgaccagtactgacttacatccttacctctccagggcagggaggctttgagttttgagtactcctggagatgcagcgacctcatgccaaaggtagcctctgatagtggcattgcagtctaggaagcacatacatgggggaaccgtatcacctgtgcttacaacctgccctggcatagggctggtttatctctccagttattctattctgtggctaattctgtgagttgtatttacagattggtctttcaggtcttggccagttcagccttcttgattgaactggaataaatatgagcctctatccacactgcccgggtcccagaaattcagaaacagctgagcttttcaagtaagattagagtcagaaattctccaaggtccagagctattctccatggcactgacctgacataggattattatatattgtgaacctctgtccccatgacatttgtcagtatgggcttatataagggacttgactttattcaactttactgccttttaaaatacagagctgtgctgcatatgtgactgtttaactcaattgtctatatgataaagacacttggcatttgagtcagaatatcatgtgtgggttgatggtttattagtctagactgcaatattctatgacttgcagattgtaccccaaccacccatagttgcctcagacatctagtacagctataaaggccatactattttagttaagcctcaggactaatgaaaagatatgtattcagctctttgtttgcctagttctggaaataacttcttataataagactaagatataaaactaaaggtcaaaactgtgtaagtaaaagaagctactgccctttaagggaaaaataatacatgttaatttttgcagcaatttcaattgaatgggtttccagggaaacaggtatctgcaatgggttcatcccacttaatatttaagacaaaacatagggaatttctttcttgttatcttttccttgttatcttacacacgacatgctcattcttaaatttcctttgaagcgatcattctatgcttgagtcttatttgttctcccaaaaaaagaaatgaatgcccgttctatgatttttttaagactttttgatatcaggaatataagcctggtgatcactactaaaaaataaaattatgcaaatcaatctgacccccttttttaatgaatcaaaagctatttgttattacttgttttattgaaaatctgcttactttctgagttggattctgtttctaagagttgaagtggaaaaataaaattggtggcaaaggaccactaagtcttcaaggttgagtaaattgtacgttttcttggaagagctcctcaggcagacctataaattcctttttatattttgttctaaattaatctcaggtttaccaaaaagttgtaatagtgcaaataattcccatacccctcacctggattcaccaattgttaacattttaccatatttcttttctcattctctgtatgtgtttgtttgcatatatacatattattattatgtcatttgcaaaccatatgagagtaagttataaacatcatgcccttttaactctaaatacctgctaaaactaaggaaattatcttaggacacatcagaattgggaagtttaacattgatgcctactattttctaatctacagactttatttacattttacaaattatccttcctgccacccccttggagggggagttgagatgaggaccagagctggagagaggacttgtctctaagaggttttcacaggcttcattcctctagatagggctgggagaggccaccaccaattgtcctctataccaatcttattttccggtctgggatccaggccaggatcattcattttatttatttattttttatctctttagtctgcttcttcctcccaccacctgtgcagctttattagagtataatggacaaataaaaattgtatgtatttatcatgtacatgttatgttttgccacattatacagctttaaattattaaatcaagctaattaacatatctatcacctatatccttatcattttttgtggtgagaacattttagcaatatctaactgaaattatgtaccctttgacgaacatctatctgttctacctaccctccccgctgcagaccttagttatcaccattctactctagtctgcttcgatttcagctttttccattccacatatagtggagatcatggagtgtttttctttctgtgcctggcctatttcacttagcataatgtcctccaggttcatgttagtctggaaccgtttcacagtttttctttgtcgttcacaccattgaagaaatatttcttgacaaaatacaggctgattattattttggaatgtcccttaatttaagtttgatggatgtttcctcatgattttttttagacaaggtctcactttgttgcccaagctggagtgcagtggtgagctaatagctcactgcagccctgaactcctggcctaaagtgatttacccaccttggcctcctttgctctgggttacaggcatgagccaccgcacccagcctttcctcatgattagaatcagattatacattttggacagagatactaaaaaattgtatgatacggtgtttgttcctataaaattttgaatttaattatatgatgcagaaatagttttcaatcttccaaaccacttatatcttagtgtgagcaggcctagatctttactggtgagctggctcattatcttactgggttagaagaaagtatattttctaaagtcctctaataagcagctattcaatgctctaaaggtgaatgtcagaagaaaaagttacttgtttctctgtcccctgtgacatttttaaggttggactcataggatgatacttacctagggaacacctttctccataataggggcaaagagcacattgtccacggtctgaagacttttctgaagattaaaaaaaagacacagccactttattctcgtctcatattttaactaaacattcttttctttccacaatccaatcatattacattacaaaacaactaagatcagagtatgtcttgataaccttgatatttattgtgtaactttctagaacattttgacatttgaaataaaatgaagaatttcaatttgccatttctggatttggatctcaagggcaccaacatgaagtagatcctatttttgcaaacttttacaaatcctttttctctactcatccttcaaggcccaattcagacatcgcttcctctgtgcgcccccatgccccatcagaatgaatttggatttttgtttttaatgctgtgatgaaattttgtacaagtattcattgtgttctgccttatttaattgtggcttctgaacatgcctgtttgattcactgcagatggtgaattcgtcataatttatactgacaatgttttaaattgagtgtgttctgtgtgtccaatactgtactatatgctgagaataaaaagttaaatgcacaccccttttttcataggatttttcaaacagaaaatgttggcagagcttcgagtctaggcttgcaatgagcagtaactctgttgacaaccaagcgatgatgaaaattctattggctggctggcatttgtcttaggaaagaataatgaagaatgtaacctacgttgtttcaaaaataatgattccattttactccatgttcacttaacacttgaagtattcagtgtgtgggatactgttttctgcttgctgataggtatttttagtttgattgcaaatttcagagtcagggccaggtcttccttctatagtgtatctccattagatctgggagaataacatacatggtattgatacataaatgatgtaaactttattttattttgagaatcagtcttaattaactcaagctgtttgtagccctgcatctatttttgtaaagcttcactgagatataatttacatgccatcaaattcccctgttttaagtgtatagttcaatgattgttagtatatttacagaggcatgcaaccatcatcaggatcttattttggaacatttccatcatcccaaaagaaactttgagtcgtttacagttactccccattcctgtgcccagcctctggcaaccatttttctttcagtccctgtagatttgccttttctgaagcttaacaaaagtggaatgctacaatacgtggtcttgtatgactggcatctttctcttagtatactgtttttgagattcacccacaatgtagcatgtatcagtactttgaactttttaccttttattatttttataacattttcaagtataatgtaggactggagcctttactgacaaagaataaatcttttgaaactacatcagttgtggcatagtctaaattttgcactagttgttcttaagggtgaaaaagcaaagtaaatgcaggtgattcaattgttcattcattattcctattattagggaaatttgttttaaaattaatctctgacatgctattctgggataaagaaagtatactgtagctgttaaatgtcaaaattattccacttaaacaaccactcaacttttcacatcaagtcgatcattgtgaattacagtgaaataattatcttaacacattaaggggaaacatatctactttatctaatgattaaattaaaaaatacattaaatgagttgctatgtgaaattcaagcaaaacataaatgatatttataaaaacaaaatatcgaagagcatttttttctagagatataaggaaacatattgactataataaatatacaatgtgacattaaattaagcacatctttggaaaaacagataaatcattgaagtgatcttagaatttgtgttgaaacacattattagtcacccagaaattcaaaaacaataaaataattttccacttagaaaagcatagcgtggaagtgggaaaagtgatttctagaatagtaacttgagggcctaaatttcaatactaaccttttccctttgtaattatgtacagtaagaaaagcacccctcagttttccactgtgcaaaatgaatggaaataccttcccaagcaatcttattgtttataaagacaccatgcaatagacctcatcattattatgtagccaattgtctaattaaaggtacaccaaaactgaaatatttttgcatttttttatgccatgatattcaagccacatcagactatattagattcattaaggttggttttgaatcaaatgttcatttataaaaaagagcagacattccactgttggcttagcaaatagaagacttcaatgatgataacagtggtctgaagtatatttcaaatttttcacttttctttcaatctccagccttacgaatactattctgttcacttttgtatatgtgcatttttcttttggtgtggatcctgagctctttttgaatagtatctcattctctcaaagcacaagaagactttatgatttgcctttggtcttcttgggaaatatcagtcagaataaaacccttgatcgttatcccagagttcttatgtgaaagacactatgctaggactccagtctttaatcagcactgttccatccactggaaatactatgcaagaaagggcttggaatagtaaaaacgtgtctgggaattttggaccctacaacccattacttgaaaacttaaatggaacaaatcttgaatttaggctgaaatcagactatatattgtttctcaatatgcagaagaggatttcatggactaaacatccagcaaagattgtttagtaattttctgagtgtataaattcccttgtctgacatgattaagtttctggactcatcaaagaggacagatgacaaaccacgaagaatcactgcatgtcagtcactatagccctacagtttcccagactccagcgtaagctgctaaatggcataagggcagcaaaacagagacataccattttggacataaatatggtatttgcatgcattgagaataccacttatcagtcttatgactgtgggcaagttatggaacctctctgagtctcagtttccttatctctaaaacaggaacagtcatatctacaagcaggattgctgtgaggcttaaatgatataatctataggaaagtggttagcacagtgcatgggccactgtacgcaggaaactgtgtgtgaccaagccagagagatgctgttcaacaaaactgcaaatggccagcattcaggtcatatgagaaagtggcaagagataagagtagaaagtagtcaggagctacattgcaaaagacttctaagtctttaagctttatcttaaaaactaaagattattgcaagctaggattggggttgtgggaggggtaacaggtgacatgctttagattctcctttaaaatcaattcccctagctgcaacgtggtggatgaatggaaagatcagagtaagatgagaggtatagaaacctcttgggttagccaagttttctcttaaaaatgaaatgattagtttaattaaaatagtaacagcatagaatagttggccctttgtgactagaggctgtggcaaagctacagagagataagcaagctgtaacgaaaagtccaagtatgtaatttctacttgaacagatctggatttgaatcctcactcttcaaattaccattgtgccacttcagacaaatagattttttttcatctattaaaaaaatgtggctacattaggacaaatacctaatgcatgcccggcttaacacgtagatgacaggttgataggtgcagcaaaccaccatggcacatgtatacctatgtaacctgcacgttctgcacatgtatcccagaacatgaagtaaaataaaaattttttttaaaatgtggccagtcatagctgctgtaggactattgtgatgtttaaataagatgatgcatataaacacccaacacagaatctgacacactgagtttacaattggtatgtgaggtaccttggcatccacagaaaggggtttggtaggtggctggaatgcaggtctggaaggcacaagagagattaagcaccatctgcacacgggcaatagctgaagctgtagacactgatggcttcacctggaagaatatgtatggttagaagagggctgagaatagaaccaaagttatggccaattgtaaaagacagatgaggagatcatcccttgaagatgactgaaaagaactgtccagggatagaggagacatgtgggaaaaggctgtatgacatggaggtttctggtataccatcaataggtttggctgtggagttgggtggaagcagagagcttgtgctgttgtgatagtattatgtccaaagacccaaaaatgtcagatatcactgctcctgttgacagtctggagtgacagtgataaagtttgttgtgtattatggtactggtagtgcatggtcaccaaaactcaaagtagaggccaggaaaattgagctgcattggccacatggagcacgccgttcttcctagcctaattaggcctaaaacattttagatcaaggacaaagtcaatacacctgccaggaccaggagaaaaccaacagaagaagacagaagttttgagaatccagggctcaaggtaacagccagtgatgctagaaaagttgacacagactagctagagcaacttcagcctttactaagacagtggttctcaaacttcggctagtatcagaatcccctggagggcttgctgtccccaccccccagagtttacgatccagttggtctggggtgggctgcagaatttgcatttctaagaagttccaggatatgctaatgctgctggttcagaaaccaccatttgagaatcactgacctaagaattttggactcttttataatctttgtggaaccacaaaaggctgttctttttaacttgctcatcctagaaattgacatatttcatctagtaaaaggctgctgtagctaagtttgtggtatcttttgcattaatgtgctgaggcaattattccacctttgtgaaataaaacatgcaactccaaaatttagacccacaaagagggtgtccaggttgaggaagccaccaggactgccttgatgagagtctcttgccctttggaaatctctcagttcaattattgggcctgcttccatcagcttggtccctgagactgtcttgttcctgcttcaatgttctaatcagagccaatttttttccactgcaccagatcagaatccattcccttttcactagtaaaacactgtcactttttcaagcacatttttgtaaaagcatattctgcttggtgatcgattgtgaacaaaagtctccccttagtgcccttttgtagagctgtaatgggctagaactatcaaaagcttttatgaaatgccaagggaaaaaattagaaacaaattcagttaacaatatgttttaaaagagaagagctttgagtttctattcctactgaaacacacttaattcaagagcccaagaggccctggtcttgtcctgtgcccacctggggatttgcatttccatgtgtccagcctgcctcttctggccggcagctttcctcgttggtaaagaccctaaaaaggacactccccttcagcagatttcttctctctgttcttggtgtgtaatctgagaaatgcactgttatgtatccgtgccttaagctccagcatatatatccaacagagcagatgactaggtttttcaaagtatgtttcatggaacacttgtaacaaatgttacaagatacacacagggttctatgatcagaaatgtttaggaaatgctgttatacaaagtcattcaaagttgtgtgtgtgtgaatctccaagagaggagcattaatgtgtcatttcccaaactcatttgattataaagtttatttttattgttttctctttagatcatctcttgggactgtattatgggaccacttagggaacaccatctgaatattaacccagtagccatggtgttcatttattaagaattacaccattacagtagtggtaggggaggaggagccatgctaattaacactcccaggactgaggaagtaaaagtttctaaaatggttagagttttgcatgatctagtgactcaaggctttatattatttggcagaaatgctgaggagggacagtcaatccccaggcctaagacaagttcctttactccctttcctccacagcacctttttaaccctagaacactaggcccaggtgggaaaataaaggccccacctacaataggagaaatgatacagtcaaagcaggagtgggtcacggcctcaacggctaccacctaccatgtgacaagtcacttcatccccttgggattcagttttctcataatcagataaaatacatgtggaatgcatagctcagaagttcctgctgtaatatcctaggatcctaagaaaacataaaacaggtctcagcctccataagtgttccatatgtgttagcgtctggagggagggctgctttaaagttgggtgctccggaagtcccaggagcttgccctgctcacatctctggagttgaactgatttgaagtccttttcaaaagcaatgagtccgaagattccagacctcaacaatccaagaaagcatggtcaaaaagtttttgtgcacctctttggtttccgccaaaatgtattagatgtgctttcagcacttcagtggtaagatcgagactcatgcttctttacatttttaaaggaaactttcctcaatttgagtagttacttcaaagggcagcaaatgtctcaatcctttttatcatctcttttggggcagagatgattggcactgatgatggttacttgtaattccataacctcaactgaggtaagtttaataaacagctctatctctgttctcttgtgacgaagatataaaagaacaaactggatcgattttagacagacagatatctcccagaaactttcaagcctaagataatccacttattgaaatatgtaacattttatcttttttttttttaaatgcacatggattttggtgcagagagtcctccatcttttttctgagagagcaagtgttgttatgtatatgaagagtgtcagggctttcaggcctctgatggtatcaagaggttcctgacacacaaaatgtcacttaggctccatccaaacaaatgagaagggctctgtcctgtgaagagctaaagggaggaatatatcagacagacagaagaacatgtgcagcgtccttgaattgaggcaggcaaaaacttggagtgctcaaggaataataaggatgctattttggtttatgtcaaggaagcaggagggttgataagtagtggggaaggaccaccttttggtagaggtttggattttgttctaaatacagtacaaagccactgaaggttttaaacaaggaagaaacattatctgatttgcagcctgtaaaacatcactctttggtggctgtgtcaagaaaatattaaagtgggccaaagctaatgagaaagccagaagggagtccagttaggagatgatgatggattggactgcgagatggcagcggagagaaggaagtagttggattaaacatatattttggaggaagaaccaatgaacttgctaatggattggatttaggtagtgaagggaagaaaagagttgtcttgaaggttatttgcttaagctcccaggtggatggtggtgccaagatgggactactgtgagaggaacaggttttagaaagaattaagttggagatgccctggttgggcaaatggagatgtcaagttgatggttggatataggatcctggtttcagaggtgacatctgcgatggagatatccacatggatgttgcatataattagtatttaaagctgtgagacaggatgagatcagctagagcagggcttggcaaactttttctccaaaataccaggtggtaaatattttcagcaggctataaggtctctcttgcaactactcaactctgccatggtagcacaaaagcagccacaggcaatatgtaacaaataaaagctgtattccagtaaactttatttacgaaacaggtggtgggtcatgtttggcccacaggctgaagattgctgacctctgacctagagtatagactgagaagtagcccaagacaagacctaagagatatatattataatatatatatataatatatattattataattattatgtatatataattatgtcacttactaggccagtcatcattctaagtgctttacttatataaactcacttaatcttcacaataaccaatgaagtgactaccgttatctgttttacaaataagaaaactgtgacctaaataagtttatttctgtctcgagaaaaaaagaagtccagaagttggcagtccagtgctagtatggcaattctgtgtatttcagcaacctagaattttccagatcattcttccgtaatccctagagtatagtcctcactctcatggaccaaaatgatggctggggctccagtcattgcagggagcagaaagtcaaaacaaagtagaggcaaatggaatgcaccagttgtcttttaatgtgtcttttaagtttcctagaaattgccttgcaacacttcttctattacatctcgttggccagaagttagtcacacagacacatattgacaaaggggaaactgggacgtatagtttttttctcaggggccatgagcccaactaaaatttagcggttcaattactaaaacagaaagtgagaacaatcattagagtggaagttaaaaggctctgaccagttgctttaaagcttatcaattatctttctttatgtgtatttttgcaagtacagttagttgatagcacccttcctaagacatttctgctcagccatttcatatcttaggcctccactgatgatgtcctacatactcttccagctcactggtcacctcttctgtgaagccatccctggcactctaggcagattactcctgtgtccccatgccaagtttattacacttctccttgtatttcgttctttcctagcgtgcctccttttgtgctgcctcctctgcttgactggttaactcaaaggcaggtgaagcctggttgaagtgtggagggtaaattgctaagaactaagggaaatatgtagtgaagctgcaaatgaagaaaaaggagttagtacacaggatttcctgctccttggtgaagggactggggtcagacacctagtagaacaagtggttctcaaatgttgctacttatgtaaataacctcaggaacttcttttaaaaatcttgatgctaaagtttcacccataattattaaagcggactttctataagtcacacctaggcgcatatatatatatatatatattattgattgaaacacttctaatcggaattattaaagtcctcctgagtttatttaaggcagttggatgcactataagtgaaataactcttaagctgctctttaaataattagagcaggcaatcaagaaaataagacaacaacgtcactgaagcttaccccatttgtgacacataatatgtttagattgctttactgactttacaaagaagcatgcaagactgaatcacaggtgacagatgtgattgcttctatcaggatgtgaggggccatatttcaaattcaatgtaagtgttgagctccattttcaactaatagtaatgaaagttttgtgcattcgttacaagtaaagagtattcccacttggtatgaggagtgtttcagaatgttttgttctcttttctccaaacaataaacattcgtgaggaagtgagctctcttaaatatgttttgaaactttttttaatttaaagatttctgagggaattcaggattttttaaattcaataaaaatactgttgacctttctgacgtttagtaaaaagagagagaaagtttttcagcagctattctttcctttttcactgcagtatttatatccagttccaggggagaataactctccaatttttcaagcatatttagagatttctgaaaattatttttaagtattcctttggaataaaagttgagtctctgattttcgttgatattgttactgatgaaaagcaagaaattgcttggatttctgcctttaatgagaaagagagggagccaggaaatgcactgggcaaaactgcaaaatcgaatggattcaacacgcagctcttaaccagaaaaagagactttggaacatgtgcatttgccaaaaaagaaaactgctttattgaaaggttaattttcagattaggcttgggaaatttgagataaataaatgacatcagacaaaaaaacataaggcctggatcctttttcctggggttttcagaaaatagttattgcttccaatgaaatgttttgacatttccagtagggagaaaatgttaattgtaatattgtgtatgtgttcttagtaacactgaataaatctttcatttgttttaatggtaatcagaaagtaaaaacacgattaaaatgttagctgtgttctttattccttatggtaacttttcatgctttctaggatattgtgattcattttccaggttcaaatatataccaactgacgaacatgcttttgcttgttttatatcagttgcagtttttaaaggagtcttattactatcctccacataggtctgcctgggtctcttttctaattttgtcacatctttagctcattctacaattccccaccttttcccttgagtctatggctcctttactacatttataaaaagtcagcaattaaagacagcacaatggtggtccacttgactgtatatttaatatacatgctattaagctacttattgacagagacggtgattttttttttctgaacagccatctctgtagccaccaactccttgctttgtacttaacagacaccccataatttgttgaatgactgtaataccctccttacttctgccatatgtccctgtcccagaattccacgttgcaattgatgactggagctacatgtccaaagcaaaggtctcactgttgaaaattacagtattacattgttgatggtcctttagagacaaataccaacaaggtcacatgctcatggaccagcaggaagccaaatgtaaacgtaaccacctgaggccgagccctgaaaacaagctgcctaagaaacggaaggaatccctagtgtagaagagcagcatccgcccttcctgatgtcatgatctacaactatgcatatatgtgacatgcacacactggccaccatccacagggagaaaataccattagtaatcatcctagcaagcattcacaatctaatttggtatttgttaactccttagttaaaagatatgatgattcttacagaaaatgctgttccctttttgatcactatctttaagtaagtacatgaataccacttaaatcacattaaatcttgaaaataatctcaaaagcagatttgaatgggaataaagtggtaagtgtttacagttttccacgcactactgatcagagtactgttaagcaccaacagaaaaggaaagctgctatataataggggtattcctcatataggggcattggcatacagtctctcatgcctttataaagaaaacataaattacagaattgaacagttaatgtaagctttaggtctcatgtagattagtgcttatgaagtagaaaataatcatgcgcaaggaacagaataaaactcacttgcagacatcagcagcattttcaaccgtgtacttccttggcatgttttaaaaaccagcgggacctatgtgtcatgggaagatggttggatcctagtatgaaaacccagtcagtaacattcaacaacagattcaaccaccaatatttgcacagctagattaatgttttggagtcagtcagtcatcaggctcattactactggattttctctggttcatgctaataaactagattattgattttaggattttctttgtatccaaggatattctctaagatgtctttataatgtttcatgcttaagctgtcaaccaaaatgacataacaatgagtaatcgttttataatcatgttgaaaggggttaaaaacagcatataaaatgcatcttagcagcttcagagtaacattctcgctgtcacttccctatctgggtggaggtcattcctacctgcctgccatcttccccaggaattaactagctgcatgcacagcttaagacctttgatagtcataaatctgctttccaatatgtttggatggcagaagagctcaaaagacacctcggtctaaataggattttagcacatcaggtgctattacaaagtaaagcaggctgggttgctgtgttggtggtggtgtttattcatcttcccttcgcgtttcatgtgtatgtatgtatgcttctctgcgtatatgcccagctctcagggtgtatggggctggagaatgcatgcgtagactgtgtgtatatgtaaactagaaactgaaccagggaaacaaaatgaactactgtatgcaagaaatatatgaagtgcacccagctgccggcagcaattgctacatgcagtccactgattattacgcgtattttgaagatagtccgggttacagcggttgcgatgctcaggctgtgcccagtaacaacatatatatggaacaggcctgggcagtgaatcagccttatacctgtagttaccctggaaacatgtttaaaagcaaggactctgacttggacatggccctgaatcaatacagccaacctgaatatttcactgaagaaaagcctactttttctcaagtgcagtcgccatcgtattctcaaaaaaaaggtagggaccattttgcttaaatttgttcaaagtttcactgtttgttttcgtttcattttaaagttacagtttacatcagcttcgtcaaatctttgaatttgaacgctaaatatttgaaattaaaaacggcagtaagaggggttgctaggtgattgaaggactctgtgaacatcaagatttccaagcactttttttcttcatctttgaaagctggagtgagttgcctttctgtattttgcatgtgtgtgtatatattgcccaaagtgactattgttggcttctttgcgaaagaaaatatgtgaaaggtttccttctggcgggtaggtgttgtggtgtttgaagtgagataattctctctagttcaggttcagattaaaaactcatttgacttttccttggcacttcattttgaaagtttattttagttgactagttaactagtaaaatatttagtgatttagtgatttctttaacagtactatactaatgttgatttgctaggatctgtaaatgttcattttaatgtatttatttatccatgtaaacagtaaagaatctatttgtaaccatgtcaaactgtaagatgtaaaactcaaaaactgagaaactttactttgctattttgtccctaaagttgaacatgtctgtaatcatatcaagtgaattctctttatgaaagcaagtgaaacacacttcaaaatagccaatattaaaaccagtacgatatccatttatcttaatagacactgtggctttataatgctatttaaatttctgtcaatagaacatttcttgtattactgaaaaataagatactgaaaaataaaataagggaggcaaacaggtagaacattaagtagcaactgccagataggaatgcttttgaagatagtgtaaatgctagtgcagatatgccagaatctcatgcttttgtatataatctataggatattgcatagagaaccaaatttacgagtttctataatttacaaaaacatgatgccctttgatcctcaaaggtaaatttctctgttaaattaatcttaaaacataatgtggtttatttagttgtggtttctataaaatttatcatttgcttttcttaatgtgactttataattgaaagtagtctgttatgaaaacaaatgaacaaaattttataaaaacaaaaactagaatctgtaatttttactatatataatgttattctataacttccaatcatgaaatattaaggggattacagcatgaaatatatttagagtttctcatcttgatttttatttataaatatagagttttgcatccttttgaaggtcatcagaatctcatttattacaagggatacacagggtaagtcccctaatggaaacatttgaggtacattgaacatgtgctatttcatttaatagtataagtaatttaactttgaaaagaagaaattaacattgcctcattaaacatacttggatatgccttttgtagtgttgtaagaaaatattggtacctgtcaatctatgtgctcattctgctgttcttaaaaattcctgcagaacgtttcaggctcttttctcttttatcttttcactgtattttcttcaaccaacactggggaatatttgcttataaaatgttaaaccaggggttctttattaattaatttgatgcatgaactaaaggaaaagacacattgtatgcatatattgatgtaatttcaaagccatatgtcattgaaaggccaccgccacctgccaaactcactaaatcaaaacaggcaaatattcttaaatgcaccattatttacttttacaagtcttcgagtaaatcccagtaaaactaaacccagctgttaactgtctcttaggacaaaaggttgtacccaacatgtttatccatattgatccactattgatttttgttgtgttgaatgacatcagtagtgtctcgttaaggcaaaattaagaccataaacaggtgttcagtggggtaggcctcattttccaattggatttttatctattcacaatagataaaagttcataattgcttcatctgtgttcatggctgtcattacagctttataaactccaatactgcagctgtgttaactttttctttatttttttaaggatggcttatttcctagcctttattttctaatatacagagaatcttgtaaaaaaaaattacaatcttataaaaaaattataggtacaaactggtgaaataaaggaaggctacactacccaatgttaagaatggttatcttaattggtagactttagaataacttttagtttcccttggattgtttttctacaaagtttttttttttcttttgcattcatagccgacagaataagttatcaagttctggaagcattaagaacacgaactaaggaagagtcagatgtcagttcattgaatcacatttaaaataaagcttcaagaattgaggaggggaaaaccgatgtaattttcacattgaggaggcctaaaatgcagaatgtaatgtctgtcttatttttcatatggattatgaaaaaacaaatttttaattttcaaaagttagggacaaatgaaaagaaccctatcattcactcagaagatatgatatttactgtaattctagtgacatagctgtgaaatgctatgctaagtcctcacggggccagtgctggctgcacacttctggcccctgcaaattcaggagaagaaggcagtaagtttggaatcagatggaggagaattggcagacaggttatttgttgtgctttctgctctgtggctgaggttgcagcaaagtaaaaagttgacttttttttctcttttctttctttaaaaaaaaaaaaaaatccttttgtgggtggaagtgctagctgtttccatcacaaatactaatcacattccgaagttcccgaacagcctgcatctgcatctggctgctctgaaggcagctttgcaggtcaacctctcgatttagtctggaccagccgggtctgttgaaacagaaaccttcctaggagtctgccctgggcgactctcctccacgggattctttgcttgaccttctacatgccatcttacttgataggaattgcatgtttgaaaagttgtcagagatgcttatcatgtcccaagagaataagaatttgcctggttttaagccaggatcgaggagatgggggtggnnnnnnnnnnnnnnnnnnnngggtgggggagggttgtcctattcagttttggttctgattgtatatgttgttgctctacaaccacatttttaattgtgcaggaataaaaattaataactgaagcagaaactccacacaggactgtgctttctgaatctgctttcattgttcctctgacttggagatagaattctgtctgtgtgtgtgtgtgtgtgtgtgtgtgtgtgtgtgtgtgtgttctgtagctctgttgactccaggtgaacaattacataggcatttgaaatgaaaattaagtagcaaattggggaatgtttctttctcaagctttcctttcctttccttcttcctctccctctgtctctctctcctactttccctccatctctttcttcctctatcttctctttctctccctctctctcccatccttattcttcccctatacttgaattttttaatttaaacacagatgtgatcagtccacccagtgaactgttgagtactaaataaataatctcttttaaatgtaatagttaagtggttaatgcaatcatagatttttcaacaatgcgtatgtaacttaaggacgctgatggaaagttaggattttaaattaggtactgccacacacatgctgttcagagaaaacaccactccagaaaacaataccacaacttttaaaaatacagaacatattcactgtacaaaaggttaaatgaaagtgcctcttggcacccagaaatgaaagcaaagtaaggagcaataatcgtttccaaaccaagtccaagtgcagacaaaagcgtgagctctttccttttctttcctgagaattaactgtctcgtcaaagacatgtccttcagagatttcactgaatgccctaacctcatccagagcatgcactgcccttactcacaatgaaagctaacagtaggagtccaaagcattatgagcaaatggattcagacgcctggcaggcttacagaggaatggtgagactgctgactttctgcatatggagttcatatccaccacctcacatgcctccatggatactttttcatagtcaagcacaacacttttttctcagcactcaagtgcattcagcctgaagtcaagccgcttcccgccctaccacccactctggtccagcttttatgatcccatcatcttatgggtccttggcttcaccggtgcccacttggttatctgtattcttcctgtttccagagcattgggaatgctgaccttcccgtgcgctgtccttggtacttccctctcatcagctccctcggtaccagctgttgtagagaatttcctcagctctcttggagactcccagaatgtgcttttgagcagtcaccccacacacctgctttccttatccgcagatacctcccgccatgttttcctgcctttcttccctccaggttcaccctctcttgcttaaagccttctgcttccagccactcaggggcagttcttccccatcctctgcaccaccacagggctccgtctcaaggtttggggcccttttccattaccacaaattccaccaactcttccctgccctcaagagttcaattttgattctggctttgtgcttttacccacaccctctgttccagaaaccttggccagtctccccatgggttcctctctctgtcaccctagtctccatccctgaaccagtatgctttcttccagctgtcacccactgccagccacaccctggtgggccaccttgccactgtcagcctgcatcactttatgtcaccaactcagctcacagcccaccagcctcttctattacccagcaacacattctctcatcacccccgctcccaaccagccctgccttcaaaggcagatatcctttgttttatacaatagctctgaatcatttgtgtaaaccacctttgaaaagtaatatattatatataaagtatattagactagggtttcttaaccttggcactattgacattggggccatataattctttgttgtgatggttgtcctgtgcattgtaggacgtttagcatcattcctggtccctcttcccactggacaccagtagcaaacacacacacacacacacacacacacacacacagcagttgtggcaaccaaaaatgtctccagacttcgccaaatgtcccctgggaggcaaaatcatccccactcgaggaccactgcattaatggtgaagaacttactacttggagaatatctgaagtaaaggatctttcataaaggatttcttataatgttaaaatccctcctccatttccaaatatcatatttaagtgttcatatattgacgtctgtcaaaatggagtacacctgaacctacataaccatatatacgtgcaacataacacatacatatgtgtcatagctcatttccattgttgggatttgggttcccctcatcatgtttgcttatttatatcaaatctatctagatcataagcactacgaaagcatcaatctcttttattttgcactccctaaagcgcacatccatgtgactgcaggatacacctgcagggagagcagtatagctcataacgacagtgacggtgttctgatgacaaatgcaacagctccttcccttttatgtatgtttatgtaacataaggctgaagggctgctagcccacatttttagagctataaccttgaatcccattctgaatggattttcaggtaaagaaatgacacttgtttttctcaaggattcaggatatgacataactgtgggtgcctctgcatgagcccaaagctataaattgcttctcacagcaaaatcagaggcaactatcacccttctctagtgactgtttctgctccctcccctaatcttctgatgactttgccttcctgctttctaattcatgccgtcttttaaaacaggaaatgatctcatcaataccagggttctacaactccaatgcccccaagtatgcgagagagagagagagagagagagagagagaggaagagctgtcttacaatggctgcttaatttaaatttttcaacaaagacacataatgcttacataatatatgataagaatacttctcacttccatgaagaaatatgttctcaggccgggagcagtggctcacgcctataatcccagcaccttgggaggccgaggcaggtagactacctgagatcaggatttcgagaccagcctggccaacatgacaaaaccccgtctctactaaaaataacaaataatagctgggcgtggtggcaggcacctgtaatcccagtgactcaggaggctgaggcaggagaatcacttgaacccaggaggtggaagctgcagcgagccgagatcgtgccattgcactccagcctggtcaacaagagtgaaactcgtcccccacccccccccaaaaaaaaaaaaagttatcatttttctcaaactacttttgtttttccactcttgataaagataaagaattatgtgaaatatttctttatttatgaaaaggcataatgcaagaacaaaaataaatagcaactgatgcacacaatcaggagaggttctgactgtggagcctaaaaaggatgtccgtttcttgggaggtagggctacctttctagttcagttgatcgttacactgtgagaatttgggttcagtattgccagttcctcctgtttttcacatgaagcaagaattctgtatgttttatgaaatttcctagttttaaaaatttgctacgatttttaaaaacactctgcaagccaaatgttgtagactgccagaatgtgtgcccttttgattaacattccaactcaaacgcattatatcaacgtattccctttcttagtggtttgcatcttcaagtgttttccctctaattgtagattgaaaggttatgtcagctattaaggatctgaatgtacagggacggcaaaaggaacatttcactaggtacttcttatacattaaactatactatgcccaaacctggccctaaaaattaaaaaataggctgagcactgtggctcatgcctgtagtcccaacactctgggaggccaagacgggaggctggtttgaaccaggagctcaagaccagcctgggaaacatagcaagaccccatctctacgaaacaacttcaaaattagccaggtgtggtgaccatgcacctgtagtcccagctactcaggaagctgagctgggaggactgcttgggcccaggagttcaaggctccagtgagccatggtcatgccactgcactccagtccgggtgacagaagtgagtccctgtctcaaaaaataaaagttaaaaaaaattgtaatttaaaaatatgtcttagtttcaggaattcttgaatcagaagaaatgatccaaaactcatgttgtccctttttctgcactaaagcctccgatgagaatccagggtcctttggcctcatatcctcatccccttttctagattgacacctctacttggtcctcctgctcgcccctcctccgcccaccagtgcttcagtgttcaaagcctggcgagccattgtctgctgtcccccaacaccagggcccagccagccagagggcaaagtgtaaagaaagagactccaagactccaagcaggggtaggcagggtgggaaaacagtggatgttctgaggaaagattgtgaattgtgtgaagtgggagcccctggggcagctctgctaataatttgcagagggcaatggatgaaggcctccaaagttaatgctgtttcaagtttgtaccaagtgtcttccacacagtacacccatacatgctgttaaataaacaaatggatgaatgcatggtttaatttaatatagtgtctatcacagggttaaagattaacatgatataaagcttggtacctaatgccaagaattaaatataaaaggaatcaggattcgtatgttggggaaaggctaaaggataaccctttcaaggtttttaagtttgtcaagaaatgacatagggaaggtgctggtggggaaaacaagcttaaatcatcaggtctgagctgcaggatgaactgaggaggttcagtataaaatcagaagagtgactaagcatgctagtgacttagcttcctgaagggtgacaaaatacagtctcatcctctatcccgtcccaagatcagatacctactggctctgagttgatagctctacaagatgaatcagcaacatggaacttcttcacttctctgagctacccaaagtatttcccactaccgcaaaccacagcccctcccttaagatgccaggactggttctgctaggcaagtggtcttatacagatgataagatttgccagtttggaaaagatctctgaactcagctcttctcacatgctgctacttctgctctcctaggcagcaccttatattttagatctactttcaagattaatctgctttatattctattccctaagggccatgtatctgccaaggtgacaagaggaaccagtgtttctcctcctaggacctgagatgctgttataattcactcaaaagaattaaactagccagccttctgatcttgcccatagggaagaaagcattgaatctgttttcaaccaagaaggcaagcttactacctgttgcatcctttgtagtgcaaatgtacaaaactttccccttctacatgacaagtcgctcagagaatattttttaaatagcattaactgtaagatattcaagataatacttagcaattaaccagacattgccaaatgtcaactgaaaaaatctcaagtcctttgttgaacagatggagtttgcttttataaaaatatgcttgataaagtggcagcataatgtattaatctgaaaaataatacatctgagcagacaagagctgagggaaatatatcatttttgaactatcatatattgtcatggaccttaattttttctggagggttattgaccaggcttctttagcagtcacctgggacaactagcagatgcagttcctgacatgaacagtcgtagcttccaggattgtgtctgtagtatttgtttctaggcagaatccaacgctgacattatgacactcatcagtgtccactcttggcaacaaaactaatgatacatgtgcattttccttagtttggcatactgaccattgtgtaactcatttggtgagtatgacaaaggaaaatgatggagacactaaaatacaacaggaaatacaacagcaagaaatggttaagttctctaggagaattggttagtatgtaatgttgtcaatcatgttcagtaaccttaagagaatcctcacctacctagtcactatgtgtgggacattattccctgatggaagttatttaatgaagaataatggacttaggcataatgattgatgtatcattgcctgtggtgactgttttggataaataagatggttcagagttaatatgttacagaaaagaaagcaaggggtggggtgcactagtatgatcatgtaagtagctgccaccaacttaagtagatgtttctgtagaagttttgatgatttaactaaagtcatttaatcacctccacccatgaagaagatagtctaggagaaataagagagtaaagcacaccacctctcagcctagcagtcagtaaatgaaaggagtccattccagtcactgattgaattattgttggattccacaagaaccttaaacaccatctacataaattgttgaactacaggtaggaataaatcttcagtgtctggctgccaatgccaaaagataaagccagcaggtctcatgagacaggctggggtagtatgaggtgagagggaactacctgcatcttcccaactctggttaatgttcttggacaccttgttttgacccctcccaagtcatgtcccacaagtacagcagtgttcaagtgtatcacaattggttctcatacctgagattagacagaaatgacttgtacctctttttcccttatctctgcattccatacttgatactaagaacttgaaagtcttcattctgttggattaattgtgtataacctcgaggtataagaggttcagatgtagcttttttgacagtatgggtctgtatattccatctgcctttaccaggaaggtgcctgttttcctaattgagttactttgtggtttaaaagttactttgtgttttataagtaggtctttatatgcacacaaaagcacatgagcacacctccttaccaacacttgtgactgtgtcatttttgttaaaaccatactagtgagtgtaaagtggtatctcattgtggttttgatttgcatttccctgcaatgatgttgagcatcttttcatgttcttcccttcattttcacctctctttttctcattgaagaatgaccaaggctacagaaacagaactcagcttatgagtttacaaaggaagaaaccatgtcttactcatttttgtattttcagcacctagaacaatgctaagcacatgtagatgctaaataaatgttttctgaattcatagataaatgactgaatgaacgcgcaaagcattctagttcccttttttctctgcccagatccttcccagaattccctttttaaaaatgactgacaagagttttgaaacccttgcagtgaactcaacagatgaatcatggtttgcatgatgcaaaagtaaactaagaaaagctgtgatatttaaaaatataatcctgtacattactaaacctcactttcaagtcaattatctgcctcccaagaaggaacatttttctaaattaaagttggagcaacataatttctaagaaattatgaaaaggatttatttcattctgtttccttaatggctttttttctgaaaagcaagacttcagtgacctagtttaataaaaggtctatgaaatgtcacggtaagatacacagtaaggcatcagtcatttcaacctagctaatctttattggaacaaagaagactttgctgaactgagtcaaaaaacttcataaggaccatgatagggagaaaggattgtttctcagcctcttccttcttcacatcccaaccaatcctgcctcattttgattgtttggtcttatgtgaagctgtgtgattctatatatcacataatttatcaatggtaaaccattgatagaggggagaatgaacctgccctcctgaatcagcatcttgtgtctgggcatcctctccacaggaagctgaaggagcaaagacaggagggaaacaggaggcttctgcttttgtgctttttagcttcctgagtcaaggaatttaaactaataaactcattgtccactaaaaaagagagttatcatagttggattttccttttttcttaataaacaaaacctctgtcatttcacactatccagtgttgttggattgcatatcataatatcacaagtttacctaacttttttaggtggcaaaattcattctacttaaagtcaactctccatttttagaaaaagaccagcatattacactggagggctagaaattaagagactggggttttagtcctgcctgtaatttccagtgagaccctgaggaaggccaaacctctgcaggcctgtttcttcaccttacaaggacttcgtcatctcccgggacctttccagctataaagttttctgaattcattgcatggtactgtgattccaaagtggatcaaatcttgtgaaaacaggttttgaaataagccttgttaaatagattgtgttatctagaactcacagtgctcaaatcctggcctctctgcttgagtcactggctctacagccttcctgccattcccacctgcacagcaagtgatcacagctatctttctttctttctttctttctttcttttttttttttggcagaatttcgctcttgtcgcccaggctggagtgcagtggcacaatctcagctcactgcaacctctgcctcctgggttcaagtgattatcttgcctcagcctcctgagtagctgggattacaggtgcctgtcaccatgcccggctaattatttgtatttttagtagagagagggttttgccatgttggccaggctggtcttgaactcctgaccccaggtgatccacctgcctgggcctcccaaagtgctgggattataggtgtgagctatttctaaggcattctgaaatcctgggcctatgttaactctatgagtataaaattcttaccgtttggtttcactaagtctttactgttgttacctcttcctggcaagccaattttgtctctggcctagcaaccttagctatagtgtctctttgacgttaacatattattttttaatattccttcttttatttccttcacagggtacatccccagttacttagacaaggacgagctctgtgtagtgtgtggtgacaaagccaccgggtatcactaccgctgtatcacgtgtgaaggctgcaaggtaattgccctgggtccacaagcacagagcttagcccagctccagtcccctcccagtcctcttccagaatgcaatgttaagtttaaattcaaattaaaatcaaattctaacatccatggtctgtgatcatccaggtgtctggttgtgctcttcatttttgacatgttcaagaactgaatttttttcccaaatcataaataactaaatgagtgtaatgtctggtttctttacttctgcaagtgtttttaaaacaggaagagaatcaataaaataaaaagaaattaataaaactcttactttgggtttaaaaagcataggtcctttttaacatgttgtcatcccgagaaatgactgtttctcttcttgttttatctacagtgttggaggagacagagtttactctaccacaggctgttttctgctgttagtctgagtgaatatgctcattttcaagggttccaatagggaatatctttgaggctacttagattcagttatgttctgaaattatccaagttggcttttcgcacagcctgcagtgactaagtagattctggtcatccatcggctaattttgtgctgtacagtcctatctgcaggaaatacttgacaagaatataccagtgatcagtccattcacttcctgaaactgaacctaaattggcctacttacaagacttcatcaacaaaattcagataaggtttctggaaaatatcttttggtccaacaatctagccttgaaaatgaaatctaccataaaggaaaaagcttgacccagtgctgtatttcgtgtctgttcagctaatgtttcataaataaagaagtatttaaagtcagggaaggacttttaaaattgtttacttgttaaataccttgtcttttttacctcttatatttaaaactaaattatcaagatgtaaaccctaaagcaaaaattgtattaaatgtataaaacatttcaccttccctcctctctcatccaccttacctctttttctcttcttccgcttctccaactgccccgctttgttcatacccttgctcgtaaagcccccaaatcaacatgttagctcagtttcaaattaaggtgttttccttttccctagtggaagattttccatgcaaattccctatgtttttgtacgtgacattaggaaacatttaggagaaggctgctaaaaatgttgagataatacatccattggaaaggggtaatttctaaggttgcaagacttgctttttggaatgtggtgtaacatgttcttatttatccagacccctttgatctggaattcgtagtcctttaacaaagactgggctaaaggttgccattacatctatgaaaataatgtcttagggaatttaatgaatctaattacaagtaagttctggctatttattaattagagacttgcagacagtctcttgaaagtagttttattggcttgatttgaaagtaataaaactacataactttaggtacctactctcattccaaaagttcgataattcaaactagacttttctctaaattagtcccaattcataaggctttccctaccttagttgcagcactgagattcttctaaatcggcacataatgggaaatttcgaattctgggagagagatcctgattccatttaatatggaattcaatttaatacttaattccccaaaatgactctaaagagtgaatgtgccttacagaggacaatacattattagtgactgacttaaacaaagagagaattgagcctattaacctatatccctgcctcacatatgtcttcaggatgatcaagaaatcaactagcctgttttccctagatcacaggatgtttggagcctggatcagctgaggttttcttaaaagaagaaatcgtgtagcaaaatctagattttttttcagattctgtgcctttgtctcaggtcagaatcctgtttctagggttgccttcattgtaaaatcagagaagagccttcccagggtacttgtgcggatcacttaatataatgacaaagcatcttggaaaaagacaaacgagtttttcaagtgaaacacggtttttaagagtggtgaaagatgaaagggttaattgtttcctatatcgtttattcaaacctgtaatttaaaaatatttctaccccatacttgcaatgtgtatggagagaatcctttttgccagttttcaccctgagaagagtgaaatcttttggagatgtcatgtctgttgtgatatccaagtttttacacatcttttgtagaaaggatattgatactgtcccacagcaaactatttttagagaaagaatcaaagcttttcaacagctgcctgaatagtgaactagaagagtgagttatctccttttcacattgatcagtgaatcatctcaaagtactaaaaaatggatacagttcttctcagaatacaaagaaacatgtctgatattgatttataaaagcaagacctcttcttaccaacaaatcatcaatgaaatatatgtccttatttattgcccagggcatctcttttgtcagctcatctctaaaaggatttttttaaaataagtagactgttttaaatgtcttcaagtccacttccaagagttaatttctgttactttttaaaatgaagtggttccttatcatacatcaaaatatgctttaattatagcttatgaaaggccaacattttaagaagaaaatcaagaaaaaacaaaaaaaagaaaggccaacatctttaaaaggatttggtccatgaagtgcccaagacaagtcatcagagataggccacagaaaagatggcatagtgtatagtagagctagctatctcaactcttttgtggaaataagcaaagtataaattatttcattcatcccaataaaaagtgaacagagtgactttttggagtgtctggtgtgtcacacctcattctctgcttagcgtggtcttactggtcaatgtactccttgccctaaacccacccctgaacatgagtcagcatcagagtatgagggagacaagggtctccccaacttcagatagactaacaatcttcctatcctagtaagccgtcagcattcttactggatgtcttggactttggtatttctacctctaggaaattattgtttcctccagaaggaggcgtgctaccctacccctcccctccctgtctgtgacatacatcttcttgccaggaatctctgggtttctttagttctcctttgccctccttggtcagagggtagcagagagaaaagctaggtttgcagggaaacttgtttttcactctcatggcatgctctgacattcatgctttggcaagatttgcccaccctgcacacccaggaaatcattgccaacatctccaacaactgccctgcgtgtgaatgagtgaatcttgtaacagtgtatgaacatcactgaaattaatggactcaagtgcttaggaacacagaacccaaatataatattgacagttttctgttagaacttgaacaatggaaatgataagggatttgcatatatgccccaaaatcaagtctgttagtctcagttattcctgatgtttttctattttattctgctttgcccaatataaaatcctacctcgggcattttcataataagaaagagcttttgtgtctgaaggaggaatatgcaatagggtatacgtatataatcaaagccaaagaacattaaccgggatcataaaaatttgggctgaatctagatcaactgatatttcccaccatttatctagcaaagttagaggacccctttaggccttagcagaagacatccatcaaaacttgttttgccaccaggaacagtggctcatgcctgtaatcccagcactttgggaggcggaggcagacggatcacttgaggccaggtgttggagaccagcctggccaatatggcaaaaacgcatctctactaaaaatacaaaaattagccaggcgtggtggctcacgcctataatcccagcactttgggaggccaaggaggacggatcactgaaggccaggagttcgagaccagcctggccaacatggcaaaaccccgtctctactaaaaatacaaaaattagccaggtgtggtagcacacgcctgtaatcccagctactctggatgctaagatatgagaatcacttgcaccctggaggtggaggttgtagtgagccaagatcgcaccactgcaccccagcctaggtgacagagcgagactctgtctcaaaaaaaattttttttaatttcttacattttaaaacactcattttgccttgttatcctaccaacagttaaaatgaactttttaagtggctggggcaggactgtttataatctgttgatctaaaacattcaagtaatacagtaaaatttacttcattatacatcatataagcagttaagcaagtaagatgtggagtgccgctcctgggttgcaagggaggtgggggtcattgctgggtggtttccatcctacctgaagttcccacatgtacttaccatgtgatttgggcaagcgatttaacctgtctgaggtttacttttttaatccctaccatggaaatatttagagcacctcctttacatgattgtagggaagatagaaggatattgaatgtttctacagcacttagcaatgtgccctcacaataagtgctcactgctgttattaacttctacaatacagatgacagttgcctcaacttgaggatcacgtccagaaaaattctagtattgcacattcttgagaatattacctaagtcacccaaacctagaactaaacagtgtccccagatgctacagaggtgctctctcatgccttaagaaaggaagaatcattgaacctgtaggtgtatgtctacagataccaaagaaagagtgttataaaaggaaaacctcaatgcaatgagctatggggaaaaacttggtagaaaacctggagcgttctactccctgagtcctattgtttgaaaggctaagtgagctgatcatggctgtctcaagattcaaaaacaagtattaaactaaatccaggaagccagctagtacatctgtttaattactaaattattagatttttaattaataaagtattgcaagtatccatgtcttttcatttttttcactttcttcttggtcttggagctctcttatcactcagtataaagtagcaaaactcctcatagcttaatttagcaacacaattatgtcagtatatgaaatagaacagtataatttacttatatattcaatatttagaaaaaataaaaacaagcgctagatgttcctactagcctcttttccttgaataaagaccaaaaaaaaaggtgttgactctgtagtcctatggcatcatcagctcagatttagaactctctagatccttctgggccaactgtcttatatttgaatatgtggagctagaggcctagaaacaggttaaggtccaaaacgattcatctcatagttatatggacacaaaattccagaatcactgatttcaagaaaatatgaaactgttgtcttgggtctttgtttttcatatagggtttctttagaagaaccattcagaaaaatctccatccatcctattcctgtaaatatgaaggaaaatgtgtcatagacaaagtcacgcgaaatcagtgccaggaatgtcgctttaagaaatgcatctatgttggcatggcaacagattgtaagtagatcttcacttgcttcatattcaaggaatgttgattaggaaacagtttggttcaaggagatcgactgggcagaaaagaaggcaggaacccaagaagacagagaagggaataccttactttcgcatacacccctcactccccacatccaggcttgccctgaaagggaggtgggagccattgctgggtgggttccatcctaccctgtcataccacctcctaactgtcaaagtatggatgatggaggaggaaatgcagttaaattatccctatcacatttgcaggcctagttgttagcaacactctgtttgagacagagattacaaatgagaggtctggtccatttaccttgataaggtatcattctatacacagtgttcacatggggtagagcctcagggactagtcctaatattttttcaagagcaaagacaggaatttattttatggacatttttggagatggggcgctggcagaaaacatcgtgttcagaaatttctgaagaatgcaaagttgagtgctattgcatgagtcatcctgcagttggttgtttgttatatttttagcaataaagacattccgagctgaagtcgtcctacccagttttcaaagtgctacagcatatggtggcgagattagcccttggggtctcttctccccacactgtgcgagggatttacaccagtcactttaattaatctaatcataaaaataagaatcatgtcattcagaatgtgtggcctcccttttgccaggcatcagtattaatgattctactggcataaattttttgcacatcagtgagagattccaactattagttaaaaattaaaaagaaaaagaaagataaaaaatgaagaaagaaaaaagaaaatacagtgaggatttttcctgatgaaagaagtaatcatgactcacattttatgtgagaaatagagttctttcactgagaaaaaaaaatctgtgaaatgttctggtttgcccattaaagaagaaggaatggagaatctttaaaaaggaagagggttatgttagagtgttaggctggaaatcctgggttaatccccacctctggccgagtattttctttatctttatctcttaaaggcctttagcccttgccaacaatatgcctgatagggatatgtgaatatgattgacttacagccaaatacttagatatgccactatgacaaacttattattgattatctatttcagtgttctattgagaagtttaagatactagtgtctatgaggtttaaaaactcagtgttaatctagactgtatggaaataaattttgagtgccctttacttgcttgtgagggattctaagagctcaggctttctaatcagaaaaacttctgttcgagtcccagatctgtcacttactagctgtgtgacctttggaattaagctgagattttccttctgtgaaatcattgcctaccttgtagagttgttttcaagattaaattagataatgttcatcaaatacaacagtccctggcacaccggaagcatttgggaaggggttgagggtattattaccattcctcctttccctttagtaactgaaccaaaatgacttaacagggctcattcatattttcctcatttgtaagcgctcacatgactttgacaatccaatcaaatctaaatggtctggaatttaatattctctttaaattagaatatttaaatgggagactagctaggcaccttggttctccttctcttgctatgtctgctttttttcttttcctaccaggtcacaccttcatcaagaaatggccctaggacagtgatgtcgtagaactggagtcaggagtcctgggtcttgccttggctctgccattaacttgctctgtgactttaggcaagtcacgacctctctggatcaatttcttcttctttctgtgaaaagacagagtaggactagatgacgtctaagttcccttccagttctaaaatactatgactctgcaatgtaaaacctgagcctttccattccattgatagttaccaagtctagtgaaacggttttggttttggaaattgaccacagaaatataggtttcttgttacctgcccttctgattttcctttcacccaaatgatagaagtcaggactgcatttactgagcacttataatgcattatcacattgaatactctgtgaagtgggtattattgagcccattttgtataggaagaaatgaaagctcagagaacctaaggaacttgccagaggtcacacagctagaatgtaataatatcagaattcaaacccaagtctttctagattccaaagcctggactctttaaccacccttgagggtggaccaggtagagaataatgtacagtgagtaccttgaggcccaggtgaggcccagccacattccaattagcccttaagggagccatgaagagttggggtcctttttcctcttaaaaaaagggatcacgagcctcccacttactgctccataacgtttctttttttaattccataacgtttctttaacctgaagttctctttactaagagccgttttaggggaagcggggaggacagaaacccagagagtgaattcggatgactggctggacagatttctctgtgatcttgtgggtagtatggattttacctctctgcttcactctgttttagaaccaccttctgtggagttggagtgcgcagtgtctaggttctctggggactttgttttgaaaagctggccggtcatggggagtttggctctagagaccatgttggacaagactagtcaatggcagtttgctggtgaggagagaaactgtcccagtgtgacccaccccgaaggacccagtaagccatctgtgcatcagtggtcccactcctgaggctccaggaagtgcagcttgctgtgtatcttgggagcatctgtgtgccttgtctcatctttctccccctcccagtggtgctggatgacagcaagaggctggccaagaggaagctgatagaggagaaccgggagaaaagacggcgggaagagctgcagaagtccatcgggcacaagccagagcccacagacgaggaatgggagctcatcaaaactgtcaccgaagcccatgtggcgaccaacgcccaaggcagccactggaagcaaaaacggaaattcctggtaaggcttccttgcacagatcagtttcacttatatgccagtgttttctacctcaatttattcagtcctcatcaccttgggatactggtgttattgcctcattttactgatagggaaaccgtagctctgagaggctgagtaacttgcaaagctaggatttgagtctaggtctgtgtgagaataaaggccactcctaccatctactttgtgatttgctgaattctaaaacagtttcttaggccacattatatcagtttgcttttactgttagaaagaccactcccagaccaactaattagtaaaatgttttgtctgccatcttttactttctatacccatttctttccttagatgcccagtatatacatatttagtccctgaactcaatcccaaatattccctttataatagcctctaggcctcaagtatatttttatgtcaacagaagtcaaaattttttagcttaaattaaatgagcttgactcaagaagggcaatgggaatgagggagtagggatagggttggtgggcacgagtgtgtagagaaaaaagaccttccagacccttgcaatattgatgtttaatattcttataaaaattaccagttgtgaaaattcttcccattcattttttattcagacttcatagtgttttgaggtaagctggaattactatccccattttacagacatgcaaaccaagcccaaggccttaagccgcttgcccaggatcgcactgctaaaagccaggcaccaaaaccaactcggtcttctggttccaagtccaggctctccacccacctcattagaaagactacgtgccctactagtgctggaccatctcagagactgactctgctcttagtttatgatataaaacccttttcaagtacctacctgacaacagatattctgtggtttcatttgtatccctaggacacattagagtacttccccatctgaacaagaagatatagtggtataattatccttgtacctcaacattaacattacaatgagatagtggatctttttcttaaaacaacataacaacaaccttaaaggaagttttggaaagaaaaggcttatacataattcacctgtactgacacaattactttcgttgtaatgaaacaatagtgccagcactttgttgatggctttcactaacagcaatgtcagcaaatacctagatggcctttaccatatgccaggtactattctaagtgcttttcattcattaacttcctataccaatcctgtaggtagatgtggttaatatctccattttacagaagagagaagtaagacacagaagttgaggaaacttgcctgagctcccacaactggtaaacagtggtgatggatgcagccagctccgggatttatgtctctatccactaccctatgcaatcttggcacctgcacaaacccaaaaagcctctgaaagatcccagctctttggaggagcagcctctcagtgccttgatcttgcatcttcaccccaccctggtatatctgccagaaaattcaaaagcactaattctggattgatagacaaattctaacacagtacacttggggcatagcaagacagagtcctacctaattgcaaacttaaatccatcctttccccaaatgtgtcacccataaatggacattgtagaaaccacttccaggcctggcactgtctcctgatttcaagtcgtgaccaagctgaattccaagtaaggtagaagatttgaagttcatcctggacttctcccgggaattttatacttttattgtctttactccccatagagaagggatactagtccaactaaacttgtttaagtagtcataaggtgcttctttccagactttaaagatttgttcttttatttaagaaacatttattgagtggatactatgtgccagaaagtaaataagtcaggcacattcctctagtgggaggcagataataagagataaacaaacaaaataaatgcaggtagtggtaagtgcaatgaaggcaataaacagtgtgatgggatgaagagtttgtgaactggaagtggggagagacttcatttctgtgaacatggtggtcagaagaagcatctctgaggagatgacgttgtgctatgtctggaagcagagaaaccacctctataaagcaaaatataatcaaatatcttcgtgctgtgtggtcacaatatctagtcattagaaccagtcttgaggtctgcactgttcacttaaaggctcctaacagttcaccagcctgaccatctatggaaagaatctatggcacagaatgatttgccattaggcttctgtcagaaccatgagattacccatgcacaagagagttttattctccttgtagggctgacatgaaatgtatcttttgtagatctttaatctgctcaagaaattgtccatcttgattcaaatgtaaataactgcttctccgagccatttttccctagagggttattgggaaggatcaggactcttccactgtcctgtctgtctctacaatgaacttcatttctgtcagccaatccccttctgtgcctgggataacccctgcatctcttcacaggagaacaatgttccattcagcctccacacttgagtatctatgctatgtgtgatggaaacttgtggcagcttttctccaagatggctgccatcaaattatttctcatccctgtatacacagcccgttctctctctgggagaggtagagtctgttcccctctccccttgaatctaggctggtatctgatgcctttaaacagtgcattttggcagaagtgatatttaagttacttctaaggttgggtcataagaagccttgcagcttccacttgggtaccttgggggagggaagccacctggtctctcatagcagttgactatatattaaaaaataagaataataaaaaataataataaaggtccaactactctgagaccaccaggcagtgaggaatcccaagctagccatgtaaaaaggccacacagaaagagagattcccaagcagcccagggaccagaaatatgagtaaaaaagcctttacatgacaccagcctctactgccatttgatggcagctgtatgagggccccctagctgtgccaatcaatccccagaactcagaaagaaaattaaaaattgttgttttaaaccacaaagtttggggttagtttgttatacagcaataaataaccagaacagaactcgataaatatttgttgaactgaacatacagttccactcacccatccttggagatagtacagttaagccctgtgtcttagccagtttacatatttacatatactccttgcagaaacgtgactccaactgagtatttatgctcaggatgaaaatttcactcttttgagtagtgaattagtcctgcaaggacattaagaatctttacttaaagacagctttgctaagtggtattcatgtactgaaaggtatcatgtaccaaacaggcttttttgcacattagaatttgcctctcctgtgtgctaacaccccttttcctgtgcttgcaacactgccacgtgttatttattttttatgtgttgatgtcccattttgttccaaaaaagaatttgaggaggcctatcatgttaacaatagtataaaaatatgtcatatgggattacatgttgtcattaaagctgaaagtattcatttatctggaatgggtaagtgcattattccctaaaaggagctactgacatagttttcagtctaagaccaggacccattttcactttaagaccagcactcaagtcagaaatagagacagggctgggcacagtggctcatgcctgcagtttcagcactttgggaggccaaggtgggtggattgcttgagcccagaagtgtgagaccagcctggtaaacatagcgagactccatctctacaaaaaataaacaaatttagccaggcttggtgatactcacctgtggttccccactactcaggaggctgaggtagatggatcacttaagcccaggaggtcaaggctacagtgagctgtgattatgccactccactccagactggacaacagagtaaaaccatgtctcaaaaaaaaaaaaagaaagaaaagaaaaagaaagaaagaaagaaaaagaaacagagacagtgatttgatctggattttaaatctatatttgggtctgagaaaattagagtctttggcaaatgaggaacttttgcaaaagccattaagattttcataataaatctaaagccactctttaaagcttctcccaaaagcatttaaatcatataattttctagttttctccaatctactcaaatctctgaggctacagaaatgcctaatttcaccaccaacaattcatgtgtgatgacagtaaggatgaaaagcagaagcaggctgagaagagaacaagcagcatctgatgccaaacaagggaaagcaggtcactccaccaagggtagctcgcttctagacctccagtagcagcccctgacagcaacaatcttgtctattgacatcatttattattgtctgctgacattgtgtcattattctgctcccttaattttcatgcaaagttgtagctttgggtgaatgtctacccaagtataaaatgtgacctttaggatcagaggagacctttcctactttttccctggcagagatactgtctgatttcacacactcaattggggcagcttcagacaaggggcataagcagaagggtcagacagggtgagtgatgaggccatatttggtctgtgtgcatagctcatagtacaagtgcaatcacgtcaggaaggcatctatcaccccaagttattagaataacatcagaagaaggcaggataatctagtagttacatgaatggagattggaaccagacagccaaggttccatgcttgcctttgttgcttttttaagtgtgacttctttgggcaagttatttcaggctcagttgccttatgcccttgctgaatggcataaagcaatagatacaagtgggttaacactgcctggcatattgttagcaaccacgtaagtggttactacatgcactatccttaccacccccacaccccgcactgccaccatcttattcctgctcatcccaggaaaagggtgaggctgtagtcatatcccatggcccaaggaccttgaattattatctgcccaggtcttcctgtctagcctggcaaaggtacaagaagacatcctatgaacaagtgaagaagtgagagtcccatctggccccactccattctgcatgtgtcagagagttaccttttcaagccaagaagtccttggctctgagccaaggactcagcagaggtcagctggcagcgtttcctactcaccttgaacaatactaatgaaatagtcaaagcagaaagccagttggccacgatttgcataagaccagcctcacccgtgctgagcaggggctgaggtcacccctgaacacacacctgaatctctccttttgcaccctccacccccactaccccaagaagtcattctggattccttaccccacagccagtccatttttggcccttgttttcagctgccaatatacaactgtaattctctaggcctctccatctctactgccatccccatagtgcacttcagcctgcccaaaccacagctgtttcctgcctgttttttcctttgactccccgcatatcttctccatgcagtaaccatcgtgtcatgtctatgccctgtttacagcccttcagtagatgccccattgcatttagaataagcccatctcctttctatggtctacaatgcctagcatcacggatccccctgcctacctctgcttcctcatttcatgccatcactgggctctaaccacacgggcctcctttctggctttgggactttgcactggctttcctctctgccttgagtgttcttcctctggccctaaggaaagctacttccttgacattcctcaagtcaaagtccacacattgcttctcaaaggggccttggctgaccttcctttctcctgcctccccatgtattatcatgtcacctccagacttatcacaaattcttccacgaatacatgtttcttatttattgtctatctcccctcactacaatgcaaggtccttgaggatacactgttcattgctgtaacctcagcatctaaaactaggcctggcccacagtacctgctcaataaatattggtataagtatacattcattcactcactcaaccaataagcattctgtcctccacaacttggcccaatgccttgtacacagtaggcaaagacaagtaagacttattctctacccccttaagttcatatctttggtgtgtacttacataactataataaaaagtgatagtaataaatgcctaaataccatatgactcatagtcatgggccaccatgtgtgtttgaatgaggtaaatgtcatttcaaactgaggtcacctgggaaaacatctaggagaagatagaacttgagttgggtcttgaagagaaaataggatttggaaaagacagagatgagagacagaagtgggggctttggagaaagcaaaagtctggagagaaggcagcagtgaaatgggaagatgtaaggcaagctgtaggggagacatagagcagacagctgggctagctcaggaagtccatttagggcaaagagaggatatcagaatgagagttgaaaataccaccatgagctagctcaggcagttggatccacagaggcaaaaagcaggctttccccacaggtctacagtggtgaatctacaagcaagctagagacttatcatcagtattggagcttgatcttgggcacataaatacatatgtgtatatgagcaaatgtatttcatatagtagtttacgaggctattagctataataagatatctaatgggttcaactaatgtgaaatatttatactctatttttaacatcttccaaatattttagaaaattatgtatttttgttataggtgaaaaatcttcagggaagtaacaaacagggtttcactgctcaaccttgattaacctgataataactcgggtcaattcatggatatagacaaacagatagatagattcttttttgttgttctggtatctaagatccattatggaaaaaaatcttaatgataaaatcaaagggttttactttgttcatagttttacttctagcaattttgtagtccattaaatagccagaggcttaaaagtgaattttttattctaccttgatatatatttccatcagaaaacttgtgagcttgttacatttgggggtttagttttacttaaaattgccatatttccttgcatactttctctccttttttcaaatctttacacatgtcacaagtggaattcaaataatctacacacccacaaattgaatgaaaaaattaacatcagtattaacccaccaacatttcaaaggacactcagtgccatttaaatatatcagatcagctctatcagtattcattgagagatgtttagattcagccaggccaaaacaatgttattacacttcttaattttatttttattttaaaaagttcatcctacatatatataattatatagatatgtaattaatatatatttatgtataatttatatatatatatatatatatatatatgactctctgcctttttgaatgtgtgcccacattccttttatcagttgatcttcataaaagacttgtcaagtagacaaggtcagtgagatgagcctcagtttcaggaatgagaagaaattataaagaagagcagggatatctgaaggctgcagggagcagcattaccaaaggaggaacacaggtaccttttactttagcacaatctaggtgagaaagagggaagtagaaggaggctgtacatgtgattatttcatcaattctgcctgctcccagagagccagccgaacagtggccttccctgggcttgctatgccaacagttgccccaaaacattgtcaatcattgtgaaacacgacagaaaccaggtttcatccactcactgccagcaacacacacaaaaaaataaagtaaaaaataaacagaagacaatgctggatggtcaaaaaaagttaaatgctgccagcatttgttatgtattaataatatgtttttaaaaccttcccctgaggctgtaagcatgactcctgggctgctcctgttgaccctggtgctctggcaccaagaagagtaaaagaatcatcttttgctttttcttctgctaaaaatgtgatgtgagcagtaacaggagatatgcgggaggaggcaagggaactggattactctaagctggacttggttactgctaactcagtggttctcaaagagtgggcccagagcagcttcatcagcacaccctgggaacttgttagaaatgcagattcccaagctccatccctgacctgctgaatcaaatacactggggatggggcccagaaatcaagtgatactgacgcacagtgaagtttgggggccactatgttaggctagtctcaccactggcagtgtcctcactgctctgcaagtgaggaattctattttgctcatctcactcacagtgtcagttcctcattcccatccccctttcctacccccatctccaagcccctgggtgcggaaaagagaactggtcttgttcttgtctattcactgtggctctaggcaaaggtggccaccactgggtagggcttgagtctgtgatctccttggtcacattcacatctttctgggagacagctggagaggctggctaggagggtgttcagaggagtagagatactgttcattagtgtcaaaaggtccacagggagtaaaagccttgaagtaggggtgaggaggtgtggagctccggggagactgctgtgtggagtcagggccacccagatcgcaggcctggcctcagcagcttgctcttaacctttctgatccctagtttgctcacctgcgaatcaggatttgaatgaggactacttgagacagggtagtgtgcaaagtagctggctcacttgtaggccacaaataaatggtggttatgatcatcacaaagacaaggaggagaagtggagcagactcttcctgaaggaagcactgggtgacagcaggagacacatggacacagatcacatcagggaggtcactgaatgagaaactcaggagtcagatggctactgtggacgttgggaagcatataagtcacctggaggtcttgctaaaatgctgattctgtaccacctggtctggagaggggcctgagaagaagtcccctggtgacacccaggctgctgcactacgctttgagcaacaaggccatggattgttcttgagcaagtaaacagcagagaactgccctagggacattaaatactagtaaattcaccactctgccctaaagtttgccaagtttcctgtagacagcctagcaatcttccccctcaaccctcagctgagaccacctcaaactggagtctgtagggcagaggggagcttcaagccccagctgggtcagaagcaagaatccacagggcgctgtttgctagggcccacccatcgctctgctctatcactgcccacggtgtgcccacctcccacacacagacacacaccagcatgtgcagtgctctgaaaatgccatcccagagcccctggaatttatgtcaccttacctaagtatacaccctttgtgcattcagaagcaggacccaaattcctgtcctttctctgatctctctctctctctctctctctctctctctctttctgcagcaacagtcctgtaaacattgtcactgagggcctattaaagcaatggccaaaacatatatctttactcaaagatgtgtaaactgtacagtttgttaacaaatgatgtgaaaactggaaactgtacaggatatcagttcagaagagattttctgccacataagaactatgataaataaagctcccttcaacttcttcatttaaatctttcttttttctcctccttagccagaagacattggacaagcaccaatagtcaatgccccagaaggtggaaaggttgacttggaagccttcagccattttacaaaaatcatcacaccagcaattaccagagtggtggattttgccaaaaagttgcctatgttttgtgaggtgaggatgttgtttttccttctgcattattcttaattatagtttcatcagtttccaggaatactgggtattatttacaatttaatgttaattagtagggacttaatcatatgaaagcaacgtcagtacaaaacgaaaatgcattctatttcatttggatttcccactttctgtatttagtcatcattcattagcttgtccgtgtaaggcccatcaagatcctattcatccccctgattccaggcattgagaaataatgatagcaatagattccatttattctgcacctatgctgtcctagttaccacactcaggtgctcgggtttgcccacattcaatctaatccttctaaccgatttgcagggttgcttgtattaaccccattttcagacggggacaatcaagatcaaagagattaagttatccaaatgtgacatcatggttagagcctaggtctgtattcttctcagtgcatatcccagtgagatgactgtgtggtcgtttcttaatcctcaagaataagttaaatgcccctcatagaaccaggctcttaatatccccacaaatctttcgtcttttcctataagctcactcttgcttgtcccatcttcagggcaccctgtagagctgtcccaccggagttcttcaactttccctttgggacacttgaactttatcaggcctgccctgtggtggctgatgccacagtctctacagtcagctacatgggcaagaatcctaaacaagttacccaatgtcttcaaacttcacttatctcatctttaaaatggggattacaataatgtctacctcttagagctgttgaaaggttttttaagtgggataatatatttgtaaagtgattagacagtgcctgggttataataagtattccatagtttaactgctaatactgcttttattttatctgttacatttccatcctgcctctaaccttcttcttttttaatcaaatggggttatgttttctggaaaactttaaaaaaatttcgtaagattcttgtctcttgctctgtataccttcaagaggacccagaaagacaccaaatagagagggtcacggacagctgtgagcctcttaggtaagcaggctgagtgataagtgatcctggtctcacctaaaaagaagctaagtttcctcacctggaatgactcctgctgccttggcttccagctctcttctgtctttgagtttgcaataatgggagcctagctggaatcagagggacacagagacctcagacattatggggacacttctcattgccaatttctgagcctccacagaagccatacccagaaggacaggaaagtgggcttcgggaaacagatatcttgcccctagacctacctgagagagcacgtttgcctccctcttagccccagcttcactgtggtgggggccaggtgtcttagttcaggccactgcaacagaataccatagactgagtggcttaaaaacaatagaagtttatgtcttacagttctggaggctgggacgttcacgatcaagttaccagcagattcactgtctggtgagggcctgcttcctgattcatagacagctgtcttctcattgtgtcccttcatgatggacaggacaagggagatctttgggatgtcttttacaagggcacaaatcccattcattagggccccactctcatgacctcatcacctcccaaaggccccgccttcaataccatcacactggggattaggttgcaacatatggattttgaagggatacagacattcagtctatagcaccagggtacctgatatgctagtacccacagccttgcagtagcaatgactcataccccacccctaaagaagtcagtagatactgaggaagggactttgacttatatctctgtgttggccatggagcttcccatgcctttgacgccttttttagaagtagacatctattaacattttagaggatattacaaaaattatacgtattcattgaaggtttatttatacaacataataaaggtaaggatttatggtaacactaccacaagattttggcacctattttagtcttttttcaaatatttgtgtgtgtgcacacacacatatacacatacatacatatatatgaagtataaaacatatttaatataatgcataccacaatgtactgtgtatgaaattatttttaactttttattaaagaatgtggatatgtcataagagtgcagctcaataaatttttacaaactgaacccacccacatgatcggcaccaaaagaagcagatcgttaccagcacctgtcactgtaccaactttttaccttcaatgggaggacatagcgtttacatattttttcacaaaatgatttccaatgaccacatagtattccaaagaatacatctaccataaattctgttatctgtttttactggatctatagttcatttccaatttttcactaataaaaatatgctcctgtgaatgttctggcaactatatcctgcccgcatcactgactatgtctgaagggtaaagcctggacatggaatttaaggaccgagatatacaggcttttgatatgtgttgccagagtgccctcgagaaagtatgtgcactctcacatctgcaccgaagggcttgtttcccctcactcttgccagttctggctgtcatcgttctcttttgtctgaggggatggttttgttttcctggacctctcttggtcctctctctggctgtgtccctttgcccccagttcttgggtctgaggaggaactctactgagtctgtcacccctacaactctagccagcctgccagtcatatggtaccctttgaatgccaccgcccccccagcccctgagatggtttttttccagtgtaaaactcatgtaaaccactgaagagatatttcagttgaaggaagaaaacagaagcagcagccatctccgccaccaggagcaaacacactgcgcactttcatccacggcaagggcgaggggtcaacgtggaacttttcaagcatgggttgtggcaagcttatctatccaagtttccctaaaagtccaagctgtttcatttttgattccatctctccttctaccctgatatcgtgtggtctgccaattacaaaagacaatggtggcgggatggtgggagcacctttacagcaaagcacctttgcatgtactttctgtctttgaggcctcctgatgacctttagccttttatattctctctcaaacccaaaagaggtgaattaactgtataggttcgtgagctacccatggagtgggctggagatctcaggtggtcttgagagccaggggtctcttgccagaggcagtttatcacatctgctattcaaactgtgttcatgataattgttctaagatccacgccaacccaccaaacaagactggcatgacaccaggggcttcacaagatctaaaatcatcgccggcagagctgccaaaacaacatgcaaaaccactcctagagtgcagggccctgtcgtctttgccagtcaacctgagtgatgctctcctaaggaagcaggaagaacctgtgggagtatccctgcatctctgcctgtcaggcccttgttgagtgttctcacaatgaaagcattttggcaggtgtctaagagattatttgcccacgtgttgaaacaaatctcaccaggatcctacaaatccctcttaaaggaaaaggcatctggcctagtttttaaaccattggtgatcctttgcaaatacttattcagcttttatttaaatttgaactaatcttcaacagttggtatttaaactagaaatttggaaaagaaaatttctacttcatctataatcagaattggtttcaaaagtggggcctgccccagtttgcatactttgtgacacattttaaaaataaatggtttgatctgattagtaacttcttgttgctgttctatgctagtggttctcaagagtgggatctgtgaaccagcaacataagcattacctgggaacttgggggaaatgcagaaactcagaggttggggtcagcaatctgtgtttaacaatcagaacctagacaaaagcaaatcacagtgctttttaaaaaatgagcggaaggagagaattcatatgtatggattccagaatcaaatatgcaatgacttttattctgaagaaaaagccaagcagtttgaaattaaatggtaaagtgactaggctgagctagtaaaaaacataaaatgcccagtattttagatgtaattcagttgtattacttttatataataacctaaattggactggttgagtattgccaagagcgtttcccaaaaggaatttgtaactgctctaatgaagagacagatattaggtgtaactcacatatttgttgtttatggaaacttagtcatatccatggtaaaaaaaaaaaaaaaaaaaaaaaaaaaaaaaaaaaaggggttatgtttccttcttctcttggcattggattctgacagatccagtttcaaatcctagcctcacccatgaaacattcatttgaccacccccgcccccacccagcttgttaccctctcagtgcctggatttccacatctgtaagtaatatggaattagaatatttacttcattgtactgctgtgaagattaaatgaggtgatgcatggaaatctgggcatgatgcccaattcatcaaacacacccatttactaatagctttccaaactcctttgataatggcatttaattaaatagtctccccttccagaaaataaaattcttattttgcctataagcaaaggtattttttattattaacgttgccacattctcacaaatcttaactaacagggtaaccaaatgagcttaaaaggagattgcaacactggcagaaagacccagtgtgttgagtaatcctgtgtctaaggtgctgagaagaacacaaccttgggagtcaggaggtctgaattctgctctcccctctgccttcaagtccctgggtgactttagatgaagcttatatctctgggcctcatgggcaacatgtatctctgccaacaaccctctagctttgtgccaagaggctccaagagcaaacgtgcttcaaaaaccaaaaggaagcccagttgccagctaaacagtagggtaagctgttacctattcaagctacaagacaaaaaaccaaacaaacaaaaatggagagtttaacataaaccctgctctcaagcagttatcagttgaagttataatacaaacccccaaactgaggggttattagcacagtttcacacacgactgtaatagcagttggagaactgtatctgtcataaaagcaatgcaaactcctgaggttaaagttggtgaagattacagtcaactttgagtatgaaaaatggttgtcgaaagtctgcagccaagtagggaagggaaaaccatgggctcaaagaatgcaggacaaatgttaatcacagaaggttattcctattgcttttaagatactgtatgttgttcctgactggcatttttgcatttgttctttgctgacatgaactggttcttttcagctgccatgtgaagaccagatcatcctcctcaaaggctgctgcatggagatcatgtcccttcgcgctgctgtgcgctatgacccagaaagtgagactttaaccttgaatggggaaatggcagtgacacggggccagctgaaaaatgggggtcttggggtggtgtcagacgccatctttgacctgggcatgtctctgtcttctttcaacctggatgacactgaagtagccctccttcaggccgtcctgctgatgtcttcaggtgagtacacctagactcgttagtgggcatccaaagagcttttgcttgtctagcgctaattccaatcacttgagttttcagtccccctttagcttcagaaacatagctcactcttcttcagtaagaaattgcaggtttgccagtggactgggaacttaaagggggggcgtcagatgtctgatgctttttgcagtgtcccaggatagaaagaagccaaaggagccatcttaaagactctacgaagtgatccgcctttggtggatactgtgcagccctcttcgtagtctttggccaaacctgcctccttctggtttggggtatgccagatatggatgtgagtgaccacacgattgtgtgttaagttctgtgtgtggaaaccacggatgcaggctagaatttgttcatggcttagctacaactgaagttttagttatctgttgctaaatagcacaccgacccaaaacttagtggcttaaacatccaagatggctggagttcagctgggacatcaaacactggttcaggcctccctctatgcggcctttcctccggcagggtagacttcttacttggctgttgatttccaagagaaagagtcccaagcacacgaaaacagaagttgcagatcccatgaggcccagtctcaaatcacacaggatcacttcatccacactggattggcccaaacaagtctgagtgccagccaggactcaacggtccccctgtagatgggaggatagcacagaatgggcagccgtctgtaagccactacacatcaaaccctttcagggaagataattttaaatagaagtggtttcagagtcctctgcattttcagggcacccaagtgtagatgtgctttgtttggcacttgtcactctgcactgtaactacctgcttcacttgtccacgtaagtccctgtggacttcttttttttgaggacatagatgtgtctaactgtacatccagcacctaggccagtgtgcaatagaattcaagaaatgcttattggataaatggctgaatatgtggataaaatatcggtcacaagtacatcgagaattctttgtagagttgctgcttcctggttaactcagtaggaaattttttttttttaacctgagacacggtcttgctctgttgcccaggctggagtgcagtggtgtaaagacagctcatcgcaggcttgacctgctgggcttaggagattctcctgcctcagcctctccaagcacacgccaccacccctggctaattttttattgttttgtagagagaaacaggtctcactatgttgcccagtctggtcttgaactcctgggctcaagtgatcttctcacctcagcctcctaaagtgctgggattataggcatgagccaccacgcctggcctagaattctttttttaaagctaatctagaaatgtatttactataggaaatttagatatggcagacttttaaaaaaagaaagaaataattctttttattatggaaaatttcaagggtaagcagatagaatagcataatgaactcccatgtacactgtggcacccagactccagaccggcctcctacactccccaccacctcctaatgttcacaccttggataatctcctgtccttcagtgtgtgcaggacctgtaccttgcttctagccaagagaatatggcaaatttgatgtcaccccttgtgattacattacataatctaagattccctcttgctggcagacttgctctagggactctccgtgccagcttcatgaagtaaaccgccatgtggggaaagttcccatgacaggagctatagatgacctctagggctgagggtggtctccagtgacagccagcaagaaatggggcccacagtcgttcaggagaattagtctcaaagaaataaaatttatagcttatccaaggactccttgtgtgactttgggtgacccctagcttctctggacttcagtgacctttaaaatgaagaaattaagctacatacacgggaattatatttctggagggactcatggtaatttttttagctgagattttagaggtacaaagacagttttaaataatgttgaatcacaccacgagaaagctgtttctctgacggttttcttcctggttatatctccttccaaataaggcaaggagagagattcggtgtggtgctagtctgcctttaacacctctcttgacacttaccttcttttttaacaaagagagagtggatctcaggagcaatgttcagccagaaccttcagctccaaagtaacaaaggcttttgccatgcatctatttttgtggttatcttctgatttatgtcaaatggatttttattactgaataataagatgtttcctctgtagtgggtcagtttaacagattattaagcaaataatctaagtaaggtagataaaaggaaaagtaggtggagatgacaaaaactgtgaatgtgatgccaaacactatcaaacaccaaactgaatgattcttcccagttctctcatgttgtgaggctgacactgcctgacagctacaggacaacttaataacttttcacaatccaccctccccagtgatgtggaccctcttcattaatactgccaggaccagaaaaatattacaagacattgtgcatttggcaaatgatagctgcgtgtcagggccccaagtctccagttctatcatggggcctgatgttctaagccccatgttttgtgtgccatttcggttacacaatatcttagactttttcttcaaagacttttccaagagccactacttctaagttccttggtcccacagtgcaaagagaaaaaatgaaaatgatctgaaagacatttctttaagaacttttgtcttaaggagttaaaatggtcttcagtctttaaaatgtttctctcttcataaacctgttcagtgtgattcaagcatcatcaaaatgtcaatttgtactcgctatgtcatttacgtggccatctcgtctttatctctttgatgccacaaaacccacattatatttttccctttgaaagaacacatccaaagcaataatatgttgatcttctatttgggtcaaaaattaaaggatcctgtggaaaattcttgcacactcaaagaaagagagaagataggggaaagggagagagggagaaccagcaaatctgcagagcagcttcatcaaatatgaaggaaaacacaagataaaaatgcacgaattgccatttgtgctaaataggggattccaaaagcccatatggtttgttagtttgtttagactcagaagggtgaattgagacattagccctgatccttcctttccaatgaagcagaaccctgtttcgattcctattgatacagacacctcaataattggacctttgaagtgtgaattcatttgatcagagccacaaagaacaaactgaagagaacttagcaggggcacgttgggcctcctggagctatttgaggaattcatccgggtttatagattatttttgtcagccaagtgtctgcagcccaactattccccagttgcccagcctccttgtgtcacccctttgtttgccacttttggaaactgacttgagcctctcccacatactatgggaagcccagtagtctgcacaggacttgggaagatttgctgggctttccagggtcccggtgtcttctcactccagctcccactatagctgttctcttctctgcatggggtgactctggcacagctcccctccccttttcatttcaattccaaaatcatgactaatacaaggctgctactggtagcaattttactaaaggcataagggaagggaaaggccagttcattgcagcctggaagacaacacaaaattaaacatggtgtttcttggtcctcaaggaaatgtcttactattccgcgttcctcctttggcctcaggcctgctgcaatgtccccagtcccttcatatatctcccccttctatgcatgtccacgctcatcctctcctctctgccaggcagccagtgaaaattcaaaattgttcccctcatcttgcagaatatttcagctatgtcaggcttctccttctgtaccctaggagggaggcatcacctttcacactcaagaaggtaattcacactcaagctaaactgtctaaacagagatatttatctgaacaaagtactgcctctcttcatataaatgatgccactcccctggtacctggtccctggagcaccagagttcacgctgcatccatgctcatggctaagagggaagaccctagatctgcccgccccccaataaaggcctggaattggacaaagcaagccttcccccttccatctctgaatcaatgtccatcttctctcttccccgcagatcgcccggggcttgcctgtgttgagagaatagaaaagtaccaagatagtttcctgctggcctttgaacactatatcaattaccgaaaacaccacgtgacacacttttggccaaaactcctgatgaaggtgacagatctgcggatgataggagcctgccatgccagccgcttcctgcacatgaaggtggaatgccccacagaactcttcccccctttgttcttggaagtgttcgaggattagactgactggattcattctcataattcctacagcactactgggtgtcatttcattccattgcctagctcttttttgtttgtttctttgtgttgggagggattatttgggagggaaaagggaagtagtccttggcatagacatggatgaaattgccccttgaatgcgggtacttgaaactattgcatttcgttctccggtcctgtgatgtgaatgctctgaaggttttatggttgtggaggtggggtgggggacaatcattaactcaccagcaccaagcatcaccagctcccacccgtccctggtccaagacttgagtcagcaaaatggcgccacaggacactaaagaagccttaaaaccaagataatacgaccacctccacccaatcctgatgttcgcagggctgaagttaacagagcacagaccacctttagttagatgtggctttcagccttttagggaaagactcgaacaaattttcatctattcaagagcatgctgtttgcagcactctttatggtctcctaggagcataacttggaatgtacaggaatatttgtgtcctaaaaaaatcagctgcccttccaatatcatttttataacgttatggtttaattcaagttatacaaaggtgtgactcaaggatgtgcaggtattgactgatggaggccaacaaggaaaatattttttttcagtgagcccagagaaattagaaatcttcaccaatgtcagtgactgcatggtttccaaaaattcacatagtattacctcacagtaggaaggcttctttcccatttaggctcagagaacacttttacagaaatcaaacctatttacagggtggcaccccttttctgtggcatctgatctgtcatctcccaagctcctgaagttctttatccaggttgtatctttgctgagctgacaacagatttctctatggatcaaatattctaatcaaggaaagatacggtgaaacttcagtcttcttctggagaaatgctgaggcgagattagtgcagctacattctgagttgaaggaaatgcagtgttctgagggcccctttgtgtcctgatggctggaggacgcttcctcctggttagatcctcaagctccttgcctcattgacaaatgtctcctagtcccctttttccctctgactctgaggaactaaatagcttgactatctctaaacagagactggccctgccactgaccctcctgtccctctcatagcataccctgacagatactcaatagaaaacacctgcagaccatgtgcacacttaactttcctgcccaacctgcctccccaacggcccatgctagaatagcttgtgcccagaaaacaaacagtgacacttcatctcttcagcgtcagaaaatgggcatagaatgtacccatgcaattgaatgtatctcattctccactggcatagtagatataaactattcctttgcctaccttttactgccttatcctggaaatattggggaaaataagccatatcagtgagatttacctaaaaacaaaggaaggaaagtcactatggaaaccaagtagatgctttttgtaagtttggtggagcataactggcccagaagtctgggtgcctgagttctagttcgtgctctgtcaactggtagatttgtaattctaggtcttggttttcttacctggtgaataagtcatgatctctaaaacccttcctgcccttaatattgtctgaatttcaaggggaaaaaaaaaatctggttcctttaattatttttttttaacacttaaattcctaactttattagacaagaagtatggcccacttaacagttaaggaacgtaaatttgttattggctcgaaataataatttgacacaatactagtcaaccatttagaggccttggaaaaagaagaggaacagcactgaaaattccaagtatgattggaaattatctgggagcggggaattaaatattcaatgcatgaaagcaattgtactggcttctgggaaaaaggaaacaagaacattgctatggaacttgttacccagagaaaggaagtgaaaagatttacaattataagcacgaaattcattggcagattacctgctttatctacagacagattgttttggggtttggttttgtctaggcagcctctggccaggctccttaattgcttgctctgctaatatttcagcttcctctcttgactccttgaggaaccaaccgctctttggaagacaaacacttagccacctctgtgctccagggtaaccctgagaagctctgctgtctggggcaagctttctttccaaagggaatgagaggaaggcaagcaggcagggtcctgcagcgtcaggccttctggggaaagtttcctcattttgtttgacagggtcctcagtacatcagacacccagatttgaatataagttcagagcctgatctcaagctaaatcagaatgctttggggactaaccatgatcgagaattggccaaatagtatggcatataaacagccatccagccagccgcaagtaaaggaacgtttgatccttggcaccttaaatgattgattgccttcaataggcaaactgctggtctggaaatctcgttgaaggctgaatacttcatgcggagtaggacaagccttagcccaccttcaggttgaaaggaaaggccataggactcaaaagataatgactctgaaactaaactccttccttctgaagctgacagaggtacttagtgcatctcaagactccatctcataaaactcatttgtgagggatttgctctagatttttctaaacattttttcatctattgtccagacttgcaaatccagtgtggacctgatggagatacccttcacacctgcgctcccaccccctcggcagggagacgtctcagtagaggagaacacacccattatgctgggatttgtatttataaatcacttcccttttagggatgagcggtgtggggcgtgtgtgcgtgtgagtgtatgcgcgtgcgtgtgtgaccctcaagtgtactttgctcaatttagacgtgcagtatttccagaaacaatgaaaaaagtaagatgttttcttctttatgattctgctcaaaacaccacgtgccgcctcagagctttttctagagcctcggtcctcaatgacgcgcttgacctgttgatgcctcagcccagcgaagcccctcacctgtgccccgggcgacagctcttcagtgtgcagtgcaggcctggggtggactgccaggccttcgctctgtgccagcaacgccgttcttgttgctcctccatgaacaggggtacaagccctggcccctcctcgacactaagccccccacagactcagcctccaaggaaccgctgagcacccttgaagcatgtcattgtcagtgatacctttttattctatggaactctaacctattcgtgtcatattgaccttttgctgcatgagtcataaattatgaaatcagtcttacagtttttgaaatgtagccagcatttgtaaggctaaacctttttcatgaactgaatttaagtgaataaccaagccacagttcctcctcaaatggagagtgatgatcgacatttgaatctctttgccctttccaacggctatggcatcaggttctaaaataagctcgtaatttttcctgttattttaataatatggaaatattagcatagtgtttcttttgatagtgatagactataatccatatttaaattttatagagaagaaattttattgtactgtgatgtagatatttattatccaggtaaggatttgcccggtgtgtattttttacaattgagacattttactttaatctttaaaaaaaatgcattaaaaacacactcaaaaaaaaaaaaaaaaaaaaaaaaaaaaaaccagactgggggaaaaaaggtttggccttatcacagaatttttactgtgctgtataaatgtttgcaaatgcgaaaagtgtgcatttatagtgtgtttccacattaattaatgccgccttcaagagcaatattgtgcaggtaaaacgctgtttgtggctttctgttgcacagttaaagctgacccaccctatgcacaagacaatcaaatataaatctgtcctcctcaggatgcagataatactcatgtaaattatggagcacaatgtaagacaaaaggagacactttacatatgtattgttgatacagaaattatcagggcatgaatgagctgatgtgacattatgccacttctttcttttggttctcccttattaacttggcatttttaatttgaccatagagccaaattagttctccatgctttcttcgtagaaaatccttttttttcccataatgttttcatgccctgagaatcagaaaaatactacagaatagaaaaagatttacagtcattggaagatttgtgttttgcaaacagtgttaagtgatattgctagatggtgatatttttttcagcctaaaactctgttgaaatctgtgatcaaaatgttttaaactatccaaaaaaaatttgtatatttgggaaaaatggatttttacatagcttttgtatgcagatataaaactgtaattatgaatatagtgggcgtagataaactcataagcttaaattctaaaaaagaaaaagcttataacagatatattttcctgtctctttctttaaatattattattttctacataggcaaagagttgcctgctcttctcacttcagctgctgccaaaagacggaaccacggatgtaaggacatttatttcataaataaacatctactagaataagcaaatttacttgagaagaaactatggagggagagaagaaactaagtaaaatgctgatggggggttacctctttggaaggggccacaaagatgaagggaggagagaggtgaagttttgcagctcaaggacaacattcatcttctcatctcaaattattcaggaatattactaacggaattatgttaacatcagctgccaacatatatctcaatctctgttgccctgaacacatgttaattgagattctttctatgacaagtaacaaaaagctaactcaaactggcttaagcagaaagctaattattgactttaatatctgggatctagggtattgcataccaaagcttcaggcatggctggatctgggtgcacttactcagtattctcaggaagctcctttttttgtcattcatgtagacttaacattcacatggcctttcaccttacggtggcctccaatagctccaggatgagctttacagctccaaatatagtgaaaggagaatttcttttctccaacaattctaatgaaaattctggcctaattctcactggcccaagttcagtcatgtgcccattcctgagccaatcactgtggtgaggaaaacagatgcataaccaaccttatcctcaggaatcctggaactgggtgaggggaaagagggacagtcagcttcatctaaactatggactgagagttgaggcaagatgattcctgaaagaaaattctaagtcttgctgctataagtggaagagaatggtgggcaagcaaaagcaaccagtgcccacaccaaaggtaaatctaaaacaacatcccatttcagtacagcaagcggttctccttcacacagaggaagctcatctccaagtttttatttggccaggacatgaaccaaataaacaccttccaaagaaagtgtttgatcgcattcttcctggttcgtgaaaacaccagttcaggtaagatggggcaagcatcattatttccctaggctagatcagttcagagtactattttctgagtttttccactctatattcaaatgactaagattaacctttatatatttatctcttgtctacattatgtacctcccaacttcctcctaatgaacatatttccctcctccaagaaattactggattcatttattgtggagagctggaacatatatattccagctaggtacaattcttaacccctttacacaggcaaagccagaagctgttgtcatgtcacaaacctggaaaagtctaataatctatgaagagaagccagaggacaaagttggtttgcttctccaccctcaagatgacagctcactctggtttttatgtttagacactcagggcaccatagctttgtaaataaggggaattgtcatcaggtttatgtacacaaattctgacacattaaatggtgtctaaaccaaagcaaaacttagtagaactactgaaatgcagaatgttacagataccatttgagcatgtatctcaagagaattcactgactacttgatgaaaagtgccatgttatactctttaaagacaatctacctacaccatacactgatgaaatcataaatgaagtctgtatctatacagtgatattgcctggaggctatattaaaatgagaagagaattgccttagcctaggttccccagaaagcaaagttcatgctgcaattttattaggcattatagcacccaaggaaggagtggaggcaaaagtgaatgaggcatagaagaaaagagaataaatataaagtgctttgctaagttggccacacttagtaccaaacaaacacaactgagtactcaattgtgtaagaccatcttctaaggggccatatgaactaaagtgatctggtgcagtggctcacgcttgtaaccccagcactttgggaggccaaggcgggtggatcacaaggtcaagagttcgagaccagcctgaccaatatggtgaaaccctgtctctactaaaaatacaagaaaaaattagccaggcatggtggtgcgcacctgtaatcccagccacacgggaggctgaggcaggagaatagcttgaacccaggaggtggaggttgcagtgagccgagatcatgccactgcactccagcctgggcgacagagcaagactccatctccaaaaaaaaaaaataaagaaagaaagaaagaatttatctactggctctcacattatcaaaaatagggctaacttccctccatgtctaggttatatgtacctggccaaagagcaggtcccgtggtgcttcacacttcaggagctaaagcaatcccgcacatggggaaacttggtctctacttccacagatgggcataccccacctttactggttggcagatcaggtggcaagtggggtgaaacaagtggccctgggccctgaggagataagtagaacttagaggctctgcaattttctgatacaagggctccttcagccaacaagttcttccaattatctgtacatgggccgtcaggttccaaagagaatcatgaagctcaatagacaatcaaacttaaatttcactgtaccatggacctgcctgtataggggcttttaatgtaatataaactggttatgtaaattaattgtcctcttaattgcattttcttgcagtaaaaaattaaatacatgtaaactaatcttttaattacactaccttagtttttcttgtagctgtttcattacaagggcaattttttctatatgaatatctatctgaaagttttatagaagccaataaaatttttttatttttccatataaaacttcacttggcatagacatttttggaaacaatgcgtataaagagtaaagtcagaagaagctgaaataaacactccttttctttcaggacagactgataatgtcctgtatattttgttttaactttcttgtacataacaccaatagcaatgaggaagatgcatatagagtataacatcttcaagttacaaatcagaaaattcttatgcccacaaatcccaatggatacagagatatgaaaaacactcctcagtttgaccctaagtcctagaaagaggctgtagccttatctgttgcagatattcaggtgggtttgcattccaaggattttatgatttctccaatgggagtttttagctctaaagagatcttttaggatatctttccactacataaagtcaaggccaagtagattctgtgtaataagttacatcaaaagatgaataacctgccaggtgcaatggctcatgtaaccccaacactttgggaagctgagatgggaacgtcgcttgagaccaggaatttgagaccagcctggacaacataccaagacccctgtctctacaaaacgttctaagaaaaaaattcaccgggcatggtagcatgcatccgtagttagctacttagaaggctgagtcaagagaatcctttgtgcccagttcggggctttagggacctgggatcataccactgcactccagcctgtgtgacagaatgagactctgtctcttaataaataaaaaataaataataaaataagatgaagaatttgagatcaccaaagatttttcattggtaagtgaactactttgtgagaatccagttgaacatttcagaaaattcacctctgtttcccccagcactttgacaaaagttccattcattgttactttccactcaagagtcccagcaaccaccccaaaggatgcgctaggtgtttgtgctgcctcccagagttcttcactatcttgttggagtatgtaacaattgcccagcatgtaatgaacacctaacacctactctatgccagaaatcatactagaccctttatattacctctaatcctccaaacaaatatggaagtaggtgttagtattctcatttggcaacagggacatgggactcagtgtgaataggcaacttatctaagatgacacttttgccaattgtcagagatcttggggttctaagacccatgttctttttacaacctgcactgagaccagggtaaagccttagccccttacaaaaacaaaaaagcaagtctgctctggaaatatttgtcatttcccttcctaaaaggttcacctactctaatgcaaaaaaaaaaaaaaaaaagtacattataaaggaaggttacctgacctctcattagattgtgtccatgcaaaaccactcattggtgttgcaacataaaatgtaatttctctttgtaggacctatgtataacccagctggctactagatatgtcagtctgacaagaggacatttagtttgctaagcatttgagggtctgatcaagttttgggagagccaaattgctctgcataattgaaaaagaatttacagtaatggaggctggaagtggggagggaaagcaaacaagatgacaggaacacttatgtttcaagatgtgacaccatactgtagctctctcaactttagataatcatcttattagcaaatgcatgatgcagatgaatttcttgtggaaacgaacgaaaagagacattcaggtatcatgtttatatagaactggtgagcgccaaaacaaaggggatcttaataatgtaattatcccagaatgcataggattctgggggttattttgtctaatttaaagaattgagagaagagtttttcaaagcagtttcatgtagctctagctacatgaagagagggctctagctgacatctggtagatacgtttacttaagactgtacttagacgtgggaataaattagtaaattgaaggttcttgtggaattttccacaggaaagcaataataaaagcccaactttcactcacacctgcaattaaaggaaaacaacaagtcttaaacaaaacatagcaaaacaaattcagatccattaaaaagagaattttttatgataagatatttgcaatatctgaaatgtcacagaattaacgtcaggaatatgcaggtagattttgcaaatcaacaagaaaaatacataaaatgccatagtaaaatagaatattcatagaaggagaggcccaaatggctaacaagtatatcaagagatcccccacctcacgagtaatcagaaatatgaaaactgacatcgctctatacccgcagattaggtagacagaaaataccaagcattaacaggaatataaaaagataaggaccccatctcccgctagtgagagagggttcagcccatttttcctagagccaggattcccattctgggaaaatacctcaagctcttacagagacctataggcataggaatcctagcatcacatactttgcaatattaaggagctgagttcagagaaggcaagaggagataaatactgggtggagggatacctaccatggaaatcactgcagcatagaaagcattgaaatagacctgcatattgaaacttgtaaaaacaacaacaacaaaacaaaaagatctataacacaatactatttatgtaaactgcaaacacaaaggagtaccatacattttgcatggaatcatatataaccaaggacatacatcaagcactttacactgggtgcctgtatagaagagatgaagggaaaaaaatgaaataaattgtagccatcataaaatacagagtatgattatctcaagtccctgcgcctaaggccattcccccacaaaactgccaggttttaaccatctctttactatctcttccctgagtcacccatgttgtagcagttactgcaagaaaatggacattaaatgattggataacagaatcctgggtgagaagcacaatctatggccttggagccaggaagatgacattaaaaatggcctgaagatgacatggga

SEQ ID NO: 459 - DNA, 2086 bp, Homo sapiens
atgaactactgtatgcaagaaatatatgaagtgcacccagctgccggcagcaattgctacatgcagtccactgattattacgcgtattttgaagatagtccgggttacagcggttgcgatgctcaggctgtgcccagtaacaacatatatatggaacaggcctgggcagtgaatcagccttatacctgtagttaccctggaaacatgtttaaaagcaaggactctgacttggacatggccctgaatcaatacagccaacctgaatatttcactgaagaaaagcctactttttctcaagtgcagtcgccatcgtattctcaaaaaaaagggtacatccccagttacttagacaaggacgagctctgtgtagtgtgtggtgacaaagccaccgggtatcactaccgctgtatcacgtgtgaaggctgcaagggtttctttagaagaaccattcagaaaaatctccatccatcctattcctgtaaatatgaaggaaaatgtgtcatagacaaagtcacgcgaaatcagtgccaggaatgtcgctttaagaaatgcatctatgttggcatggcaacagatttggtgctggatgacagcaagaggctggccaagaggaagctgatagaggagaaccgggagaaaagacggcgggaagagctgcagaagtccatcgggcacaagccagagcccacagacgaggaatgggagctcatcaaaactgtcaccgaagcccatgtggcgaccaacgcccaaggcagccactggaagcaaaaacggaaattcctgccagaagacattggacaagcaccaatagtcaatgccccagaaggtggaaaggttgacttggaagccttcagccattttacaaaaatcatcacaccagcaattaccagagtggtggattttgccaaaaagttgcctatgttttgtgagctgccatgtgaagaccagatcatcctcctcaaaggctgctgcatggagatcatgtcccttcgcgctgctgtgcgctatgacccagaaagtgagactttaaccttgaatggggaaatggcagtgacacggggccagctgaaaaatgggggtcttggggtggtgtcagacgccatctttgacctgggcatgtctctgtcttctttcaacctggatgacactgaagtagccctccttcaggccgtcctgctgatgtcttcagatcgcccggggcttgcctgtgttgagagaatagaaaagtaccaagatagtttcctgctggcctttgaacactatatcaattaccgaaaacaccacgtgacacacttttggccaaaactcctgatgaaggtgacagatctgcggatgataggagcctgccatgccagccgcttcctgcacatgaaggtggaatgccccacagaactcttcccccctttgttcttggaagtgttcgaggattagactgactggattcattctcataattcctacagcactactgggtgtcatttcattccattgcctagctcttttttgtttgtttctttgtgttgggagggattatttgggagggaaaagggaagtagtccttggcatagacatggatgaaattgccccttgaatgcgggtacttgaaactattgcatttcgttctccggtcctgtgatgtgaatgctctgaaggttttatggttgtggaggtggggtgggggacaatcattaactcaccagcaccaagcatcaccagctcccacccgtccctggtccaagacttgagtcagcaaaatggcgccacaggacactaaagaagccttaaaaccaagataatacgaccacctccacccaatcctgatgttcgcagggctgaagttaacagagcacagaccacctttagttagatgtggctttcagccttttagggaaagactcgaacaaattttcatctattcaagagcatgctgtttgcagcactctttatggtctcctaggagcataacttggaatgtacaggaatatttgtgtcctaaaaaaatcagctgcccttccaatatcatttttataacgttatggtttaattcaagttatacaaaggtgtgactcaaggatgtgcaggtatt

SEQ ID NO: 460 - protein, 474 aa, Homo sapiens
MNYCMQEIYEVHPAAGSNCYMQSTDYYAYFEDSPGYSGCDAQAVPSNNIYMEQAWAVNQPYTCSYPGNMFKSKDSDLDMALNQYSQPEYFTEEKPTFSQVQSPSYSQKKGYIPSYLDKDELCVVCGDKATGYHYRCITCEGCKGFFRRTIQKNLHPSYSCKYEGKCVIDKVTRNQCQECRFKKCIYVGMATDLVLDDSKRLAKRKLIEENREKRRREELQKSIGHKPEPTDEEWELIKTVTEAHVATNAQGSHWKQKRKFLPEDIGQAPIVNAPEGGKVDLEAFSHFTKIITPAITRVVDFAKKLPMFCELPCEDQIILLKGCCMEIMSLRAAVRYDPESETLTLNGEMAVTRGQLKNGGLGVVSDAIFDLGMSLSSFNLDDTEVLQAVLLMSSDRPGLACVERIEKYQDSFLLAFEHYINYRKHHVTHFWPKLLMKVTDLRMIGACHASRFLHMKVECPTELFPPLFLEVFED

SEQ ID NO: 461 - DNA, 2235 bp, Homo sapiens
agctcgccagagaggcaaactccagcattttatatttcatctgcccccagtgacttcactgtaggaagaggaaatgcagaaaaacaaacgtcttgaagactgaaagcctgttattcaaagaggttagcagtagactgttggaagtaaggtaggagatgtcagtgaaaaaagggatccagaatgattactaacctatgactcccaacagtatgacagaaaatggccttacagcctgggacaaaccgaagcactgtccagaccgagaacacgactggaagctagtaggaatgtctgaagcctgcctacataggaagagccattcagagaggcgcagcacgttgaaaaatgaacagtcgtcgccacatctcatccagaccacttggactagctcaatattccatctggaccatgatgatgtgaacgaccagagtgtctcaagtgcccagaccttccaaacggaggagaagaaatgtaaagggtacatccccagttacttagacaaggacgagctctgtgtagtgtgtggtgacaaagccaccgggtatcactaccgctgtatcacgtgtgaaggctgcaagggtttctttagaagaaccattcagaaaaatctccatccatcctattcctgtaaatatgaaggaaaatgtgtcatagacaaagtcacgcgaaatcagtgccaggaatgtcgctttaagaaatgcatctatgttggcatggcaacagatttggtgctggatgacagcaagaggctggccaagaggaagctgatagaggagaaccgggagaaaagacggcgggaagagctgcagaagtccatcgggcacaagccagagcccacagacgaggaatgggagctcatcaaaactgtcaccgaagcccatgtggcgaccaacgcccaaggcagccactggaagcaaaaacggaaattcctgccagaagacattggacaagcaccaatagtcaatgccccagaaggtggaaaggttgacttggaagccttcagccattttacaaaaatcatcacaccagcaattaccagagtggtggattttgccaaaaagttgcctatgttttgtgagctgccatgtgaagaccagatcatcctcctcaaaggctgctgcatggagatcatgtcccttcgcgctgctgtgcgctatgacccagaaagtgagactttaaccttgaatggggaaatggcagtgacacggggccagctgaaaaatgggggtcttggggtggtgtcagacgccatctttgacctgggcatgtctctgtcttctttcaacctggatgacactgaagtagccctccttcaggccgtcctgctgatgtcttcagatcgcccggggcttgcctgtgttgagagaatagaaaagtaccaagatagtttcctgctggcctttgaacactatatcaattaccgaaaacaccacgtgacacacttttggccaaaactcctgatgaaggtgacagatctgcggatgataggagcctgccatgccagccgcttcctgcacatgaaggtggaatgccccacagaactcttcccccctttgttcttggaagtgttcgaggattagactgactggattcattctcataattcctacagcactactgggtgtcatttcattccattgcctagctcttttttgtttgtttctttgtgttgggagggattatttgggagggaaaagggaagtagtccttggcatagacatggatgaaattgccccttgaatgcgggtacttgaaactattgcatttcgttctccggtcctgtgatgtgaatgctctgaaggttttatggttgtggaggtggggtgggggacaatcattaactcaccagcaccaagcatcaccagctcccacccgtccctggtccaagacttgagtcagcaaaatggcgccacaggacactaaagaagccttaaaaccaagataatacgaccacctccacccaatcctgatgttcgcagggctgaagttaacagagcacagaccacctttagttagatgtggctttcagccttttagggaaagactcgaacaaattttcatctattcaagagcatgctgtttgcagcactctttatggtctcctaggagcataacttggaatgtacaggaatatttgtgtcctaaaaaaatcagctgcccttccaatatcatttttataacgttatggtttaattcaagttatacaaaggtgtgactcaaggatgtgcaggtatt

SEQ ID NO: 462 - protein, 457 aa, Homo sapiens
MTPNSMTENGLTAWDKPKHCPDREHDWKLVGMSEACLHRKSHSRSTLKNEQSSPHLIQTTWTSSIFHLDHDDVNDQSVSSAQTFQTEEKKCKGYIPSYLDKDELCVVCGDKATGYHYRCITCEGCKGFFRRTIQKNLHPSYSCKYEGKCVIDKVTRNQCQECRFKKCIYVGMATDLVLDDSKRLAKRKLIEENREKRRREELQKSIGHKPEPTDEEWELIKTVTEAHVATNAQGSHWKQKRKFLPEDIGQAPIVNAPEGGKVDLEAFSHFTKIITPAITRVVDFAKKLPMFCELPCEDQIILLKGCCMEIMSLRAAVRYDPESETLTLNGEMAVTRGQLKNGGLGVVSDAIFDLGMSLSSFNLDDTEVLQAVLLMSSDRPGLACVERIEKYQDSFLLAFEHYINYRKHHVTHFWPKLLMKVTDLRMIGACHASRFLHMKVECPTELFPPLFLEVFED

SEQ ID NO: 463 - DNA, 52748 bp, Mus musculus
gtccttggttcccattctgtagcctcgtggcacttagaacaactcctgtgtgctcttccccacccccaccccacccccgtgtataccctgcttttgaaaagagagggccttcatttcaaacaagcctttcttacttggccattagctctctggggcagcatagtctgtcagagcagttcccggcacacaggccgggacctcttactgcttctcacagacagagcataacctgttacatatgaaaggggctgtgtgcttcatgagtctctgtccatcctgaggtaatgacgggtacttactgtcatctggagggatgggagcacttgtctctgagcaaagcacaactgtcccttcgcgtcggatgcagtcattgccgcaggtatgtaaatatggggtcagctgagaagaagggccaatcagaatgttctcaggaaatgcctcaggaaatgttctacagtgtcccacttgaaacacaccccccacccctttttttctcttttcttttccttccttttctttctttttctcatacctcttggcatggtcaagtttctgcttggttacatttctgtagcccaacaaatccagtctggtgaccccaagaccaaaactcctgcaatgcccttgaactttgtgccatcactgacgtagtattttcccaatctaaaagggcagctccatcctgataaacatacagatcttgccactggacaacaggaggtgtctccctggccctcacttcctgaaacgagcagttgctgtggccccggggtctgctgtcctgctcaccctgagtgcttggtgctccagggagtagagagtggcttgggtgtggttgtgttgtactgtgacccctgtatacccatgttgtattctactggggatctgacttcctgtttccacctgggccacccgaggcccccagaagacaaacagtggctctccaaagttcaggcattgctctgcaccccagtctttcagccccaaacctttgcagcttcacctctcactcggggggaagtaaaatggctgtcctatctcagcattactcctgggatccatgatagtaaatagaagtgaaaacactttggaaaggcaacagccaccagtccaaacaaaagacactacagctgcagagtcagctttctggtctcaccattgtgaagaccagtaaggagtccctgataacactgcttgactggggagagacttgccatccttaaaaagaagcctcagaaggctactttgtatcagctgttgaatacccagaattcaagacatcctagatttagtccctagcatcccaccacacatgcacatacagaaagcatccatggtggagcggtgcccctcccgtgtccctcccttcccagactccggtttaactcacctgaaccaccgcaccttcactctcctcagtcaccgggatggctacagacgtcctcatcagtttattctggtgcagacaagtgagacgcggacaagagctttaagtcacaagcgtgtacagactccgtgatgaagccactgttcctgacttctgatgtgtgaactctgaatgactcactcgagaagcctagaacttctgcctttagttggttttagactccttgtccccagatgcctacagggacttgtttctgctactctaatcaaggtagccctagcacgcttggacaacagttagatacagttctcttgaaaggaaaccttttcagaggatcctaaaatgtctatacttcccttcactaccaaagctagaggttgggagtggggtggtgatacgggggagagtacctccagcactctagaaaaccccaatgtcgtgtcccgttgaatgagaatcgtgtatctgtttccaaggggattggttgtgaaattcacttcaaccatcttctcgttctttttacaagcagtgatgtctgggtcccacaggcttcctgaaagttgagagagtactcggataactcctcccttatctgagttcccagggggactttacagaaacaaatctaaagctttgggcacacacccaagagacagggactctagtatatcttctgacactgttcccagaatccaaagtatctaaatgtccaagaaagtttagggactacccccaatgccactactttgctacaaatagcttccttgaactggtagtggtaggtacagatctcagtcaatgactgagtgcttaccctatatttttggttttttgttttgtgttttgttttgttgggttttttttttttgttgttgttgttgtttttcaagacagggtttctatgtgtagccttggctgttgtcctggaactcactctgtagacctcaaactcagaaatccacccgcctctgcctcccaagtactgggattaaaagcgtgcgccaccactgcccgactgttcaccctacaccttgaggtgaggagaggtctaggaccattattttccctttctaggctgggaggaagagcctctatttaggaggtaagaagtatgtcccaaaatatgaagggacgtacacccagactcgggacttacaaggacacgctcccagccttactgaatacaaaggaaggaagtgcacatggcttacagggatccgtggcagatcaactatcagaaagtctgttgtctcatatgacttgcaaataagactggacaagtttccaggaacatgtgtatatataataacaggttatcttccctatgggaggggaccattttgggctctggctgggaactggttctaggagtgaattggagagttgattccaggtcctggacttcacaccccctcaaagctccattcttttacagtgcccttttggtgggaggaaagatctcccccagtgtcacttacttcattggcaccacaaggctatactgctctgaagtttatactcttagaacctgggatgagggaatgactatccaaaaaaaaaaaaaaatgcttcatgtttgaaaggaggttctaagagagagttttgagaaggcaactggggcctcacttggacaaactctcacgctctttgttaatccaaacagaaggtacccagagcctccactgaccacaggccagttgtgatgtacaaatataaaggctaatgggactcttctccagccactgaacagctccccatgggcactgctttcaagtgggattcgggataaagtgttagtttagcacagggactggggtggtttcctgcagctgttgctgtactgtgtaaacctaagagcctgccccagactggatagctgttcagcccagagccgctccagcagctccttcactgagtgacttagagaacgcccatctctgtatctcagttacttctgtctgaggatggatgaagcttcatgggcccagtcaggagtctctccaagtgacagaatcacaatactacatctacttacccgcctcagtgcactgctttttatatttcattacgtggtttaggcagcctgggaatgtgaatgaaagttgttacatttgagtaaaaggtataaccctttgcccagtacacacacacacacacacacacacacacacaaaacacacacacacacacttacttcagatatgagagacaacagatctaaataggaaaccattcttccacggaagctttaagtaatctcctttaagtacaacctttatcaaaaacagtctccaggaggtgacacggaaacaaaagtgagagctgacaatacatataggttctgcctcttccagacatgaagctccaggtggtagatacccagatgcctagtaggcacgaccctcaccaacaatgtcacacagcccagataggccatagtgagaagaattcagtgccctctgtgggattcatacccaaacctcatatccccggcttacatacgaagcaagcatcagacaatttcagaatggaaacaagctaggtaagtttgacaaagtcatgaaaaagcgaggccagaggctggggtggcagaatgactgagtgcctctggcccaggaggaaattgtaatgggaaaggagctgaaatccggagagcctggtgtttagctgctggaaatacaccggacgttacttctgtgttttcacgagtgcaccctgaaaacaagatgccaatgaccagcggaacaggaacagagagctgcatggaaacgtgctactcttgcaggttttcaaaaaccatctccaaataaagctcactttaaagcgggggggcattatccccccccccccacacacacacacagagataccacaataaacagtgagctttggggccatcaggaagctaacaagtaaagccaccctgaatggctcaaggcaccaactacgaaggaccagagttgaagcttccccattgctatgtgcactgcccagggcaagtgctcggatagaggatgcattctgcctcctgcctggcacccaggaacatggtttcccacctttacctaacttaacactccctaccctgagttaggaccgctccgcactgtgtccacagaggaggaagctgacagcttcgaagggttcccaaggctcgtcgcaccaaaccatgtgccgtaacacaggtgagacagtaagacagaagaaccaaggacatgagggagtttacctggcgaggtgaagttcacagacaaagaagggctgtcctcattcatattagcattggggatgttatgggcgctgatgagatagagagtgctcagctccacagggaagcctacataggagaatgtccactgcaaagcaaagcaaggtatctgtacaatacaagggcagagctacttggggcgggagctacttactttcatttgtaagtgttttcacaattacgtagtgtgtgtgtgtgtgtgtgtgtgtgtgtgtgtgtgcgtgcaagtgctagtgagggatcatgccatagtgcatgtggaaagatctggacaacttggagaattgttctctctaccatgtaggtcctatggactgaacctaggttgtcagacttgagagcctcagcccgcttttcgtttgtcatttgatggagcaccgctatgctccagctgatacgggtcagtatctatagggaatgggcccagcccaatctactgatgtatctcagaatttaaaaagtgtggcattttagagtcagggtataagttcaactcccctcactgcgttgggcattgagtctcaaagatgctgccttctccagttactgaggagacaagtagagtttggagccaggcatcttgctctgctctgcatcatcgggcttttctgaaacatgctaatcatgctcctcacacgaagggtctgtctgtcaaggacagcctagaagtacttgctttgccgccggaaggtctggtctggctttggaaggcctctgtgtagttgcacctcacacagctgtatgaattcatgttgtttttgccactcacgcagatcttggtggccttcaacaagcggatgctggctgcagagacagttaagtgggaggttgctttcattagtgcttatgtggctcacacaggtactcaacaatttaaatgctttgtcacagctggtgtgtactgtggtccccagggtacagacagagtgaacgaggttttaggagtctgggggatgggaggtaattctgcctgaacttccacagctcatcagcaggaagtgcaagtttggattcccaagcccaagacccctgctgctcctaggctggcctcagttgtacaaagtgcctgtggttagtgatgcaactgccctggtctaagatgactgcttgggatctgcacataacctagggtgtgtctttcagtgcatgcatataggtatttctttcaggcctagggagggaacgaatgggtcctatacagtgcttatttctggtttagtggatgcttcaggctttagctttgactttttttttttaaaaccctccaagcatcagcacccgactatgcctgttttgacagccctatgtccatacagaccatactgtctgtctgctcctccatccctatatttccaagctccctttaaagtccataacaagatcgaccaaagacctcaccctgcttggtgtagggcctaagcctattgtagcatctcacaggagtgtcctggggccatgccctggtccttccagccccaccccactcacatagatccaatcaccccttggggcatccctggctgcctctcctactgctctgaagaacatgctgacgaagcctgtcagtgacttgttttcccaggtcactgggacccttctcctggctctttccacaacctccttgagtttttgagacaaggtctcaccctgtagcccaagctgtcctggaactagtaaatagcccagatgggcctcaaacttgtaacagtctcctatgtcagtttcccaggtgctgagcaaatgtactcttgactaaaccaagtttaactttggcagatggaaaccacaagcgtggtcatcagggccccaggattggcttgtgcaaggaactcgcatgttgctctccacctaatctggaaaaaacaccaggactttgatgatatcatttgagaagtaggaacgtaacctaagcagagcttttcctaaaatgaggggagtcatctctgccatgaagtatgactgaggaaagcctttgcttgtcagcgactttgcacacttacacacccagccaagaactgcccccagcccagtgctgcctgggctttaagtcacttccaagccagagtagcccccagaccccatcctgaagtcaaaccacttgttttgttctttcatgtcccacggtaggcatgattatagatatagctgtatagctctttgtactctgactgcttgtgtttgtgacatccatattgtcacacacacacacaattctcatagctgtactgagttccaaagtttccacattgtgattcctttttgctcttgggcatttgcatgctgttatgaatagtgctactgtacacatcctaagatagtatatgcctgtgtatgtctggggtatgtgccgaggagtagaattaatgggccctatgtccttcccgtttctagtttagtagacactacgactgatgcaaacttaccgtctgcccggagtatccagcttatgttcatcaaaattgaaaactcctctgctgccacacttgtcttgacgagttccacttggaggtccctcaagtctcctggagtgagtgtgtgttggaccatccactctggagatggccctgggaggaggcaaggggacttcatttgatactcctgtttccggcccagtcagaagttacttcctccaagtgatctctcctgttccatcacctgttcacagctcacttctgctaaggaaagctaaactcctggatcctggcaggtttatgcacctgaataaattctctctgccttatggtcccaaactacacagtgtttgtgtatttgtgtgtttgtgtgtttgtgtgtgtgtgtatgagaccagtcctcctttctccaagcctcacccaggactccacccaggacactatgacagctcttttttaacgccccatctttgctgccactgaacctttcactcactctccctagtcaccttcttcgacaaaacccacccattcttcaaaggctaccatgtcgggtacctatgtgtaaaacatttgctgcctactcccaacagtggtatcaccccttgtaccctaatctctgtccctctgtggggtgacaggtactgcttcccatgtagcatggtgcatcccactctgcctgtgtgctaattcactgggaggccagcccatttcaaacacacccttactccccaaagtccgcctttcctcatgagaacctcattcctgttagttaacaaggccacgcaacacactgtgcctggtctcccgtgaccttcccagttctctaatgtacccacctgtctcagagccacactgaatagtctgcaggaaagagaaaccaaatgtcatgttgaagccagtaaaccacactcctcactttaccaaattaggcaccacaccaatattgttccttagatgcatatacaagtgacaagttttcaacgaaaagatgagccgggagctggagagatgaatcagtggttaagacagcatattgttcttgcagaaaacctgcatttaggctccagctcccatactggacaactcacagcaattgcctgtcactctagctccagaaatcatagtcgtggtttctgagggcacacacacacacacacacacaaattaaaaatacaattctttaaatgttttaaaagaaaagagctagtttgattgcactttccaacttgaggggaattgagctgccccactgtagctgtgatgggccctggcttagccattggtacacctggttttctggcagctgctcacccccttgaagaccaggtaggcctcatgcatgctttctttccctgcctcggattactgagggccacggtgaggccacttgtatcatctaatgcttaactgttggttttcaggaccatgtaatgtttattaatttcttcaaattaaagattggctatgcaaagaggagaagaaagcggggagcaatgactgcagcccgcaggacacacacacacacacacacacaagctcatatcatacttctgaatgatccagaactcagctgagctacttagaaatccgttggggacagtgacctcatctttctaaaacagctttcaaaaaagtaaaacccccctactgtctacgaaaggccagttactaaaccctttgacgtttccattaaaagggaagagtactagtttggaaatagtatattgagcctaaaacatttattttagttgtcagtaatcttcagtggcaagacacaatgtgacaaacccaaaggactcttaagatctcagctctctcatttccaaaaccttggtgaaggcagaaagcagaggttttgatggagcaaatggggtttggatgatgtcatccactgtcctttgctttgtgacattctcttattaagcaaatgagccacctactaggaaccaagttctacttgaatgggagcaagacaaggtgtgtaggaaaagccaggtgagggctctacattttgcagagttcattcaatgttcttcacagctgcccccaggacagtttttttctcttgcacagagacggcaagggcttcaggacaccataaataagctgtgactttccacagtcaccaaggatgccttccaatgtgtgaagagagcagggcttgcatctgaatgccttgttgaggatgcgcttttccctcctagaaagattctttcattcatggggactggagaagaaaggaaagctgccttcaggagttaacatggccctagacagaaaggaaaagcaagcaagcaaactgatgcaggctgtctgttgacccaagaggtgggcagcacagatgtaagcagtactgtcttgtttgtcatcattaacccaggacaaggcatacctgtgtgagttgagtaccaccctttttctttttgaggagaatactacgactcaaatgcccaggtggcatctgtgacagttctaaacctcattcccctgggaagcagtctgacaactgataccttccaggatggcaatagatgggtggtgtgagttcaagacccatcgcggttagctcaggggtgcaaactggcccctttctaaggatggttcatggacaattccttgacagttgagctggcaggttttcaggcgcttgtcgcttgtcagggttcagctaaacggatgggaaccgaaagggtgcccacaatggagggggatgcttaccggctctcgaggcagggcgctcctgcacgatgcagccaagatcagcaacactagcaacatggcccggccactggccaccgcccaccaccacgcggagctggggccagaggtccagggtcctcttatccaggcgcccgccgcagttctccgggctccgcctcccacagtaccgccctgcccaagccggcgctggcctggtcccaagacagtaaagtggccgccttgtcgccctcggggctcgcgggggtaggcggggtgcgaatgactcaggcccgggaggactgaagctccagcaggcgcggggcgtgtcgagccccgcggcacaggtgtgtgccgcaggccaggtggggcgaccgcacccgcgcctggagccagacggagcagctcgcggcactcccgggacgccagttaaagagcagcgggcgaggatcagcggccactgccttctcggctctcctggctcctgtccttcgcgtcctggcccaggtgcggagttgtcccgggtgagtagctagcttttcaggtcctaggctgggtgaggacctgaagcggaggggctcaagccactgaaaccttctgggttttgagagaactagcgacaggaacttaacagttacaaggtaacagtgataggaatctccacccctggcctctcaggctttctggttaagtgtactcctatagaatgaggcctggcggttacatctggggtcccgaagctggtgtctcagcactgtgggttccgagctaaggttctgacatttggcagtgctgcttctgcctgagtgagatctgcccgactctccaccacctctcggaccttaattttgggaaggtgggccagggaccatccttttgagatgaaatggcttgagagggggatagcccagtatcatttggggttagagaaagggctacagagcctggaattctgctgcttcagcccttcctatatcgttagcagagctgggctcaccagacacgtagacagtggaattggagagagcttcaggcacaagtcctgcttctccctgctaagaggttgggtggagtcaagtggctgtatttgctgaagcccgactgggatacagactaaattcatcagtgagacagacttcaggtgaagattctggttttgattcacctggagaaggctccgtccctagcctctgttggattgcaaggaatagtttcctgagaaacttgttctggtgcctgaccaaggagattgacagaagggaggttgtagccccaccctcgcctggaactgggccatcctgggctcccactcaacctcagcgagccgttcaggctcagtggttcctgggaacaataagctttcatagcagcctttctgaccggtaaacccttgcctgctaccagggtgcaaaggtgcatgctcttggcatggagctgagcactgtgacaggaacatgcaaggccagagtacctgccctggtgggaagacaaaatggagacggccttgttttccagcttctatctgagaactttgccctatggggctgaggagccaggcagatgtttagataacaatcagtttccagttttgaaaaacagcccatggggctgtgcagagcaagtagagagcactccctctcagctgagcaagtcacagccgattgccaacacgtgtttactcggtgagtagctgagtgccagtccctgggctgctctggcagaacacagcctgctgtagtcagctcaaggcaaaaggcaaggggctttgggacagcagggatagagaggtcaggtccagggacaagtcagccatttcttggcccctgagacagaaaggcgggcaggaaagttcttgatgtcacatgcacacagaaactggagcgacctctcctgaccttggcaaggggaggtgggacaaacataaggaattgggtacttgattggcttgttttgagaaatggctcagggcagctagttgggtttcttatcccggagaagaatctggtggcaaaggagagaggaagagttgggtgaagggggtagaaaggggtggaagatatgggagaatactcaggcaaggatgccaggacagcctccgaacactgcctgagaagtgccaccaacccacctccaaggccagtgatgacaggcttagagaggacactgccctgtctctgggtcaggggcatgtatcccgtggcccatgtgcagtggaacaatatgcaagcaaggccctgcagctacagacggggttatagctgggcgaagagcctgtacctgcctgtcttcaggactctaacttgccacaagtgccctccttacccccagagtgatgcaagttgattgaacatttggcttctaagataaccagctggagtggacccacctgcttacatgcctaagcctggccaccagaggcagggccacagaagtaaagaaggcttggctatttcacatggatgtatggcaagctgctgctctcctcagagcctcagtttcctttcctgtacaattaaatgagggagccatcatagtgaagaggtgtctggaatctgacggaagcaatcttcagagactccacatgctgcccgtagtcatgcattctgtctgcagggctactagagctacttggcactgggaaccttcatgtccaggggttcaacggctgctcattaaatcccagaacaaatgaataaatgagcacgtgccttcccccaaggccatgcctgagcctgtacacctgggaagattgctttggctttcttctatcctgtaggagaaggctgtagtgtggtatggccagagcctggaggatgactctctccatcacccacacttccagcaggtctgtgtggccactgcagctgagactccaaacctccaggtttcctggctctacgactcacttgctatcacttggccatggccaaagctcttggtctcttgccacctcagtttccccaagaaactgacattacctgtcactctagcagagccatcaggaaactcagaagaaaacagagtcagaggaaagcaagttgaaaggtttaaatttgctgcgtagattttgagcaggggcgacaagacggttaaattttttttttattctaatatctccatgttctcaaatggaaaaattccctcagacctatacataagctctgctgtgtccgtcctggagagaacagggccctgagggttgttgacatgccccgaggctagcttccacccacacaggtggaattttccattttgtttttttgcaaatattaatcaagtctctgggcggttaacagtagactcattgtctcgtgaggagggagctggttctggcgaatgccagctgcctgccagggctcttggactggccctagctgggatagcagccactggagcattcctgcctctggtgctacctctgccctctgttccactccagccgcttggactccgccatgcctaatttaatgctatatttgagccagaaaccctgagagtcacccagggcttgccagtccttgatcttgagcctgggcatagaactccatatgttctttgcccagtacaaggggcataggaaaaccccagactcagccatggttatagttcagtgttaatgctaccccagccaatccaggaggtgaaaccacgtgagggcatgacctctggcatgtgacctctgtcccacagacacttgtgttgatttacgggtttatattttcacattgggacttcaaaaagtatagaccacaggagaaatggggaagccattgtctactctcagagcctcaatatagacgggagtcagccccgtgggggtgcaaggcaaccagcactgtggtggaaagagaaggcaggatgatctggggtgtggttgccaatagtcaggttaaccagtagttgatcttattattggtcgtagttgaaaggtcccgttctgtatgttgtggaagagaacacagccacatggatgaggttaagtaaggaggggctcggggttcaggccatgacccgtaaaccgagggaaatctccttgggctttgagctttgcatttttaaatattttagatttactatttccccgcaccctaaagtctcaaaatcatgaatcccctgccttagcctctccctcctaggtggcggggctataggaatgtgccactatgctctgcacagtttcctttcaccctcataaaaacaagaaactgtgaagtagacagctgcttccattttaaagacttacttattctttgtcttgtgtgtatgagattttgcccgcatgtatttatatgtactgcatgcatgcctggtgcctatggagcactggttccccctggaactggagctccgggtggttgtgagccaccatgtggatgctgggacctgaatccgggtcctctacaagaagagcaaatgctctgagccaccgagccttctctccagccccattcccagttttataagtcaagaacctgagtcccatagaagccgcctcctgagcgtggctgagctgtaatcaactcaaggatcttggccagcagttttcacttgtctgaagtatgagacttgaacatggaaccccaatgtataagacacatacaagttcatttattttataagttggtatttgcgtttttattttgcacgatattcccctccttcagaacccgaggctgtgggagctaagtgacgctaacatgatttgtttctgcaatgagtttattgatagcagttttcgtttactacggtgaagtagtcggacacctttaagctgctctcccttgctgccttggggccgcctgtggctaaagattcagaagtttagaagggggcacagtgtgtatgtacattgggggcctgatcacagctgtgaagggctggagcaggggaggtactagggacccacatcccactctcattagacttggaggtggctcggtgcgcaatggaagatagtatgcaggtgaacatgggcttcagactacataggctttatggaacatttgctcttaatgtaaccctttctaatgtaatataatgtaagcgttttagggcaaatgtttggctccagccggctaggctaagccacatacacatccctgtatgccagttagagatgaggagaggtgaaagcagagagaggcagttgaatccatgtggccatgttgggaagattgagcaaagagcccagtgactccccaacctgtcaggatgcatctatatggttattgaggacaagaaggctgcaaacagacagaagtcttgaacgggcctgaacctagaaaggaaagccgtctcaggaggcagcgatgatggagaaaacaagtgtttgtgttggatttggaaaaccctgaagtaaggttgcaacaagaagcctgcattagaaaagattctgagacccactctgtggacctgcgctgtgcacagacatattccaccaccctgtttctgctgtagaggaacaaataaatatttttaaagaaaaaaaaaaaaaaccgaatagggccagggctagaagcaagcgatcctgactaaggtgtagtctagtttgttagtgtctctcctgattctgctgttggactaaagaagcctttattgcttggggggacaacgaagtgatccagatcatggcctcacccagggacaatggcctcacccaggggtaattgccctcctctagggttgttctgccctggttggttctgctgttggtggcatctaggctaacaaacttctctctctgcctcagtcttcagcggggaccagctaggctaggtgggtggacacacctcagtcctttacatacctctgccgagtcaagcaggagcgtgacctgaggtaaacatgacacacacaggaaagcagagaagccaggttttcatcctgcctttaactgtcctgtgagcccaagggggtgtgaatcctttgtactgagagtcatttccacagtgcctgctgcctttcttaatgaactaacgggtttggggaggctccagcgtgcagggtgcagtttctaacgagctcgaacttcctgtggtgaatgagtaggtcttcacttacttattttcagactcttttcatttctcacgggccgatcttaaaacacactgaaaatcaatcccagtaacaaaggaagccacacatagccccgtccgttgcaagacaagaggcaaggtcactgaaccagatacctggagaagtgtctcaactctgccttccctctggacttctctttcacagaaaatcaggatagtgtgcggccgggccgtactgcatccagttacttgcactgtgaggtgagggctgactgagaaacttttctgacttgaaaagacagttgcagcaaagtgtctacagaaggcctcaggctctggaccgagtgagcagggtctgtccagtgccttcagcttgtcctctagcctggaccaggcctctgccttggtgctttctgtccctcccttgtgggtgatatttgagattctcagtcaactgtggttgaaatcctccctgccatggaaatttgaaagtatatgcaaatttagctagaggaaccaaggtgggaactcctggtctgttcccttgtttgagtttcctgccctcctagcacctgtggggaaccctgtcctttttttctttcattctagtctttgtatactctttacaaaattcctaatctgcaatgtaaatgtcatgtaaatacagtattgaggaaataaagacatgtgagtagttttttctgacaggtttttttttttttgtttctttttgttttttgtttttttctgaaaaagtgctcatgagcatcccccaagaccactgcacatcacatctaacagacaagggtttcttatcttcctcagagctgaattctagtccccaggatctagctaagagccagatacaagcatacctacctcttatttctctcacaaactgcagatctgcccctaccctgccctcccaccccacccccccatgtttatttatttgagtttatttttaagaaatgtgtgtgatttccccacatggattctgtgcacagtggcccttaaatgtcctctgttttctttattttctgtgcttgacgggcaatgcacgatgggcatatctgaaaacgcgatgtcaccccagctttggtgttaattagcatcacggtattttaggcagggtatttcccaggtggcattgcagccttctgtttagactctatccccagatgaggagaggagtccttgcctctccgtcatctcctttacatgatgtcaccttggtgagatccaagctgacccttaacctgtttcttttcctactacttctgctcccaggaacccctcattcttgggacgctccagcagccactatggagaatgtggtggggagagcagtggcgcggtgaggacattgttagggcagggtagggaggcttctagggaaggagctatggagcctgagcagacagggtctgcggggtaggcagaatggatgcccatcacttaggagaaggcagtgctcctccgtaccatggcttccacgcccaccccttcctacttttatagcatgtcttactctctacctgcttctgacagccttaggcaacgaggaatcattgctattggtaaattaaacaacctcccatctccatgctggtccctgctgggtgcagcttgataactcaagcccaccaggctgccagtctttttgcagctctgatgcctgtgctgggcccatcacaagatgcccctgaggagttgttcattttcctcttgtctccctgtgactgcacaagagcccagacactgagacccacgcttgctcagttggggccactgtaccaagtcccatctgctctgaggtcctcctggctgttctgtccactcacccatgtacagtgcagcagagcacagcccctacaggaacaatatatcccctggtttacagtataatggctgcttttctcatggctgtgaccaaattcccaacagaaacaactttagagtggagaggtttgttttgatctgtagtctgttacagtgggaaggctggatggccgagtgggtcaattactggataccagagcttgtagtaatggttttgtgcaagttgccaacaaaagatgccatcaggcacagtgggctgggctataacctcacggtccatacccagtaacttattgcccagtctccctatcccaaaggtttcgcaacctcctaaggcagccaggaactaagtgttgagtcacatgagcccaccgcgggtagttcacattcacactggaaaaggcaagagggcttatagcccacattaactccccagggctccccaccttctgcttccatggagatcagctagagagcagggataggcacagagggcagattcttgaatacagaagccagtgtgtcacctgaactggagcaggtgctatgggagggagatgggagatgggagatggtggcattcattccaagaagcgtcaaggcagggagcatctatctgtctctgaaatcatcagcatataggtttctctgaagttgtcagcatataggtgtccagctgggaagcactggctcaggtcatgctccaagggcaaggccctgggacatgtgatatcatccttgaagacccccagctcttaagggttttcttagcagcctctgctccgtgtacaaaataagtggacgtggacaatgaaagagcaggcaccgttcagaatggcgagaacagactttattggtgtgagaggttggtgccattttatggccctcattttggggtagggaatttcccttaccccattttgtcccatccaaagtgtcttcaccaacagaaccagagagtatgctgcctgtgccaccagggacaagaggacacagccttgttctgtgtgtccagacatcgtctctcagaggctgagtatctcgctattgtgggagatgagactctctgctgcagctgtctactacgtgactgtggagagaaagagaaatttaagagaattatggtcctatgttgatgatataagaaaaggacaggaaatagatttttgaagaaagtgtcttaagttttattaacggttaattctgctcatttgccaagacatttatttacatagcctgacctcaaactctccatgaaccccactggcattaattagggtgcccaggatattcagtgaagaacatgttatagtagctttgatctgagtacgtctaggtagccatgagcaggttatgatctagaacttcctgggttcctactgcctggtacttcctgtctgtcatagcacagatgcataggcttggcctgatatctcagacagccaggggaaatgggctataggccatgtgcagatctatccttgagtgagtgtatctctgcagccagtatgacagagcacagcctctaagctaggctcggcatatggaaagtgggactcagcaaagtccctggtgaacgtggtcagtatagactaaggcttctctacaaagctgatatttgagtgaggccagaggacagggaggagtgacccagttgaacagaaaccgagacaagtacctggaagaaagagcgatgcatgtcagggtcgagtacgtgaacttggaactaaggagcagcccagggcggggtaggatcagacaagcagagaccagccaggcaggcttaggaacaacagggcctctgaggccattaggaagctcttcctggtcttttagggagttgggttgccagggatggagctaacagtgagattcctattagaaccactagacagaccacaagtctcagctcttagattgagactccaagctgggctgtccctgcacttaaccagaaactatcggtctggcgttgaggtagtggtgccgtcagccaggatctgttgggctgtaggaaagcagccaaacctttgccaactctttgacctccttggctctggcatgggtgtttggtgcctcatgcccagcccatgtccagattgttaccttttggctgcctcagtgcagcttagttggtagggactgtggtgggggcgggtagtcctctgacttgatgtcttggggcttgtccagagacccaggacctcttcaggtagtaattgtgaagatcctcacagatccctgtccctctgggggacttaatggcataccccatgcccagtgctcagcagaggcaactgtgtctctggtcagttcgatgcatggtatggtgttcctgcgtgatgacgtagaggctcttcttcttggcacaaatccactctcagttggcaccctcatctgggtcctctggaaatggctaatcaaaacctgcactagaaggccaggtgacaaagttcatttgatctaccccaatccttgagttctgagaatgactctgcagtttgtcaagggtggctgtggcctccagcatgggcttagttgctgccctgaggatctacgtcctaggagcaaggacaggtttgaaggccaaatagccttgaacagtgctgggactcccttggaagcgacatttctgggccttgaaacccttgagtcgctgagctctggactcaagtctacctgagcctgtctaaggtgctggggccatgtggtcactatttaaatgggtcacaggacccttttgtatagatggacacacttcttagtaagcagaggcttgctggtaagttttgaggtcgtagtttctctgtggtgttaatgacccaggaccgacccctggtgcttttggtctagctgttccttttcaattcctggaagtgaggtgcctgagacccaggacctcaagatcccagtgttcccattatctcctggaaagacttactgctccccaactaggcccagtgcaggcaaatccagatttgtcaaggagcccaaattcctcaggctgaaacaaccctatgcttggctaggttgtgggcatggctgagtgcgcccagcattcttcaaagctagctctttttttggatgactgcaaaccaggagctctggggtccatgggtctgacattagtatagtatgtacttgttatgtactgggagaatatttggacgcgtgcgcgcgcacacacacacacatacacacacaaacacacacacacacacacaaaagggggtgctgttcaaaaggtctttcaaatggtttccagagttccagctgcacagctccaaagacagattgtatccgaagtaagagactcctgaaatagtgggtaagcactttgttctggctcctttataacttaacaccaccccaaaattgccagatgtgtgtggctggtcactgacttaaaaccacaagcaacccgaatgttctcaccacgaagttgcacatactttctgatgcccaatttcagttgccagatgtaaagtcttagaggcctgtgatagcaaccgcaacagcaaaacagcagggggtggtggccctgggtttgggattctccatttaatgtcctctcaggatttgatttgtataccacatgtggaccagaccctaactcacctgagttggtggcaagggtgtcatggtagagcagttgaggacttgtaggtggtgggggatatgtttctgcaatgccgggggcaaaggaaaggaagggaaactgaaccctgagagggaaaagcttctgtcttctcatctcctcagcaggccacacctcctggtgaaaggctcctagtgctgtcctttgtctcaggccttggaactggttgcctggattaggaaataaagcacagcagatgcagattggaagcttggggtcgcatttgctgcccagagaaaccgctgttctcagtctcttggtttgactagatggtttgatttggctgtttgacgtctttatggcagtgctcggctgtgtactctaagccagcctggggccgccagcctggggccagtaagtttagcggtatcctgaactctttagaccttgcttatccaactaccagtcactttacagcacccacccccagggattgtggggctctgcatttgttttattggtctggtctggtttttgtttttgtttgtttgtttgtttggtgagggatgggagtggctttaatctaattcttaaatttactgtgttactttagcatcacaggccatttccacagttcttcagctaaccagacagacgcttcgctcccctattaaacagtttgttttctctgccgacagactgacctattcttcgctatctggtttatttcacttatcataatggcttcacgtttcagttacaatttagcttgtttcacattccattcctttctaaagatgaataagagtccattgtctttatgtaccctgcttcacttatctgttcatcagaacatgcaggttggcatcttcccacctggctattgtgattagtgcagccacagccctggtgtggcattgccaggcagtgccgggggtgggggggggtctgcctttcatcccttctgggaatacctacagggtaggattactggaccatgtagtaactcttaactttttgaaaatcttccagcttgtacccccggtggctaacatttgactctttttcagcagtgtacaaaggctgtcaacttctggacatccttggcaactcctgctatttcccatcagtttccattccaggcgtaccggtgggtacagggtggtatttctttgtggctttgatttggctttctctaatgactggtgggggcttaagcatctttttgtgctccaccacatcttctttagaaagcctgtctactgaagagctcttctgtctgtgtccattaggattttgctggtgttaagttccaggatccattgtgcatcctggatattagtacctggtcaaacaggaggctggcaggtgctttccactcagtgggcttgtcatttcgcttagattttggtttttgaaacagtgtctttcagtgtagccctggacctctacatagatcaggtcggcctcacacagtgacctgtttccaccgtactcagcttgtggcttcactcttgctagtgcccttcgatgcgtgaaagtgttaacatttgtggaaccgaaattcatctatattttttcttttattacctgtaattttggtatggcatctgagacactatttccaaatctaatgtcatgaggattctccccatgttttcatcagagtttttttttaattaatgtgtgtgtatgtggtatattcacatgtgcatggtcatgtgagtgcacatgtgtatggctgtgcatgcatgaggtcagaggtcaatatcaggtgtcttctatacctctgcatcttatttatttacataggctactccaaactttagagctctgcctgccctctatgtcctgagtgctagaattaaaggcgtgtgctacctcatcagattctaatgtttgagctagggtttcttattgagcatagagccccttgttcagctgggctggtttgccatcaaggcccagggaccctcctatttctggcttcccagcagtgagagcatatacacgcagtgccgtgtgtgtgtgtgtgtgtgtgtgtgtgtgtgtgtgtgtgtgtgtgtgtgagttcatagtcactgaataagaacatcactcttcaccttttccccctgaaaaaggtgaccaagagctaggaaggagagtggtcagcagagttccataatcctttctccacgttccatagctctgggtcacagccctgtgtgtagccaaggccagttcttacatgtgttctccagacttgagttcaggccctaacggttgtgtagtaagcacgttacttacttgagccatccccccagcccctgccacatggccttttacataggttctggggaccctcaactcagagcctcaggctggcacagcaaccactttcctgactgaacatctccccagcctcttgggctgacttttgactgtggcaaagcaaaggtacaagttcatgctgtagcctgtggctcgcttcccaggtggcgtttgctaagaagacctctgtttcctctttgagcgatttaggctgcggttgaaaaccagttgggccatctatgcaaggactcgtttctgcattattgcattagttcaaatgtcttctgacaccactgcagtttccgcaactatggagttgcagtaattgtagaatccagaactgtgagtcttctagttttgttattcttcctggggttttggttcggtgttttttgttattgtgtttctgatgtgtttctaaaaagataaagaactatgagatgtgttctatgagggtgaagtgcaggggaagggggtgcctcagtgggtccatgccaaggcatcccttccccttgagggaccaaccacatggtgggatagtatagaacagagtttattcagagcatggggaggggagctaagagggtagtagaggcagaaaaaggcagagagggggagagagtagagaagtagaggctggccatggccatgagctcatggagagagggggaagggaatgggaatggggaaggggagagcgagagcaggagagaagcaagagatcaagagagggaggagggggcaagcagccccttttatagtgggccaggcctatctggctgttgccaggtaattgtggggaggaccatacctggctattgccaggtgattggggggtggagtctagacagaatgctaacagtttctgcttggagtcccttgagatcccatataatttcttaaatgaatcttcctttttttcccttcgttattattattttattctttcatgtatgtacatgtaccactgtgttcatgtgaaggctagaggacaacttgtgggagtcacttctctgttttccacatgtaaatcctgggctcaaacttggattgttaggcttggtagcaagcacctttacctgtagccatctcactaaccccccaaatgaggttttctacagaaaaaagaaatgccattggcatgcggtagaagttgtgtaggaactaccatcttatcggtagtacaggtatcttgacaacagtaattcttccaatctatgaatgtaggaatttttttctattttttataccatttttggtatttttttaagcgacatttttatagttttcgatagccagtgtgacgattaatcctgacagcctgacaggattcagaatctttcagaggccacggttctggttgtattggagggggcatttctagaaatttgacagggaggcaggagcatctgccttaaatgtgggtgggtcgatgtcacaagccagccctagactgaacaagaaaagatcggtggaggccagcattcatttctttctgctgcccaagtataattgcaacctgacagccagtcacacccctgcctgagttcagtcccttttatgatagactgtatcccctcaagccgagaggcaaaataacaaacaaacaggcattttgttacagaaaggataaagtaaactaatacaatgttgcttttaaacctttggttaaatttaggcctaatcttttgttttctgtgtctctctgtctctgactttctctgtctgtctgtcactctctgtctctctctctctgtctctctctctctgtctctctctctctctctctctctgtctctgtctctctctccctctctctctctctctctctctctctctctctctctctctctctctctctctctctctctctctgtgtgtgtgtgtgtgtgtaattgttttggcaagaacttgccatactgtgtagcttctgttcttagttgagaaattctcttgctgtcagtattgagcacaacacaaagcttacctattccgctgcttctctttgagccagcttttatcttcagcagtttcctccattgtttttctctatctctgcttagatctctagtgtttccttccctctgctagccttggtttagtttgttctattttctagttgttcacaggataacgatcttccctctgaaggtgcagctctgaatggcctgataaaactgctttcaccacgttgcataagtcgtggtgtctcgtgtgttctctttcgttcctttcacgggtttctaacttcctctgtgatttttttctctgacacattggggttttggaggcattaatttcatattttttgtgagttttcttctgcagattgattcctagttttgttccactgtggtccaaatagactcctggtatgttttctgtcttaaagatttataatctgtcctggagtttggtttgtgtacacttgaggaaaaatgtgtttctgttgctgggttgagtacttggtatatatctgttctgtccgattggttcatgggggttttccctctattaccttattaatctatcatcattgaactctgaacattgaagtcttcagttattgttcaactatttccccttcaaatctgtcagtttttgcttcataaatcctagaactttcatgcatgtatgaattgcatgctttaaaattcattcaggctacaagcgcctgaggctttcttcctatattatgactacgcttttaggatctatccacactgatctgagatgctgtggttcatccagtgatatgtgggattattcctcctcctcctcctcctcctcctcctcctcctcctcttcctcctccttcttttcctcctcctcttctcctcctcttcctcctcctcctcctctttcccctcgccttcttccccttccccctttccccttccctcctccttctcctctttgcctcctccttcccctccctctcttttcccctctttttcttcctctttcctttccttccctcccatcttgtttcatcctttctctctcttttctgagacagcttctatgtagcccataccggccttaaaattgtgtcctcctgcctcagtctcccaggtgctagaattacaagcatatgccaccaggctcacagttcttcacgtgactctactacactactcctgcagctgctctggccataagtatacagtggagtctcacttagttttcattgtggctcagtcttggcatgctctggacagcttctcttcaaatgcttaagagccaggtgtgagtatcttctttgctaagtgtctgttaatgtctttgactcacttggtaatcaggacgtttgttaggtatacttagcagtttagtttatgatgtgtgtattttatgtgacagtccttcatctcaagtgcagtcagtggcttgtcctttctttctcttgacagtatcttagtagacttttttaattttgatgagatctggtttaccagtttttagctttgtgtttagtttttgcctttggcgctctattttaggaagtcattgtcagccaccccacacacacattgggctttcctattgtgctcttgaattttattttttattttttatttatttttttaatatgctttgtgttttagacttgggtttgggatccattttgaactttgaagctatgtccaagtctagcttctcttgtgtgtttcagtggctctggtaccctctgttgaaaaggccatttctgctccatcccactgctttgttggcctatttacatgacttagcttctgagctctgccctgctctgttgatggctgcctgtttctttgacggtggttccagcaagcctggagattgaataatgccagccctataacttaatattctttgaacattgcattggcttttttgaggtcttttgtgtctgcatataaattttggatcaggttattaatacttacaaatcttgctggggtacttaaagggattgcactgattcataagttaaatggtaaagaataaagacagaattgaatctccctacccacaaataaagaatatcaccccgtgtagctaggttttctttggtgattttctgtagggtttggtagatgtccaactgcaaaggtgttttgatttattccttctcactgggcacattcaattcagtggaactgtgtctccccttcagtggcccatgctccctgctggcatttcggagtgtgactgatactcgcaccttgactctgtctcccgaggtccccctggagctgcttgttaggtccagggacctttttggtcagtttttttttttttttcagatttcctacacagatgatcttgttggccagaagcattcatgtccaacccccatgccttttgagtttcctccatttgactgttaagttaagctgcaatgtccaatgtgatgttagaatcgatttgccttgctcctggttttggtgggaaagtgtctgcattccttgccacgacagaggttttgtagataacctttatcatgttgggcagcagaaaggtactttaaaaaattttttgcccaatgctttctctgtacctcttatttcttcacctcatgataattttctttgtttcttcctccctttcttttattttccattttttttccagacagagtctcactatgttcaacctggaatttgctatgtgaacaagactgattttgaattcacagagatccactcgcctctgcctcaaaagtactgggattagaggtgattggcagttttaatagtgtttcagaacaacaacaacaacagaaatcacataactacttatatgttttaaatctggtagaaggcataagaaagaggttgtcaacagggaaaataagttttttttctatatgcctaaatagatcgcctaaaatatctgcaaagttcaacctagtggtagtagtgttgtttttttacttgaaatgacaatttgcaaaaatggaaaattaagagactttctattattgttgttgttgttgttattattattagagagatgatagagtgtaagttggcctggctagagatactcagtgagaaaaatggagccctctgactctcaggcaggtgtccctgtgccctccccactgggtggcgctgctgtgctcgcctcactgggtgctcactgggtgctctctcttccatgtgcacttctcttttcttattcttttttttcttttttcaagtctatccagtctctttgaagcttttgtttggttgtcagtgactttaagaagccaacattggggttttctttaccatcactggcaacacagtcctgcagtagatcccttgcagtcgagtgtctctccagtacacttcatttcagtgcatggacaccgtctctcatctctgctattagctccaaggggtgcctcgatggccctgagacctcaggaggaagtgaacttgaattgattccaggaagaccaagcaaggggcagtctccctctgtgcaggcgtgaccccacttgacatttaatacacctcacattttgaacctgagtaccgatgcgccaatgggctgatttctgatctttgtgtcatctttggtttattgttctcctggagttcttttctgtcactcatatttgtattctgtatcttctcccattccttctctctctttgccttctttaactcctggtggggtggcatgcgtgaccttcaggccactcctcaccagctccttccctgtaagcagtcttccagcacaaggtgcttgctctctgaggtagtaccgcctgaatctgtttccttttgtcatgtgatcttttctcttctgccatccacactttcttgatattggatttggacgcaggaagaaagtccttttctgcacatgaaatgcgtgaatgcttatcctattttggagtctgaggtagggagaccagcctgtaggtctcggagggaatgtacacaaacccagagccccatgaactgattttcacatgtgaaatgtttcacacgatgaacacccggggaccaaactgcttgaatgtggtacataagtttgtttgtttatttttatgtagaactagaatcaaaactctaaaaacattttaaatttatttgtgtgtgtgtgtgtttgtgtgatatgcaagtgtaacacagaatgttgtggcatgtgtgtggaggtcagaggacagttggtggggaaatagttctctcctagcatgtggcctccaaggtctgaatacaggccatcatcctggagagcaggtaattattaccttctgaacctgctgctacaaactatctggatttgagttctaaaatttagttgagagatttttcttgtctggccaccttcccctcctacccccagctgtactggccctctgtgagacccatcccaggatgcttattcatctttgttcataagcgatactgatctatagttctcttttctttgatgtttttgtctgtctggttttggttttagtgtggtgctggccttttagatcgggtaaagacatgttctctgcttcttctgacagagactagagagaatcagggagtgctcacccttaggtgtttgggagaactctcctggcacccatctctcagggtttgctactttgttttggactgttgttattttctatgtatattggctcatcctagcatcttgtttcttctcacaaggtgtgtgtgcattttggcacactgtatctttggtggaaccgatctatttgtgtctagttctcctgcttggactccacttacccacactttagcatgatggtctaaaagctccccaagtccccattcttctcctccgtccctttttctcttctcccttcacattttcatctagaaacagctcttcccctaatcttcaatgtcactgctctcctcctgttatagctaatcaaaactcctttgtcctagcatcggactttttcttgcatttttttgctttttaaatcagatcgatcatttccaatttttctattgatttattagttgggtgtgagggtatacaatggcacagtatggacatggaggtcacaaggcaacttttgagagctggggacctctccttccatatatttgaggcagggtctctctggtttctgccatacatgaactctaggctggttggcccacaaacttctggatgagtctcccgtctctatctctcatctcactgtaggagtgcgggcttttatttacatgggtcctagtgattaaactggggtcctcaggcttatgaaataagtgcccttgcccacagagtcacctttgcagaccactgatgcctacttgaaagtcccttcaacatgtcctcttgtcaacgaaatcatttctagtagctgtgaccttgactttgagtctttgtctgatagttacaacacctgggggctctggttctgttgcttgctttctctctttgtaaagagtgtatttgtgtgtttccaaattataatggaatactgacgtgtgtagcagtctaatggagatgggtaatggcgtcctcttacaaaggccgcaactatcctgggagggcattgggggaagtgagtccatccccgggagagcagagcatgggcattgctaccctggagctgggggtggaggggactctctgcagaattcttgctccagaaggccctaccactttttgtcaaaggccctggttactgatacaggactgagggaaagctaagggggatttgccatcatctgcatctgggcaggccaaagttgacaagggacttttcagtcctttcatttcagcttcagggtagactagaggttgttgttggggttgcggggttcagctgctcttgtcctcacgaggtcagtggcatactgaggctgttctcaacctttgcaccaagcatgtgggacattggtgagagaagacccatcaaaagtcattggcatatataggtctgagcaggtcgctttccataatcacatatatttacacgtaacaactattgaagaaaaagaggctatgactttgaaagagagtgagatggggtaccggggtgggggaggggggagggaaagatctcaaaagcaaaaacaaatcaacattatttttaggccattggcatttctctgtcaaagctaccgctttacaagttgaccttgcaaagcatggctgtgaccctgtgtcctagtgcgtcctgggatctctcaggctatgagctcccaagtcttagtccctcagcctactttgtccctctccatctggagagcttttctatttttttttctttcttgtgcattcctgtaataaaatgcagcatcctgcctgaagtaaggagaatagccccttgttggtcaggctggaaagccttcctcccgtttagcagctagatgcccagtctccaagttcctatggccatctcaggaaagttgtccagggaacaacttccaagcctgtggaggggcctcccctcttccccaacgcccattctggactactatctccatgataaaatctctacttcaggttctacctccccagggcagtggctatcatgcgccatggccttgcccaagctaggcataaccaaccagctccaggctgcttctacatatgcagtggagttgagagtcttaaaaccatgtttcctgttctaggaaaagactcttccaactcctgtcggtggatagaggaactgggctggaagcatgtggcaggtccttagaggctggaggaaaggatggcagagcccacgtggagccctggcatgggctgtgcagggccagccatgccccccttgcagccgcgctgttgccagtgtgggcaaggatgagtacacctttgtggtggtgggcgcaggctctgctggctgtgtgctggctagtcggctcaccgaggacccgaatcatcgggtgctgctgctagaggcaggacctaaggacttgttgatggggagcaagcggcttcagtggaagatccacatgccggctgcccttgtgtccaacctgtgtgatgacaaatacaactggtactatcacactgagcctcagcccggcatggacagtcgcgtgctgtactggccacgaggccgggtctggggtggctcctcatccctcaatgccatggtctacatccgaggacacgccgaggactataaccgctggcaccgtgaaggtgctgagggttgggactatgcacactgcctgccctacttccgcaaggcgcagagacatgagctgggtgccaatatgtaccgcggtggggatggcccactgcatgtgtctcggggcaagaccaaccacccgcttcaccaggccttcctgcaggcagcacgtcaggctggctaccccttcactgaagacatgaatggcttccaacaggagggcttcggctggatggacatgactgtccaccaaggtaccgatttaaaaaatttaatggatacgagtacactgtagctctcttcagacacaccagaaaagggcaccggatccattacagatggttgtgagccaccatgtggttgctgggaattgaactcaggacctctggaagagcagtcagtgctcttaacaaatgagccatctctctagcccccagggtactgatttttaatagcccccacctctaattataggcatccttcctgactccatcatggtcagtaagcaaatcagcatggtgtttggtgagagggagatactatatacggcccctaggtatcacaggatacaacccaatacttgggtattcactgtgcctctaggtcatgcagtatagcagaggtgactttagagttcccaggggcctgtccagcctggatagggcagccaaaccctatagtcacagatctaggaagctgagaggggtagggacttcagtcctgtggtacctgtagccagggaaaacacagtggaccccactaggggtagtggttggaggggaggggctgtggaagagtgaaggaacagctctgtgtaatgaataacgcatggcgttatagagacttgcagatgagcaagctgaggcagaaagagacagcacaagaccatcgtgtcccagctatcacctcttggtagatggatgcaggtagacagacagcaggtagcacgggacccttgcacacagcaggatagagcaaaccatggggctctcaatagtttggactgcagggtaggctatccaggtcacagacatacctttgaaggtgggccttgcattgtcaagggagggctagatttgctttccccagtagtttcgtgtccaggcacgaggggagggcagcaggccatggctgacctcgctccatcctgcaggtaagcgctggagcacagcctgcgcctacttgcacccggtgctgagccgccccaacctcagggccgaggtccagacacttgtaagcagagtgctgtttgagggcacccgtgcagtaggtgtggagtacatcaaggacggccagagacacaaggtgagttgacttcctgtggaacgtgtggggactgaagagggcaggaaggggacaggcaatcaggctcttgctcctgtcccacgtgctcttgttcctaggatgagttgacagccagtagcagtggcaggcttgtccctggggtcccacaggatgtagaggtcagaagacctcaactcctgccacccgcagactccatggtcccttgtgcctccgtaagcctctgcctgtcacatctacccccacgagagtcctctagtatatggtttcagggtctggcctgccagaaaccattaaatcaaccctagaagtttaaaaatccacaaatggaatcatatttggtgcttttcttcacttggcgatatgtcagagatggccttcccccgccttcccttctcaggagatctatttgtgtgcttgcttcaaatcactgaagtgtatgctatcatctacttgagctctacccccaccccccatttccaaggcccccgttactgttacagctgttacttagagtcacccatggggactctgtgcggatcatttttaagtagccctccagccggccccctcctctgttctctatctaggatctgagaacagattctccacagtggtgtaatttccaaaggcccagcaatggctggaactgggtgcctctccacggggcagtcaaacagctggcttttcaggaagtgtgattggtcgagctctgcctcttccaggcttacgtcagcagggaggtgatcctgagcgggggagccatcaactctccacagctgctcatgctctctggcgttggcaatgcagatgacctcaggaaactggatatccctgtggtgtgccacctgcctggtgagtctgactgctgcccggaaggtagctctgtccaacctagcagcctgttgcttgaagtggcggtgggatacttcttgaaggtgtcacatccttccttcctatacatctgagggcatctgggtctcactggagaaccccaggtctttatgctattttccttcaccctccctcaggcagcttctgcaccctttaggagagcatcctgtagcaggcatggggctgagattaccaccaggatggggttgtggtgtgagagatctatcctaagatttaccagttgctctaagcacaaatgaggccaacctatggctccagagcaagccactgttcaggtgaagatccaagcttcatcttagaaagggtgtgttgtgtccctgagggctggcctttctcgggaagctttcctggaggcctatggaagcagtctgtgtcctgactgcccagtgtacccttgatcttgcatgagcttgagtagggtctgttgggactgcctctcccttaacaggctgggggagacgatggagctgacaagtgtcaacctggccagcacacacacagtgacacttcccaagtacctgttgtaactgtgggccctgtccttggagggcgctgctgaggagggctgaccaagggcacctgagtgattgctgtagagagagtgacagagtgggtggttttagcagcattggagaaagagccagacttgtctaagagagcaaaagacatgtctcagggaaacaacttccaagctgggggccagggcaggcaggaagacaaagcggactagagagaagcttccaaagccaggggttcacccctgtgtcagccattttcctaacccttccttcctgtgccaggagttgggcagaacctgcaggaccacctggaggtctacgttcagcaagcgtgcacacagcccatcaccctccactctgcccagaagcctctgcggaaggtctgcatcggcctggagtggctctggagctacacaggtgggggctgcctcctggggtacttggtggctacggtctgtgggcatcgtggttttcttcctgaagagccaagacgggcctcaggttgctaggtataaagccagttgacaacccaagccaatttttccactctgtgaggtgagggcacaaaggtcctgtctggcaggtctctgcaagggtacaagaggcagtagtagcacacgtcgagggactgagcacaggaccttgctcgaggtgacgctcactgagcagcaagacgaagggcacataacacaagtggccttggcagacctgacgcccctcgcttagcatggagctagtgtttttaaagttgtaacgctgggtatggctgcccggggaatgaaggaaggttatggacgaacctggtgccgagccccgaggccaggaagatagacacaggggagaagagggacaccgggcagagctgggccatctgctgtaccctgaccagctcttctgccttgtcctcatgtgaccttcaggggacggagccacagcccatcttgagaccggagggttcatccgcagccgacctggggtccctcatccggacatccagttccacttcctgccatcgcaagtgattgaccatgggcggaaacccacccagcaggaagcttaccaggtatgcagccagccatggccagagactctgcctccatgctcctgcattagaatagatgttcctgatgttatctatcccaccatggagacctccgtttagtactctgcccacaatgcctactgtctgactggaggaggaaagggagccctaaccttactcaccccagggagtgagcccaggggtcggcccacaggatgtgtgtgtgtgtgtgtgggggggggaggacctgttacagtgacttcctcagcccggggatcgtcccatgaacgtttcagacaaaggagtaaaggccagacaggatggaggtctgtacactaaatgctgagtgcccacccacagggaacctggggctcctctaagtgtctgagctgtagctaatggagattactgtgaactgttacctctgaacccttctaggtgcacgtgggaaccatgagggccacaagtgtgggctggctgaaactgagaagtgccaacccccgggaccaccctgtgatccatcccaactacttgtcaacaggtaacaacacagacgctactttggtatcccctgggcctgccatcgagttagggaatgttaataaggttccgtttgtccctcacccttactctggatcctactgcttaacactcgggttgccctcagttctaggtcacacaaggtagcctgggcctcacagcacagcaggatagaggtaccactttcaggcccgtctgtaggaggaacaattgccaggcctgtgcatactacctgcctggccttccctgccagagagcacgctgtattcccaagcctgcctctttgcacgcaccacagagactcatgcctcatgatcaaggtcttacctcccaggaacatggcagtagagatagactatacatctctacccctggcttacagagatgccagacctcagacacaaacctggcactgtttgtctaagatacctggttgccactaactgcctctgggcaggtaacaaagcacttgtagcttggttctccatgtccctgacctttgtcccctggtttggccagcagagtaagagaaggggacctcacttatttctcctccacagaaaccgatgtcgaggacttccgtcagtgtgtgaggctgtcacgagaaatttttgcccaggaagccttggctccatttcggggaaaagagctgcagcccggaagccacgtccagtcagacaaagagatagatgcctttgtgcgggcaaaagcagacagtgcttaccacccctcgtgcacctgtaagatgggccggtcctctgaccccactgccgtggttgacgcgcaaaccaaggtcatcggcgtagaaaacctcagggtcgttgatgcctccatcatgcccagcgtggtcagcggcaacctgaacgctcccacggtaatgattgcagagaaagcagccgacattattaagggacaccctgcacttgaggacaagaatgttcctgtctacaagccccagactctggacacccagcgttaagacagacagccattgcctgaggacgacagaggaactcaggccaagccaagagatccagccagtacagccctgccctagatatttctgaaccggtatatagacactcgggacccagataccccgactcttggctcagactttcatggtttctgaggaaatgaggtcatggtaggcagtgaggcaagtcccttttcccagtgtctctctgatgcccctccacaaaaagcctagcaagcaagctggggccctccccctggctgcctgcgggtagcaggtggggtagctaacatggttttcttgtctccagttcagagctctgcttccaggaaggactgggatgatcctttccctggtctcccacctgaggccattcctgcaaagtcagggtggttgaactggactgggctctccaaggaagcttttgctgaagccaagaggcaggtagcagctcagctgggctggttacctgagcttatgtccccaattagagggacaggcagcagctagaggacgcctcatccccctctgcacttctctcctgccctgatttaaatctgaagagcgaggcacagggacgagggctcaggtgactgcacaactcaacgcctaccactctggctctcatgaaaccgtccaggtgagaggcttgcaggacgttgttcaagaaaaggccattttggcctcactgccaaaggttttattgtttaacccttaccacacaaaagtgcaggagtatagagccagtcccacatgccagtcactacctcatgccaaggacatgagcccacgaggtcctttcatggtggccccagaaatggcccaggcaccagagctacttctgcagacagggctggccgtttcttattctctagacgtgagaacagagagcatggcaccaaggctgatggagaacagcaaaggactttggagtgaaagataaaccagctagaattcgagtcttgggtcaggggagcagataccagcagcatttacaagagctctttgatctggaaattcctcataaatttggatgtaaccggtaacttaatttttgagccaagctgcctcattccaactgttcttatgagagaatgggggtcagacgcattgtaggttagttttcctgaagatgtccaaagccatcatctgtagtcgggaagaaagggatcgctgtatagaaatcacatggctgagtgaagaagagagaggaaatagcaggattccagggtcccctagggttgactggcaggagctgccttctggacttctgagtctgagaagacccttcaaagggttcaaaaaacaaattataaaccaacacttttactttgaaaacaaggttgcccttatttcatcttacctgctttgccttttgttttttgtttttttgttttgttttttcctgttcaaaaagaagatcaaggaaatcctaggtctgccaagagatcctcacagggcaggtgttagacggccgtcatccgtagcatctttagcagcacaggtgtcacccctgggagggccatgttctcctctcaggctcagcggcgtttgagaataagcgaagatcaacctggcgtgcccctcagttgcagtcgggcctttctctcacttcggcatagggaggctggcttcacgtgctgacatgatttagccacataaggaaacgagtttcccgagacaagaagtcgatgttacgtgcccagaactcacagatggcgacatcgggacagaacatgaggtttggagggatcctcgctgaagccccgacagctattccaggttccagcccaaacagaacggatgaacacgcaggagagtcttgcctgcagtgctgaatccacatgctggggttgtctggaagtcccagtgccacaagggagacagagtggtagaatggtgcagtcctgcttccgttctaaagtggggttcacacaggcagttaagactgagtctcctggggaaactggaaaggcttagttaagtaggctccttggcaaagagcctgtaataccccaatcatggaaggccacatgttgccaaaaccagtacctgcacacctagcaagcatgtgccccagggttgacccctagcaccaaaaagaactgtggggagccctgctgtgttgatgggacttgggcccacctcactgttggccaagtgtgttcctgacagggtcacagatcatggatggagacagggacaacttgccagcatgaccagacacagtcatagaagcagaaggtggggacactgtaacacatgagccctgcctcatttccatacattcaaatagattcttctcacccaccatactacatccctcaggccccaagatttttcatatttccacttataaactaccacaatatcaaacctaatgcaaagattttaatcttcaaatttggaggggggcggggaaaacatgacctacctcctaggcccaagctggtgacctgcgaagcccctgctggctgggctgttgtatattcaaccacactcttcacccttgttctgaaatcagaagccagagaccgagcctctccctaggtctccactgccctctgggaaagcacagctggagtgggttttgtgagaggtgcccatgatttggtggtgtttgtacaagtaaaccaacactccatcctccccaagtaaaggcagagctgataaagatcgtagatagtaaaaagcacacagcacaaaatagagccgatctggcttaagagctggaccactgtgaagtgggtagtgcaccccagctatgctctcttcaagtggctagggctacaccctcaaccttctagaactatggagcacaagtccacatacctcacagaccatcccaaatgaggttcttgctgacggtgagcagatcatagtgacttccaccttttaatgtcattaaaagcaggagcttaaactaaaagcagcattccaaagacctcaatatcaggggggggtggggcagggtaggaaaaccaaaaagcagaactatttagtcttaaaacttccttaaaggggaggaaaaaaccatgctctacaacttcaaatttttcttacaaagagaaatttaatattaaatgagaggttgaaccaggcttaaagcagacataccgggaaggacagcctgaaacgccaggcagcgttgacagctgactttgggaacgatcacccattccagaacacacgtgagtgtgatctgctgatgttacgtcgcacagtcagacagacagacagacacccagcacgacagagtccaaggtaaatgctgatggtagtttagccctttaggagaacagcactctgcagctggtgtgaagttactatcggtctcggagaccaagggcggaaaaagccgcccgaagctcccccagtagagccagctgtgtgaggagagctccccatatgatgacattatacagagtttattctgaagaacgttttgcattttaataaaaaaaaaaaggctttatgtcaggaaatagtcatttacaaaccttgaagtgtttttgcctgcatctggagtaagaatgtcttccgaagaggtttgcgaggtctttataataaaatttatttacaaaaaaaaaaattgtttccacaggttgtctgtgtactagttaaaaattttgaacccaaattgctacctgtatttttgattgcagagaatccttaggaaagtgatgggatgagatctcatgatgctgacaggaaatcttgacagttctaacgattccaaagctaactgtccccaggtgtgcagtcagagcgcttgtgttctcgtgaaaacttcagcccttgctccgctgtgtgtgacagctctcaaagagaatcctgcacagcagctgtgaaaggcgacaggactccacagaccacctgcattcacaggacaccacggtgctcccctctcccctcctgtggtatacctcctagatcttaagcatccttggggatgtgagcagacgtgggcagctcatctgtgcagctccacgtcagagacccagaagcatcctgcgtgggcaactgagggagccagaccagtggatgccactgggccgagtagccagctggacctgctgcataactaactgaccagagggttgtgaaaataaaaccaaaccaaagtcaacggcaacccatgtgggtgggaggtgcactataaaatcatagaacccaaagaaaagactgcaaattagtcaacttgatatcttacggaaagataggtttatagtaactcaaaatattttagaaaaaagttctgaagtgccaagttcttaggaactcaaaagtttatccccaaagattcttttactgaacatgtgagaattggctctaattctcctaattctttttagcccaagtaaaaatactaataatttctaggtttgggtgggaaactacgattgttaggacccgtggatattgctgcagttcaaatacggtacgataattacaaaatatagaccatctctttacaaatacaaattgtatattacaagtcatgtacagtaaatctataatttttaaacaaactaaacgtatctaagttttacctggtttgcaagtgcggtactcttccagtttacagttgcccttaatgtgacagaactgaccgtctgagtgatggtctcttatgtaaactggcatcgcttaacaaaacgatccggtcccactccccttgtcgtgaccactagtggctgggttctgatgtgtaccattcagaacagctccacagaaaccaggaaccagtgtgttgggggagggggctcagaaatggatatgccaggcccagtgggtgtctgatatgctagaccaatggttgaggtaatgacacaggcgtggtgactgtcatcacctttaacctctctcatgtctgcaggcaaaggggcatgggcatgcaccctggatgggagacaccaactcctgggcagccctctggcctctgtgcaggccagatatactgtcttctgaggccgggcctgagcatgtgacatagcacatgccaggccgctcagaacctgctcctaccaggtttatggcttccttgaggcatgaaatcacttgtacaaaagtctaattgagcgtttttctcccaactagtgcctaaactttcctaattatgaggcactttatccctggccctcccgtgcccgtctctggctggagccagcctgccctcactgggctacaaggtggtaatgcaaatcatctcatctgccaggtcctcttcctctcgcccagggtctggctcctcgtcactgtagccaggaccaaagtcctggagctcatagtcctggcggtgggagatggggcccatgtccccattggctcgaggacacacactgccattgagcagggtgctggcagcactttccatctcgtctatggttaggtcacaggcatcggcaatctcatgttttgtcgctgagacaaatttggggtccctcgcgtagcgtcccaagccttcggatatcaggacctgtataggagatagatcgatggcatgagggaaggtctgcatcagctctcagtgcgcggcatgctctggggacgctgtcagccatgctgctaaactttatacacgatgctaaccataaatgagctcagctctgttggtgtcgaaagctgagtggctccacaaggctgagcaagagagaaagcactggggacgtagcacagactggcactgcaggatgggactctctggtgggacttggcagtgccagctggttttcactcaggccttaaatgctgccgagaggccaccctcgggtggcaaggctgcagagcccaccactgccccctccccatgtgatcatggctctgtttctgctgccacctaagatttgtccagaggtcaaaggccacccatactcactgcctccaccaggctgtctgcactcctctgcttgtcgctgttcttgttccggaagctgctggggacagtcagactagctggcgtgaaagtcctataggagatgtcgggttcatctgtgtaccaggagcttcggtgtagggatggcaggctgccattgacctggtccatagattctgagcggtccacctggatcaaaggggtgtagcatgggctccagtctcggtatggaggggttgctggaggggtggcccacgaccgggtagagtggctcggtgagtacttctgggctttactggaatctaggcctgcaacggccatgatctgagcgggagaagcagagagaggtctgagccttggtcccagtctggcacatggcagctgtgcagagatgcttctcaaaaacctgggggaagatgcctgtgtagcagaggccactcagtgagctggccagggaaccagggattaataaaagactgggattccgggctggtgagatggctcagtgggtaagagcacccgactgctctgagtacccgactgctcttccaaaggtcccgagttcaaatcccagcaaccacatggtggctcacaaccatccataacgagatctgactccctcttctgaagacagctacagtgtacttacacataataaataaatctttaaaaaaaaagttgcactgtcatgcattcatatatacgaattggcagccaaacttcataatgtgaaagtgaaaaaaaaaaaaaagactgggcttcctctttctccaagccatagggccttctctatgactgaactgtcagttactaacttacgtaaccacttggggatgaggagggaagatggataagctgtgatgtgtgaacatactacccaggcctctccaggcttcagtactgaagcacacttcagggactctggctcattcaggacaacaaccatgtctctcggctctaaggcctgccatcctgcagtgagtgtgccctgaaatgccgggcacagtcacgattctcacatgtccctcatgggagagccaccttgagatgtctgctaatgccggtttgcactgacactgtagttgtagccaaggaatccaggacaacccaggccagtggctgaggtaagacttgggattctgccctgtgggtcacaggcctcttttagacctccttggctgtctgaggtttggcatcgagtgatctgggtttccaaaaagtttatctttcttccatgatgatacaggcaaatgggctcagtggttgagctcactaatttatcttccagaggacccaggttcaatccccactacctacatgggtagtttataaccatctgtaactccagttctggggatctgatgccttctaaaccccaagagcaccagacatgcctgtggtgaacagacacatatgcaggcatgtaaaataaagtaactccaaaacaaatattttaagtgctggcagaggtgactagaaaatctgcaatggccactgagtacatatgggttagagcttggggtcagaacctcacagagatccagatctgctggctggctggctggctggctgggtgcaggtttctgacatctcccttcatcaatcagcccacacagctcttctgatgagatagttcaggaaatataaagactgtatgtgtggtggtttggcccagagggtggcattattaggaggcatggtctattggaggaagtgtgtcactgttggggtgggctttgacaatcctgtgctcaggctctgctcactgtggaatgagcacctcctcctgactgcctttggatcaagatgtagaactcttggctcttcctacagcaccatgtctgcctgtatgctgccacgctttctgccatgatgacagtggaatgaacctctgacactataagccagcctcaattaaatgttttgctttctaagagtatagttgtcatggtcatggtgtctcgtcacagcaacgaaatcctaagacaatatgtatgtattcatacatatctacacatatatatgtaatgcatgcatacctctatccttaagccctggtgaacaggctcagttgcctttcatgtgagcatgtgggcccccttaacccactctcatggacagagggttcatgcacaagaagctgcccaagtggcttgatggtggaaccacctctctgaaggaataattagtagcagcagccatcaatgggactcttatgagtgtctgtaattgccttaactcagactataccagtgtcctctgacaggaagcacggatccaaggatgcccggtccaccctttgctgcatgtgcaactccagcagaatgggccctgggggatctaccaggaagggctgctcaaggataagcagattagaaggggcaggctctttgcttcctccatgtgtatccccaggggagagtgcatcccaggtggggccagagcagctcacctgctgctgcatcaggtgcaggggcagggcagcgcggtgaggcagggcaggcgatggaaggacatcgtcttggctgctttgcctgcgcagacactcaaagttgaaggaggacctccgatgggctgcggagcaaaagcacaggatgctgtagtgatataaattctgtctggacaatgtgtcctgagagtcaagactactttctgaggcattcagcaaggaggccaggaagaagcaggccacatgcttcatccaagagaaacaattacataatgccccaactagggatgggaaggctaaaaggagcaagccagctgtgggacgtttcgataagggagcaatgaatcacttcaaatgtttgctctcaggcagcccagtggaatctgtgctaagttacaagccccggaatgtattgtagagatccattctagaatcgtagacgcaccatgctatcctatctctgccctacaaacactctgcatctttctgaggtccccatatttaagcctctgttttcaaaatgagggattccgtcaaccagcttaaccggggaaaataaccaaattctttgcctagaaagaacccaccttccctagcctagatgtgagtgtatctaagtacttgctgtgtgctgacagcagttgcagatagaggctcgctgatggtccacagcttctgggtttatagtgtaccaggcttagtgttctgggatcctttggcaaagacagccgagtcctagaagcttgtccaccctgtcgtgggcctcagggagactccctccccatccccgacctgtgctctgcattactccaactgtactttctgtactgctaggcttctgcaagccctcggttagtggatcctcagacactggaccaaagaggcctcccagacaccctggacttcacaaaaagccaggtccacgatgaagaacaggccaagcctggtcattggctggccagcaatggccagtggagtggaaacagtcagtactgaggggtatgccagggcctcccaggtgagctggtactacttataaagaggaccacgccttgcctgctaaccagtgcaaccacagaaaacggccctctcggtcggcacaacctctagaccctaagacctaggcaggccagctgtttggaattggaagaaaaacagcccctcccatccattcaggatctactgctaaaataagccccgggtcccctcatccagtgagctttgcactacagcctctgtaagacatagctctttcacttatctgcccttacctactcccaatggctaagcatacaggccagtttagccatgttccccctcgcccaggtctgcaaactggactgccctgggaccagggcactcaagtgtccccttggccatgtaggtgtgggataagtgaagacacagacctggaagaggggtggcaggaaccaaagggcaaagacccctgctgggcctcacttacacctgtttcgtttggtatctatggattaaggaaaggcttcatttagcagcatgtgtttggggctaattaaatattaagcactcaaatggatttgactagactcccagcaggccgtggcagctggggtggggtatggccacccatgttctttcctgtgtgctcagtcaggctcgggagctcctgtgtttcgactgttcttggttattaaacagaatcctcaatttagcttctttcctccgaaacacaaaaaatggatattctttaccatcatcaaacacccatacttggcaaagttcaaatgcccttctaggggttggcagagccttggggatgaccctacaggtacaggagaaaggagagcccccattttgctttgggccaggaaagcactgtctatccaggtactggctggtcttaggagttaccagcacttccctggtaacacacatcaattattaatccagggttaggatggggacaggcatggtgccctctgggaggctccaccctaaacaagaaagctggcctcacatggtggggtaggaggtagaagacgtctcctcggagatctccgtgaatcatagccagtgggagagtcatcatcttctaagaagccttgggggtggtggtagcctcggggcctctcaaagtccatggagctgcctgggtacctgttgtagtagttgtagttttgcctggcagttagtgagagaaaacatgagaaggcacttgtgagggtctgggcaagaacacttgacctaactcctacaagccctgtcttatgagtggtggaaacttccgggtagaaaacaaggaccatctccggagattggagctggaggcttggaataagacacatggcagtcattttcatgcctgggacaccctcaggcccgaagcgaatggtgatcacacaaagcttgtcaactggctaccctttactcgtctcctggaggcctctgtcccaaggagctgccctctccaagtacccggcaggacacggagcttagagcatgccatcagtgtgcaggctcagtacaatgtaaaaagtgggagagagtggtgagttccacggttgggttcttgtttgaagggcatgattcagttccaaacaggagagatgcgaaggctggcctgctgctgctgttaaagtagactgagaccagcaggggtggctaggacacctgagagggagacctgggatgacaagccccagaggtggggtgtacataggtccatgtggctccaaatcagtgaatgtggaagttgggcgctggtgggaggtggtggaaaagggcctgtcagagcacaggtaaaggtgaggctgtgtctcaggagccaggcaaggagccatagcaccatttcaacctggtggccccagcctgatgaaaaaagtgagtcacgggtcaggaaggattggggtaggtaattttgtcctccagtactggctgcaatgtgtcttatgtttaaaaaagatttatttatttatatattatatatatgagtgttttgtgagcatatatgtgtgctctgtgcatgcaatgcccattgagaccagaagagggcatcagatctccctggaactggagttaagtgatagttgttagcaccacgggccatgtggggggctacaaacagaacccaggtcctctggaagtacggcaaacactcttcatccttgaaccatatctccagccctgtacaatgcctattttagccagcagcattctttctgcaggacagaagttgggggaggcacctctgcttgagggaagctgttcctacctcttgtccccataccttcaggaggccctttcattggcataggaagcaggagtcactgagactccagccagcatgctatgcaaacatagctgaggctggtgttcctatgtcagttaataagaactcatctctcaggccaggtgtagtggagcacacctttaaccccagcacttgagatgaaggcacacagatctctgtgagttctaggccagcatggtctacagagttccaggatatccagtgctatgtagagaggccctgcctcgaaatacccaccccctaaaacaatctaacatctgagatggcagggtctgaaaccgtggaagtccagttcccagggccagagcctttctgagggcccccggggcccagggtgaaataaggcaaacttgaactcctgccctgatgtgtcagaggaatcctgagtgtgtgtggctctctgagccctcaacaggagcagagtagaggacggctggtcttctgagctctgcccaggctgagcccctcacctgctccaggtgggagagctgtcgtcctcacagcactcctcgctactgaaatactcctgttcccccaagcagcgggggtctcggaagtagccgtgtatctcaggatcttcacggcaaatggttggaaattgctcatctcctgactcagacctgcagttgggaaagagatctgagagcttgaggaggtggcagctagatccttcagccatgcctctgcaacagcctgtgtcctccctcagagtgcctccatcttcctacgcatccctgccccggggccataagactactcaggccctggccaaagtgccctgtgcctgtgcctctgtgtgtgtgtgtgtgtgtacttgtggtctcagtaccttgcccagtgctagggccaaaccactgtgcctagagacctcgagacatagacacaggtgtaatgtgaataacagagcaaggcagacctagagtcctccactctgaagtcaggggacccacgaaaagtccctaggttcccagctgtttcacttccactcccccaccccagctccagccaatgtgacttcagaacctgggacagagatctcagtcctgccctatcaaatcgaggctgctgaagaagttctggcttttctgccactagagaggtgttcctggaaattttttccacaggcttccctgccctatgtcggaacactatttccatgaaatgccctgccttctggcctcaagccccaggaggcccagagggctcagtgacatcgactaagagcaactcatttgttcactcctcagaccaagaacctcctggtcttacttgaagcaatgatcctgaagccctttcctcttgcccccaggaaagtgaccattccacccataaggaagtctagttaacacatgtacatgagattatcccatcacacgcgcgcacgcacgcacgcacgcacgcacgcacgcacgcacgcacgcacgcacacacattaaccagagggatctggggcctggttttcaggatgtctgggctgtgcttctcctaagtccacgtgagaatctggacccctaaagcagcttaggcctccccagctatacaggggcagggaaagtggacagactggtgggccccagttttcctttgtgagaaataagtgggaactgcccattcatgaatgcaaagctctggcatttcgagaacaaatgctttgatggcttggcactgagcaaatgtagtgggtaacaggacagcacagtttccagacaaagacagaagcggcaagcacctacctaatgtaagtctcgtaatagcgggttctatccagggaaggcataccatgggaaggagggagaagaagagttagacattcccaaaagcattagacgcgcagataccagcctgtcttctggagcgggggcaggcaaaccagagtttgctggccagctatggtctactatctgttttcgtgtggcccacgatctaggtagggattttccatttataaagggcagaaaacaaagtaaaaagcagcgaacccttttgccctttctagccctacaaagtccaaattccagtgctacacgcacagctctatgggaacccaactgcttcgtttcttaagaatgtaccctggcccctagcaaacacataagtggaggctcacagtcagcagctattggatggatcacagggtccccagtggaggagctagagaaagtacccaaggagctaaaggggtctccaaccctataggtggaacaacaatatgaactaaccagtaccccccggagctcgtgtctctagctgcatatgtatcagaagatggcctagttggccatcagtgaaaagagaggcccattggtcttgcaaactttatatgctttagtacaggggaaagccagggccaaaaagtgggagtgggtgggtgggaggtcagtggggggggcttgggggacttatggggtagcattggaaatgtaaatgaagaaaatacctaattaataaaaaataaaaataaataaattaaaaaaagaatgctccctggctatgttcaccctgccatggcaaacctggggagttttgcaagagagactgaatggtccccaaaactaaaatactggccctttacagaagacattcaccaacccctgtcccaaagaatgttaccataactgagggaggtggattttgtggctgctgttgttttaagagaacaccccatgcagaaggtgggtagtgggtgaccccttatgtggtaggtccctcacacgggctacatacagagaggccaagaggcaagtggctctcaagttcaaatacaaatgtctccagggagttaccatgggccagagcacagggcagaagactggccctgcggagcgggtgtgacaagggcagacaacagcatcaccctttccaaggttaccttttaatactggaccttctttgaagctctcgatcatgcttgcaggagtaatgcccattttcagacacatgctcaaggttcccaatgctgggcggctttccgtgggcagctttggacatattggcattattgagattggcatttgttgaggtgggagcttgcttccctatggaattatggttatgatggttatgacaccccgaatttcctgctggaggaaacagcggtttctcagtatcacttgcaggtggcattgaaggcctttggacatgcaggggacggtgggtggtattggtctgctgaagggaat

SEQ ID NO: 464 - DNA, 6921 bp, Mus musculus
gtggccgccttgtcgccctcggggctcgcgggggtaggcggggtgcgaatgactcaggcccgggaggactgaagctccagcaggcgcggggcgtgtcgagccccgcggcacaggtgtgtgccgcaggccaggtggggcgaccgcacccgcgcctggagccagacggagcagctcgcggcactcccgggacgccagttaaagagcagcgggcgaggatcagcggccactgccttctcggctctcctggctcctgtccttcgcgtcctggcccaggtgcggagttgtcccgggaaaagactcttccaactcctgtcggtggatagaggaactgggctggaagcatgtggcaggtccttagaggctggaggaaaggatggcagagcccacgtggagccctggcatgggctgtgcagggccagccatgccccccttgcagccgcgctgttgccagtgtgggcaaggatgagtacacctttgtggtggtgggcgcaggctctgctggctgtgtgctggctagtcggctcaccgaggacccgaatcatcgggtgctgctgctagaggcaggacctaaggacttgttgatggggagcaagcggcttcagtggaagatccacatgccggctgcccttgtgtccaacctgtgtgatgacaaatacaactggtactatcacactgagcctcagcccggcatggacagtcgcgtgctgtactggccacgaggccgggtctggggtggctcctcatccctcaatgccatggtctacatccgaggacacgccgaggactataaccgctggcaccgtgaaggtgctgagggttgggactatgcacactgcctgccctacttccgcaaggcgcagagacatgagctgggtgccaatatgtaccgcggtggggatggcccactgcatgtgtctcggggcaagaccaaccacccgcttcaccaggccttcctgcaggcagcacgtcaggctggctaccccttcactgaagacatgaatggcttccaacaggagggcttcggctggatggacatgactgtccaccaaggtaagcgctggagcacagcctgcgcctacttgcacccggtgctgagccgccccaacctcagggccgaggtccagacacttgtaagcagagtgctgtttgagggcacccgtgcagtaggtgtggagtacatcaaggacggccagagacacaaggcttacgtcagcagggaggtgatcctgagcgggggagccatcaactctccacagctgctcatgctctctggcgttggcaatgcagatgacctcaggaaactggatatccctgtggtgtgccacctgcctggagttgggcagaacctgcaggaccacctggaggtctacgttcagcaagcgtgcacacagcccatcaccctccactctgcccagaagcctctgcggaaggtctgcatcggcctggagtggctctggagctacacaggggacggagccacagcccatcttgagaccggagggttcatccgcagccgacctggggtccctcatccggacatccagttccacttcctgccatcgcaagtgattgaccatgggcggaaacccacccagcaggaagcttaccaggtgcacgtgggaaccatgagggccacaagtgtgggctggctgaaactgagaagtgccaacccccgggaccaccctgtgatccatcccaactacttgtcaacagaaaccgatgtcgaggacttccgtcagtgtgtgaggctgtcacgagaaatttttgcccaggaagccttggctccatttcggggaaaagagctgcagcccggaagccacgtccagtcagacaaagagatagatgcctttgtgcgggcaaaagcagacagtgcttaccacccctcgtgcacctgtaagatgggccggtcctctgaccccactgccgtggttgacgcgcaaaccaaggtcatcggcgtagaaaacctcagggtcgttgatgcctccatcatgcccagcgtggtcagcggcaacctgaacgctcccacggtaatgattgcagagaaagcagccgacattattaagggacaccctgcacttgaggacaagaatgttcctgtctacaagccccagactctggacacccagcgttaagacagacagccattgcctgaggacgacagaggaactcaggccaagccaagagatccagccagtacagccctgccctagatatttctgaaccggtatatagacactcgggacccagataccccgactcttggctcagactttcatggtttctgaggaaatgaggtcatggtaggcagtgaggcaagtcccttttcccagtgtctctctgatgcccctccacaaaaagcctagcaagcaagctggggccctccccctggctgcctgcgggtagcaggtggggtagctaacatggttttcttgtctccagttcagagctctgcttccaggaaggactgggatgatcctttccctggtctcccacctgaggccattcctgcaaagtcagggtggttgaactggactgggctctccaaggaagcttttgctgaagccaagaggcaggtagcagctcagctgggctggttacctgagcttatgtccccaattagagggacaggcagcagctagaggacgcctcatccccctctgcacttctctcctgccctgatttaaatctgaagagcgaggcacagggacgagggctcaggtgactgcacaactcaacgcctaccactctggctctcatgaaaccgtccaggtgagaggcttgcaggacgttgttcaagaaaaggccattttggcctcactgccaaaggttttattgtttaacccttaccacacaaaagtgcaggagtatagagccagtcccacatgccagtcactacctcatgccaaggacatgagcccacgaggtcctttcatggtggccccagaaatggcccaggcaccagagctacttctgcagacagggctggccgtttcttattctctagacgtgagaacagagagcatggcaccaaggctgatggagaacagcaaaggactttggagtgaaagataaaccagctagaattcgagtcttgggtcaggggagcagataccagcagcatttacaagagctctttgatctggaaattcctcataaatttggatgtaaccggtaacttaatttttgagccaagctgcctcattccaactgttcttatgagagaatgggggtcagacgcattgtaggttagttttcctgaagatgtccaaagccatcatctgtagtcgggaagaaagggatcgctgtatagaaatcacatggctgagtgaagaagagagaggaaatagcaggattccagggtcccctagggttgactggcaggagctgccttctggacttctgagtctgagaagacccttcaaagggttcaaaaaacaaattataaaccaacacttttactttgaaaacaaggttgcccttatttcatcttacctgctttgccttttgttttttgtttttttgttttgttttttcctgttcaaaaagaagatcaaggaaatcctaggtctgccaagagatcctcacagggcaggtgttagacggccgtcatccgtagcatctttagcagcacaggtgtcacccctgggagggccatgttctcctctcaggctcagcggcgtttgagaataagcgaagatcaacctggcgtgcccctcagttgcagtcgggcctttctctcacttcggcatagggaggctggcttcacgtgctgacatgatttagccacataaggaaacgagtttcccgagacaagaagtcgatgttacgtgcccagaactcacagatggcgacatcgggacagaacatgaggtttggagggatcctcgctgaagccccgacagctattccaggttccagcccaaacagaacggatgaacacgcaggagagtcttgcctgcagtgctgaatccacatgctggggttgtctggaagtcccagtgccacaagggagacagagtggtagaatggtgcagtcctgcttccgttctaaagtggggttcacacaggcagttaagactgagtctcctggggaaactggaaaggcttagttaagtaggctccttggcaaagagcctgtaataccccaatcatggaaggccacatgttgccaaaaccagtacctgcacacctagcaagcatgtgccccagggttgacccctagcaccaaaaagaactgtggggagccctgctgtgttgatgggacttgggcccacctcactgttggccaagtgtgttcctgacagggtcacagatcatggatggagacagggacaacttgccagcatgaccagacacagtcatagaagcagaaggtggggacactgtaacacatgagccctgcctcatttccatacattcaaatagattcttctcacccaccatactacatccctcaggccccaagatttttcatatttccacttataaactaccacaatatcaaacctaatgcaaagattttaatcttcaaatttggaggggggcggggaaaacatgacctacctcctaggcccaagctggtgacctgcgaagcccctgctggctgggctgttgtatattcaaccacactcttcacccttgttctgaaatcagaagccagagaccgagcctctccctaggtctccactgccctctgggaaagcacagctggagtgggttttgtgagaggtgcccatgatttggtggtgtttgtacaagtaaaccaacactccatcctccccaagtaaaggcagagctgataaagatcgtagatagtaaaaagcacacagcacaaaatagagccgatctggcttaagagctggaccactgtgaagtgggtagtgcaccccagctatgctctcttcaagtggctagggctacaccctcaaccttctagaactatggagcacaagtccacatacctcacagaccatcccaaatgaggttcttgctgacggtgagcagatcatagtgacttccaccttttaatgtcattaaaagcaggagcttaaactaaaagcagcattccaaagacctcaatatcaggggggggtggggcagggtaggaaaaccaaaaagcagaactatttagtcttaaaacttccttaaaggggaggaaaaaaccatgctctacaacttcaaatttttcttacaaagagaaatttaatattaaatgagaggttgaaccaggcttaaagcagacataccgggaaggacagcctgaaacgccaggcagcgttgacagctgactttgggaacgatcacccattccagaacacacgtgagtgtgatctgctgatgttacgtcgcacagtcagacagacagacagacacccagcacgacagagtccaaggtaaatgctgatggtagtttagccctttaggagaacagcactctgcagctggtgtgaagttactatcggtctcggagaccaagggcggaaaaagccgcccgaagctcccccagtagagccagctgtgtgaggagagctccccatatgatgacattatacagagtttattctgaagaacgttttgcattttaataaaaaaaaaaaggctttatgtcaggaaatagtcatttacaaaccttgaagtgtttttgcctgcatctggagtaagaatgtcttccgaagaggtttgcgaggtctttataataaaatttatttacaaaaaaaaaaattgtttccacaggttgtctgtgtactagttaaaaattttgaacccaaattgctacctgtatttttgattgcagagaatccttaggaaagtgatgggatgagatctcatgatgctgacaggaaatcttgacagttctaacgattccaaagctaactgtccccaggtgtgcagtcagagcgcttgtgttctcgtgaaaacttcagcccttgctccgctgtgtgtgacagctctcaaagagaatcctgcacagcagctgtgaaaggcgacaggactccacagaccacctgcattcacaggacaccacggtgctcccctctcccctcctgtggtatacctcctagatcttaagcatccttggggatgtgagcagacgtgggcagctcatctgtgcagctccacgtcagagacccagaagcatcctgcgtgggcaactgagggagccagaccagtggatgccactgggccgagtagccagctggacctgctgcataactaactgaccagagggttgtgaaaataaaaccaaaccaaagtcaacggcaacccatgtgggtgggaggtgcactataaaatcatagaacccaaagaaaagactgcaaattagtcaacttgatatcttacggaaagataggtttatagtaactcaaaatattttagaaaaaagttctgaagtgccaagttcttaggaactcaaaagtttatccccaaagattcttttactgaacatgtgagaattggctctaattctcctaattctttttagcccaagtaaaaatactaataatttctaggtttgggtgggaaactacgattgttaggacccgtggatattgctgcagttcaaatacggtacgataattacaaaatatagaccatctctttacaaatacaaattgtatattacaagtcatgtacagtaaatctataatttttaaacaaactaaacgtatctaagttttacctggtttgcaagtgcggtactcttccagtttacagttgcccttaatgtgacagaactgaccgtctgagtgatggtctcttatgtaaactggcatcgcttaacaaaacgatccggtcccactccccttgtcgtgaccactagtggctgggttctgatgtgtaccattcagaacagctccacagaaaccaggaaccagtgtgttgggggagggggctcagaaatggatatgccaggcccag

SEQ ID NO: 465 - protein, 598 aa, Mus musculus
RNWAGSMWQVLRGWRKGWQSPRGAWAVQGQPCPPCSRAVASVGKDEYTFVVVGAGSAGCVLASRLTEDPNHRVLLLEAGPKDLLMGSKRLQWKIHMPAALVSNLCDDKYNWYYHTEPQPGMDSRVLYWPRGRVWGGSSSLNAMVYIRGHAEDYNRWHREGAEGWDYAHCLPYFRKAQRHELGANMYRGGDGPLHVSRGKTNHPLHQAFLQAARQAGYPFTEDMNGFQQEGFGWMDMTVHQGKRWSTACAYLHPVLSRPNLRAEVQTLVSRVLFEGTRAVGVEYIKDGQRHKAYVSREVILSGGAINSPQLLMLSGVGNADDLRKLDIPVVCHLPGVGQNLQDHLEVYVQQACTQPITLHSAQKPLRKVCIGLEWLWSYTGDGATAHLETGGFIRSRPGVPHPDIQFHFLPSQVIDHGRKPTQQEAYQVHVGTMRATSVGWLKLRSANPRDHPVIHPNYLSTETDVEDFRQCVRLSREIFAQEAPFRGKELQPGSHVQSDKEIDAFVRAKADSAYHPSCTCKMGRSSDPTAVVDAQTKVIGVENLRVVDASIMPSVVSGNLNAPTVMIAEKAADIIKGHPALEDKNVPVYKPQTLDTQR

SEQ ID NO: 466 - DNA, 48642 bp, Homo sapiens
caaggccctctgacctcctcacacctgcagtgttctctgtacccttggtgggaagctcagcgtccaaatctgccttctagcaaggacagcatggacggctgtctgaaagggtaccagggatgccttgtgcagtgaagggtgcctaagagttctgggctgatccaaataccactagcctcattagcattccaacactatattactcagaaatttacacaaacccttggaaactgggcactagggactaataatcctaaaggggattactacaaaattcaaggggtaaaattcactagcctgtgaaaagtgatcctctttgaggacacaaattgagagcgtaattgtgggccagtcctttagcgaactcacactcccacctcgaatgtttgctaatccaaacagaaggttcttaggatccccatggccacaggtgggtggtgctagcatctgagcaggtggaagggctcgtaggactcccatcaatcaggaagagcctttgattggcactgctgagccatttgggctaaaatgttgttaaccaagtggatgggggtggttctttgtgactgttgctccactatataaatgtactgagggtctacccctttctggacaggctgctgcactcagtgggcaaagtactggctggagatcaggagccataggtgcttctgccaccaccatcgggggtgcttggatattcaactctcccctagggctcagttcttctgtgcaaagatgaagagagctatgctgcctcaagttacaagtttcttcaaataataaaagcaaatgccgtatttacttaccggccttgacacacttttttttatatttcattatgtggtctaggcagcctggaaatttgaatgaaagtttttacattttagaaaaaggtatctctgccccaccccctttgccaagtgcacacacacatacgcataccacacctgtaacaaattgccaaaacattccagatgtaagatggcaaattcaaatggggctctaatttttttttttttttttttttttttgagccggagtcttgctctgtcgcctaggctggagtgcagtggcgcaatctcagctcactgctagctctgccacccaggttcacgccattctcctgcctcaggctcctgagtagctgggactacaggcgcccgccaccacgcccggctaattttttgtggggctctaacattttactgctaaacagagaacatctgcccattacgtgataaccagagtctaatttaaatacagcctttatcaaaacagtatctttgatccctaagagaggactcgaaaaccatccatcatttgaaaaggacatttggtaatatctgtagatgctgccccttcaaggacatgaagcctaacactcccctatcctcaccccagggtggggtagaattagtgacttgtttccaaaaacgagagttgggaaaaacagtagatttacatggagaagtctggcagtccccacattaatctagtgttgatggtgacccccagcctggtgtcatgtgggtgccatggacccctgatgggataagaagggcccggcacctctgtggtatgaattccctgtctaatcatgagacaaacatcagacaaacccacactgggggacattctacaggatgcctggtcagaactcaagactgtcaacgttctgaaaaacaaagactaagaaactgttacagaccagaggagagacacacagggactaaatgcaactggaacagaaagaggacattcatgaaaaagcaggtgaagtccaaataaagtctggagtttagttaacagacacgtactaatgttggtttcttagttttgacaaatgtatcatggtaatacaagacgttaataggagaagctgggtgagaggtatatggaaactgtactatctttgcaacttttctgtaaatctaaaattattccaaaataaggctgggtacggtggctcactcctgtaatcccagcactttgggaggccaaggtaggcagatcacccgaggttaggagtttgagactagcctagccatcatagtgaaaccccgtctctactaaaaatacaaaaattagctgggtgtggtggctcatgactgtaatcctagcttcttgggaggctgaggcaggagaatcacttaaatccaagaggcggaggttgcagtgagctgagatggtgccactgcactccagccagggcaacaagagcaaaaccccgtctaaaaaataaataaataaataaataataaaataaaagaattccaaaataaaaaagcttatttgaaaacaaaatgaggtttgctctcatcaagaaagttggaaaccacgtgtagtaaatggtgcagcaccaaaaacaccctggaccacaatctccaagaccagcagtgaattggaaattaccgtttggctttgatgccttgcctgtgacagatgacaggatggtggtatgggatgggtgactcggctcagatagacccttcacacacaccatcctgtctcatcctcatcacagccctgtgtgtgacattgcagctgtggtaccagagaactggtcctgtgtcacaaagctggggcaagggcccagcatccaactcaggaccaccctgcctctcatggacagcttggggacaagccaactggagtctgtagattctcagaggcccagccatatgcagcccactctagaaagctgagataggaacgaacaaacattttgcatcagtgatataaagagtggctcaggtgcattgctctagaaggaccaaagtgtgaatgtcagcttcacttttatgtgtgtataacccagggaaagtgacttaacctctcagtttcttcatctgtaaaatgcagctatcccaaccttggggttgctgagatgcttaagtgagatgatgcatatcaagtattcagcacagtgcctggcatacaggaacagactttttcctacattttacctgactttattctctctgctctgtgggtaaagtatggttactactgtgtccatgctttagataagggaactgagatttagcaaggccaaaagccttatccagggttccctgggctctctctgtgcatatcgcaaagcaggcatcccagcaagacaaagaataataaacaaatgaggaagtttacctggtgaggtgaaattcacagacatggaagggccatcttcattcatatttgcattaggaatattatgggccccaatgaaatagactgtgttcagctctacagggaagccgatgtaggaaaatgtccactgaaaggcaaagcaaggaactctcaattcccaaaacactgcagtacagaaacagtataccttagtgtgttgcccttttagtttgtatttcattactcactctgtgaaaacttaggtctccaaccaatgtctacttagggaatgggcactaaacaatttacagaatcagagaagtataaagttttaaagccaggatataatttaagtccaattctcttccattggctggtagggaaaaactgaggcccagagatgctgacttacaaaaggcacaaaacagagaagtagccgaaaatgggatttgaaccaagggatcttgctctaagctctgagtcatagctatttaccagcccgtgtgagcagcacatcatccatgctccccaaacaaagggcatagctttcagcaacaattagccaaatacataaaagtgtctatgcccggatacagtggctcatacctgtaatcccagcactttgggaagctgaggcaggcagatcgcttgagcactggaattcaagaccagcaacacggtgaaacccccctctacaaaaactacaaaaattagccaggtctggtggctcatgcctgtagtcccagctgcttgggaggctgaagtagaacgatcgcttgagcccagaagattgaggtcgcagtgagccatgatcgcaccactgcactccagcctgggtgacagaacaagatgctatctcaaaaaacaaaacaaaaaacaaaaaagtgcttactttaccaccagagggtctggtctgagtctggaaggcctctgtgtaattgcacctcacacagctgtaggactggaagttgcttttgcccgtcacacaaatcttggtggccttcaacaagcggatgctggctgccgagataggcaagaggacattggtttatttagcacttgctgtgtggctgacttgatgctagatgctttactagcatgctttattttatgtctcggttcatattcacaatagtactgaaaggtaggcaccactgtctccagtttacagatggggttcgtgaggcttaggaagtttcagggagctctgcttaaacttagaaaactcatcagcaagtagcagatacgaattcagattccaaagcccaagctccctcctcctcataggtcagcttgaatttcataggatgcctgcaaaggtggctatagctctgcactattctgggtctcttttaagaggaagaggctggcctcagggagacccacaaagaccctccaagactgtcatcaccaaaccacacctgttccgattgcacctttatccatgctgattcttctccctgaaggtcctttcctcccattatctacctcttcaagtttcactcttttaaagcccaactcactcatgcaccacagcccataaccacagctgacaaagagctcactctgtgccaggtaagggcccaaacccttatggccacatctcacctaaagcaacctcaccagagaccctttccagctcctctcgccctatcccactcagatgaagcacagctcccttctgggactcccctgacattgtgcctgtgtctgcctcccctacccctctgaatcctcctgggtggagactgtaggtgactcctctctctgtgcctggcactcatggattcttgaccaggtagacttttttccgatctgaatttagcagatggaaaccaaaaggatgggcattaggatcccaggagtagctcactgaaagaactcatatggtgccttgcagcacaatcttggggaaatgccaaaagcttcgtgacgtcatctgggaagtggaaaagtaatctatctaagccagtgctttccctaaactgaagtggggtggggaaaatcatctctcgccttaccttatcttcttccatgaagtacatacacagaaaagtacacacataagtgtaccacttgatgcatcgggacactcatgcaaccagtatgcaggttaagaaactccctcaggtgtgctcctcatacttccttacagttattcctaccccagcaggaaccactaccctgacttttattttattttattttattttattttgagacagtctctctgtcacccaggcaggagtgcaatggcacagtctcaactcactgcaacctccacctcctgggttcaagttattctcctgcctcagcctcccaagtagctgggattacaggcatgtgccaccatgcctggctaattttttgtatttttaggagagatggagtttcaccatgttggccaggctggtcttgaactcctgacctcaagtaatctacccgccttggcctcccaaagtgctgggattacaggcatgagccaccacgcctggtcttttgcttttttttttttttttgagacggagtttcactctgttgcccaggctgctggagtgcagtggtgcgatcacagctcactgcaagctccgcctcctgggttcaagcgattctcgtgcctcagcctcccgagtagctgggattacaggtgtgcaacaccacatctggctaatttttgtattcttagtagagatggggttttgccatgttggccaggctggtctcgaactcctggcctcaagtgatccacccacctcggcctcccaaagtgctgggattacaggcgttagccaccgctcctggctactatcctgacttctaaacactacattggttttgtttgcttggcactttctgtaaatgggatcatatggcatgtatgcctgcaggcatgcacacagatataaatgtacaaactcttttgaatctgccttatgtttgtgacattcatccatattgttgtacgtagttacagatcattcattcttgttgctgtgacggaatttatctggtgattcctttctactgttgggcatttgagtgctttctaatgttgcctgttgtaagtagtgctactgcgatcaccctagtatgtggcttttggtgcgtgtatgcatgtatttctgttggttatgcatagaaggggaattaatggttcatatagtctgcacatttctgatttagtagacactttgggccttatctctgatggatgcaaacttaccatctgcccggagtacccagcttacattcatcaaaattgaatagtcccctgttgcaacactagttgtaacaggttctactcggaggtccctcaagtctcccgggattagatcatgttgtagcatccactctggagatggccctgggaaaaagcaagacttccatgacactgtctttcccagcccagtctgatgccatgccatctcctctcagtgactcacaccaaaccttcccccattcacaattcctcacttctttttttttttaattaaaaaaattgttttttgtagagatggggtctcactctgttgcctaagatgatctcaaactcctggcctcaaatgatcctcccacctcagcctcccaaagtgcttggattataggtataagccaccacgcctgacccaattcctcagttcttcctgctaaggccaaatgtttcttagcgctggctgatttatagcccagataattttgatctaacagaagtactctcaacctcctggctttcacctacagagcacgtgggaccactccaggtgcctgtgtatgtacacatgtatatatttagtgtatttgacatgtttattagagtcaggcctgccttcctcaggcttcggccctggattccagccagctggcccacacagcccccactttcccacctcctaacctttgctggtgccatctctcctccagctcactcttcctacccacattttttgggcagaagcctacccattcttcaaatgccaccatctcaaacacccgctctcctatgaaacatttgcttctcggtcccaactctaagtgaccttccttccacggccttgatctccctctgcagagtggcaggcatcactttccaccttgtatggcaagtcccatcttgactggccaagaggctagcctgtctgaaacacggcctcattcccacagagccccagagttctgcttcgagcagacagagacttcatctgcatcagccaataaagcaatgggtcaccctgtgtctggtcttcgatgacctattgcctatattaggcttcctaaaagtccaactgtgctttcaatgtaaagccccaaatacccattctctaatgcacctaccagtttcagagccacattgaacggtctgtgggagagaaaaaaaccaagcgtcatgttgaagccggcaaaccacaagctttcctttgccaaattaggcagaacaccattttccccttaaatgcatatacaagtgacaaactttcaaagaaaagatgaactggttctgcttcacagcttaggggggaactaagctgtcccactgtaggctatgacggaccatggattagccatcagtatacctgatcctcaagccagtgcataacctcacttgaagaccacaggtgggtctccatctgtctctggatgtcatccttccctgctgcaagcaggggatgacttgggaccgatgtgaggccccttcacactctaatgtttaactctaggtttttaggacggcctagagtatttactgggctaccccaggttaaggagtagctatgctaaggagataaacaaaagaaagctctgaatgcagtccatggtactttcctcaggttctttaaaatgttccccttctaacacaaaaggactcactgagcaattcacgaaaccataagcaattattagtgttcaagaaaggctggtactaaatcgtttgaagttagctgctcgtgttttttcataagaaaaaataatttgtgctttggttctggaataaaatactgaacctaaaatattggggctttaggcagcagcaagctcaaatgacaagactcaatgtgatacgtccagcagctctggaatatgctgctgagcatccacatttccaaacaccttctaagatctccttttgatggtttgaatgatttgagtttgggcaaaattgtcaatcatttatttgtcttttaaaaaatgaactctaagggatatcatcagattttttttttcctttttctgagacagagtctcactttgtcacccaggctggagtacagtggcgcagatctcggctcactgcaacctctggctcccgggttcaagtgattctcctgcctcagcctccggagtagctgggattacaggcgcctgccaccatgcccggctactttttgtatttttagtagagacggggtttcaccatgttagccaggctgttcccaaactcctgacctcaggcaatccggccgcctcagcctcccaaagtgctgggattacaggcgtgagccaccgagcccggccagacttgacttttttttttttttttaacaaatgagccatcataccaggagctgagttcttatcaaatggccggtgagaggccaagcaacaaccctaaatgctaccaagctcaaattgttggccttgcagcaactacagcaaaagggatgaattcttccctttagtgcaaagagccaagagggcttctgaactgacacagaggggaaggataggagctgaagacatcaggaaacagtgaatggggtttgtccaccagcaggtgactacggagcttgatgctatatgctattctaagagggcagcggtatcatttcaaaggttatttgggggatgagctattttctcttcagtgacccagaagattccctcgatcattcagggtactggggaagaaaggcaactgccttcacgagtgaacatggcaatcaatatggccaaaaagggagggggtactaatggagaaacagttcttgtgccccaacaggtgagcagaccccaagtaacaataactacgtgccaggcccttcgccgctaattgcaggccatgtcgttataccttaagagaccctggtgggttcggtactgcccttcgttttaccgttcgggacttggaacttggtgagcataaatgacagaaccaacagtacagggtggcatctgagaccgggtctgtctgattcccacgcccctgactcaagcaacctgacgccgatgtccggggctgccctgagggtgcaggcatgcccctcgagccggcagtccgcgcacgccttcggggcagcctggactggcggatcagacgacgtcaggatctgggctcgagggccgggagatgagggaagaggtgctggcgggggcttaccggctctcggggtacggcgctcctgcacagcgcggccaggcttagcagcacgagcgacatcgccgggccactgcgcgggatccaggccacccgcacgctgcgcttttatcccggcgccgccgggccgccccttctcggctccgcctctcgcagcgccgacccattcccgccacccgaacagagggcgggcccgctggccccctcccaggctggggcaggtcgcagcgccctcgcctgctggggctcggagggatgggccgtgtccgagcgctggcggagcacgggccgccgcggcgcgcgcctacccccgcgcacacgtgcatgcagtgagccaggtgcatcagctgcacccgccctcgggcttcgcgcgcctccgctggagcccagctagcctcgcggctccggggccgaccgggtcggaactgctgcgtccccattccggacgcagagagcgcgcggggcgccggcgccgccggttaaagtgccgcggggcaggggccgggccgcggccacccgctcctcccgctccggtcccgactgtcgggctctcggccgagtcgccccgggtgagtagccgcggaggcgccccgaccaccccgcagcagcgccgcccggccgctagcccggagaggcctgggggccggaggtttggggccgggctggacgccgagacccgggcccgctttacacaatcgccccgccgcgcgaagcgaaacgggtggaacgcagactgccgaagctcactgactcctttgagggagcgaattctttcagctacgcggggttagagcggtaggagtgcccgctgcccgaccccaggctttctggtaaatgtctgtttccaccaagtgagttcggacagcaacacctggggctcccaaagcggaagccgtcagcactggcgatttggagctgcggttctcaagtttccctggcccgggatctctagcgccgcctaaaatgagatccagacggcaggtccgggtcaggcccgggatctgcatttaacgagcctccacccacgcccccgtaattcgtgggtgggtggcccagggaccatcctttgagacacagtgggtttgggggaaagttcacaaaaatcagctgggctaacagtggagtcacagaggctggaactgctgcttcagccccctcggtttgcaaacgacagggttgtggtgaccaactcagggccatttaaacttgtaggcagaattagctccattctacagatgagaagacggaggcctagagaggggtatggaacttaggggtgtgttgtcagctggtgagaggctgtactaagtcaagcagctgttttagctgaggccctacttgtgtgccaggcctggcccacctgccagcttgattaaggcttgcatggactggggatcagccaggggtttgggctctggcatgcatacgtgtggagttgcaggtagcattttcagagaattgctctgtttcctgaccaaggaactcagttgaggttgtggccgcacccctgcctgggactgggccaccctgagcccctcattccacctctctgagttgctttgggccctgtggcccttgagaacattttcagctctaatagtcatcttcctgttcagcaaatacctgctgggtgcaaaggtgaaccacacatgggtgctggctgatgggtactcctggagtgaggatgagtgcagtgagaattattttcaaggacacaagtacccgccttgctgcggaagcccagatgaaaacagcctcgtctgcaagctcaagattgtgaactttgtcccatggtgctgaggaacaatggtacaggcttaaatggtcatccatttttggttttagaaaggccacctggttggctctgcagggcaaaatagagggctagtccctctgagacgagcgagcaggcagccattcactaacatgcgttcattccgtgagtatctgattctgtgctgtgggccaggctctgggctgtgctggcttttcagttgtgtgccagggcaggccctgctgtgagcttggtgttgttcggcacacaggctttgagacaaccagggtgcggaggttaggcctggagacagggttcatgagtcagactttctcagggggcagtggagaggagaggaggatagagccctggggaggagagcttgcctgaggaggtggggaggtctaaggggctgcagcaggaaagcccagtagtgagggaggagctcatggggtcagatggggcagagagaccaagggcactgaggctggttggtggcagtcacaggaagccttggcaaaaggataggggagggggttttgtaaaaagagaagggctgaggttctttctccccccaggggaagaagtgtcaggtgagggtggtctggaggtggctgagctgtaagaaggaggagtactcaggcaggggctgccaggcagagacccaagacccaggccaagtggctttcctgctgttctgggttcagaatgacactgccctggccccctggggcttagggatggggtgatacctggttcagtttcgtagttggggctgtggagtggaggagagggtgtgaagggccctgtagccacaactggaggttgaggtgggcaaacaggtgtgtctgcctgtcccctcgggggttttcccccctagctcagaaggccatgcctcaagtggccctgcatgagaggtcccaggtggcctgccggaaggcacacaatttatttggctgcctaagcctgatgactttgtggctttttgaactggaggctctggcaagtcactgctcttctcagagcagtttccttttctgtaaaatggggtggtgataggggcgatgaagtgatttgagtctatgagagaagcgacctttggacattttctgaccttctcccttcagtcataaattctgctaggtctgggtttctgaaagagctaccagccagtgtgccttcctgtccgggggggctttgtagggggtgctcattaaatgcttgaatggatgaataaattaacacctaccttcatccaaggccagtgcctgagcctgcccacccaggggagctggtttgaacttcctcctctttcttcacaagcagagcaaaggtcagggcctctgccagagcctggaagatcactgggtcaagtacctatggccctgacccagaccctagggtctgcacagactctgtgcagccacagcgcggtgagatgcctggcttccagaccacctggttctgcggctcattcaccatctgttggccttgagtgaggctcttagtcttttggaacctgtttctccatctgtaacatggggctgacatcagttctgcctccccagcagggctgttaggaaacgcagaagaaacagcaaaacagcagataggaaagcaagttgaaggatttaagagtgctgtgtaaatttaggggcaggagaggcagaagcaaaaaaaaaaaaaaaaaaagggggggggaaattccctaggacccaagagtcacggtaatccccagattctgtcattgttattcagacctttgcttctttgcctgatccatccctgggagaacaaggccatcagggttgttgacaagtcctgcgggtccagcctccacccacacaggtggaattttccagttcgttcttttgcaaatattaatcaaggccctggctggtcaacagtggattcattgtctcgtgaagagtgagccgtttctggcacatactggctgtctcccagggcccctggtggtgagccggagctgggagaggaactgttgggagcactcctggcctcggtgctccctcaaccccatgttctgctccagctggttaagcttggcagggtcaattttaatgcctgctttgagggaaagaccctgaagccacactgagggcttgcaccccactgttcccagcagggctacaaaacacattttctctgctctagtaggaggggctggcccaggaaagcccgcagactcaggctaggtgttaactcagcgttaatcccactcctcctggttcctaggagaaaccccttgaggtcacatacatgtgttctgttcatggctgtggtccctgtgccttgtctcctgggtacttgcattgatttttacattgttgttatcacactggggtctcaaagaaagcctcggatgcagaggagacaggtactgttgtcgttctctcaaagctccatctgtaaacaggggtgatgaagttagcctcatagggctgcagggaggatcaccctgtcaccctacgttgggccgtatgttgggcacatgcaacaggatcggtggtatattttttgatccatgatacttgaatttatttgttattaataatatatgggtcgtagatgtagcatcacattccacactttatggaggaagaaacaagatgagtgaggctatgtaagaagagggaggatgaaactcaggccagctgtgaacttgacaaaatcactatgtggtttggttttagctttgcgcttttctttttttcttttttcttttttttttttgagacagagtgttgtcctgttgccaaggctggagtgcagtggtgcaatccgctcactgggctcaagcaaccctctgaagtagctgggactacaggtgcacaccaccatgcctggctaattttttctttctttttttattgtttagaaatggggtcttgctatgttactgaggctgatattgaacttctggcctcaagcaatcctcctgccttggcctcccaaagtgctgggattacaggcgtgagccactgcgcccagcctgtgagtttattttataactttatatttgtgatttgtgtgtgtgtgtgtatcatagttagaacagcgataccattttcaggagcacactagaaacctagggccatgggtgcaggttgatgtcttacactagtcccagctcctgattaatttcagtactttagtgatagagtgatttccagttgatacaaagaagcagtcagtttttcaaacactcaccttgcaatcttaggaccctctgcggttaaacccacccagaagtctgaagaggaaacagcagtgggcatgtgtgtgaaaattggctggctaaccttggctggccaaggtgctttgaccagcaggggcacccagcacacaacctggaccttgcagtgagctgtgaagctgccactgcactccagcctgggtgacagaggtgtctgctggaagtggctctgcttgtactggtgtggaagtgtgccaatgagcgcagaaaatcaaacaggctttgcagcgcctgtgatgtgtttataggaagtactggagtcggcgcagcagacggtgggaagggaagatttgtcctggcatctgtggccaacctcctaagctggtggatttggggtctgcaggggttccatgtctggtccataacagtgcttctcaagctctccatggtgaaagactagatgactgtttttaaaattttaatctttcatgggccaatttttaaaatatgatgaaaattgttataataaaatggaagatatataaaaaagataagcccactatctgcttattagactcaacagacataggttgctgtgtcaaatgataaaactgtaaaagtttctaccctctgacttttgattctgtacttatctctctcagacaatcacaaagagtgtgtaggccagccccggtcacagagtgcaccgtatcctgtcacttctggatgtgaggtgggtattttttaactgagatttcaaaaagatgggttaaaagtttacttgaaaaaggaagctggcaatgagcatttgcagaacaccccaaacttctggggaatcgttggaaatccctcgctgtcggccaggccctgtgccacagagatgttcccacctttctgctttccttcactcctctggtgggatctgagatttcaaacaaacaacaactacaaaaatcctttttatcatggaagatttgaaacctgtataaaattagccagaagagatgatggagatgggaattttgtgttctcttcacataactttgttagcctcacctcgtgggggtcctgttttgtatgtccccctaatccctagggtgattgtaagccaaatcctagataacttttttttttttgagacaaggtctttctctgtcatccaggctggagtacagtggcaagatcatagctcacgtaaccttgaactcctgggctcaagcaatcctcccacctcagccttctaaggagctgggactacaggtgtctgctaccatgtccagctaataaaaaaatttttttgtagacatggggtttcacaatgtttcccaagctggtcttgaactcctggcctcaagcagtcctcccacctccacctctgcctcccaaggtgctgagattacaggtgtgagccacccttaaatatttaccgttagaaatagttgaattattctcttctagttattttgaaatgtataacaggttgttaactacagtcaccatactgacctgtcaaatactagatctcatttcttctatctaactgtatattagataattcttctatctaactgtctatctttaaccctccatcctcccttcccttcctgaactctgataactacccatctactccctatcttcctgagatccacttttttagcctccgcaccatgagtgagaatgtgatttttgactttctgtgcttggcttatttcacttaacataacgacctccatttccatcagtgttgctgcaaatgacaggaactcattctttgtgatggttgaatagtactccattgtgtatatggatcacatttttaaaaaatctgtttgtccattaatgggtacttaggttgattccatgtcttggctattgggaatagtgctgcagtaaacatgaatgtgcagatatctctttgatatattgacttcctttcttctatatacccagcccagtagtgggattgttggattatatgatatttctatttttagtgttttgaggcatctccatattgttttccacagtggctgtactaatttgcattcccacaaacaatgtacaaaggttcctgaaagggtgagtttaaacaacataactgcagaatcatagtcatgtctgacaaataatgatatcttgacatcctcacatacgcactcagtgttcagatgagcagggtccagtgaagagcagcacattctcatggttggatcttgttcctctcacagcctgtaggcttcccttcctctctctcatctctctctcatttatccattctatacttggatttattgttgaagaactgtgtggggtttccctgcacttggattctgctgatgatggacctttgcaagttgctctgacctttgcgtttcttgtgagtcggtggattgatctagaagtgtgatcagattcaggtttgaacttttgggcaaggatgttttataggtggtattgcattctcccgttcagacccctgcctggactatacagagaagtcggtcttttaattgcctcatgtgtgtgaagtcaccttggtgagtccccagctgaccctcgcccatatctttttctccttctgctggtccgggctccccgcttgttctgacatcaccctggctactctgtggagagttggttctggggtagcctgaggaggcagcactagtagcagggacactgctagtatgttgtgaggagggtcccagtggagatgatggggcctgatccaggtggtgtccaaggggtggacaaaagtgggcagattctgcagcaccagcctcatccttatgagagaagctactaccccctaggcctctgcttctgtgtctgcttttcctccccggatagtgcatttttatataccagtcacatgacaagcgtttattgagtgcctgctgtgtacgtggctctgggagcttctagctctcccccactgctgtctgtaagtgaatgcacatggcaggaagagcagctccatgatgggctctgccaggtgggagcttggtaactcctggcctctgaagcctgcccatgaggagagccttcatctcccctggagagggaacagcagttgtctttcttttgctgctatgtgactgcataagagctgggacaccagcgccttctatcccctcggtctgcctctggctgtgctccgggttacccatacccacctccctactttcacccgaggccctctgtgctgcagatgccactcacccaggcacagtgcagcccagagtgcagggagtacacatctggagcacagtggccagtcttcctcaggggccagcctgaggcactgtatcccccatcccctagtctatcaggtgcttgactctgggaggggcccctaagggattcgggtctccccagcagcgacctctgttgtaccctgcctcctacccatggctgggcgcccgcagcacctgcacagactggatccacagacacgcctgcaagggagaagaaatagtaggttaccctgaggagccatccgtggaggttgagcggcctgggccccccacccttgcctgggtgttagaactccaggtttccaatcttacagtctctttttttttttttttttttttttttttgagacagagtctcactctgtcgcccaggttggagtgcagtgatatgatcttggctcatggcaacctctgcctcccaggttcaagcgattcttttgcctaagcctcgagtagctgggactacaaggcgtgtgccaccacacccggctaatttttgtatttttagtagagatgaggttttgccatgttggccaggctggtcttgaactcctgaccttaggtgatctgcccacctcagcctcccaaagtgctgggattacagatgtgagccaccgcgcccggcctcccaccttacatacactctgcttttggtatagaccaccgtgaaggttttagaaagtggtgaagcagctagagagtggagggatgtgtgcagagggcagaggcctggaatgtggagcacaaggttcccaggctgaggaagcacccacagtggggcagcagaggggaggcaggagggcagacttacttcagaggagccacaggcatcggaggtgcccgcagaggccagcgcccacgccttaccaacaggaaaccctgccctgggtcacacggtgcggcctggcagagctctgatgcgatgtcagacttcagggctccacctcgggttttgttggcagcctgtagcctcagcccagtcccatctgcccctttttaccaagaggatccagagggcaggtgggctacgcccgagcagccagggcacaaggggccaagtggtatggcctcgtccacactgtccagaatcatctcccaggtagcagtttccaattcagttgttaattatgtatcaatatgtgggagatgagattcctggaaagagaaacttgacactaaagaaaatgcccttttttttttttcttttagagacagggtcttgctctattgcccatgctggagtacagtggaacagtgctagctcactgcagccttgaactcctgggctgaagtgattctcctgcctcagccttctgagtagctaggactataggtacacaccaccgtgcctggctaattaaaaaacaagtttttttttagaaaaaatttctgggttttgctatgttgcccaggctggtcttcaactcctcaactgcatcaagcaatcctgcctcagcccagaaaatgctttcaaaaaattgttttaaacattttaattgaggtgcaacagacatacgaagtgtccatcatgttggttttgatctgtgtgtatgcctgggtaaccatcaccaggtctggatctagaacattcccagggggtgccttctgttggtcctggcacaggtgtatgagctcagcatccacatctcagactgcgcaggttgggtttgctgtaggccacgtgcagcctcatcccctgcatgtgtccccttggccagcatgacgcagcgccagcctcaggccaagctcagcacatggtgggaggcaagggcgtggagccctcagccagggatgtgggctttccacagctcatctcactattagcctgttgaggtcccagtaagtggcacagagaagtcccaggatggatgtggtcagtggtgaggagggcaatccatgcctgagggaaggtgaggagtgagtaggtgaaaggaggttagcacctgtacctggaggagagaacagcatgtgcaaaggccctggggaggaagggaaggtggaccatgcacctggatcccagggagcgatgctcacagtgggatgatggctacagaggccggggcctggcctggtcgggcttaggacaagagggcctggggggccatgaggaagcttgtcccactgtcttagggagatggaggcctgggttgggggtggcatgagattcctgagagaggaggagcagctgcccagggttactccctggaccaccaccgcctctgggcccagccaggtctcattctcaaactgggatccttcccaccctgggccactgcactgcactcccctcagcccaccacagggctgggtattcagacggttgtgctcctgggaggctctgctgggctgtaggaaagcagccaagccttcttggcttgagacccctggcatgggaacttggtgtcttgcacctttttgcatgctgactatgaccttttggcttctgtgatgtggctttgttggctgggcctgtggtggagggggtcccagcctttggcttgacatggggcaggggctcgacctcttcaggctcgtttccctctctgtgacatggggctgatggtgacggagtgatgatgaagaccctccaccccacccagcatctttggtgacttaaatgtgataacccatgtgacgtgctcagcaggggtagctgctcctgttaatataactcagtttggtcccatggtttaatggagctgtatgatcagataaaggcagccacagagcagtgtgttcttacccacacaaagcccagcctagcatgtagggaatcttgttcgaggtctcacagagattgcaggtcaaagccagtactagaaggccagatggaaaaaagcaggtgacctgccctgaatcctcctttggcaaatgacccccagatgggcacaggtggccatggcccttaccacatgttttgcagtttccccaaaagactgtcatcatcagcctggcctgtgggcacagtgacaggtgtgaaggtcaagtgcaagcctggggcagtgctgacttcagggtgccaagattcagggctgtaaagtaactttctgggctttgaagctcatgagtagctgagctttgtgctaggcctacctgagccttgtccacaatgggctatggtggccactttttaaatgtgttaacagggtcctttcatgtggatggactcactttttaatgggcagtaccctattaggggagtgttaggttgtttataattctttgccactgtaaacaacacagggacagggcccttgtgcttgtttttctatggttgtgcagagcactctcttgattaaattcctgtaagcaggattgctgagacaaagggctatacctttaaattgcatctgtttttctggaaatgttgacatgctcccaggttgtccccaaagtggaatcattatttatcattggccttgtccagcctgagctcctcaaaggctgagcaagtttgaggcatcattttgcatgcaggactaggctggtgtggctcggcctctctccagagttctgtcttctcctcttgggtgaccagtgaaagctaggactgtaatggccaaaggatctaatcctacagggcacagtacactgcactggccaagagctagaaagaaaacatgtgtgcacaccaagatgtggtgaggaagaaagtgctgctgggaggcctgtgcgaagggccctttcaggaagcttcctcagtactctagctgtgcgactctgcaggcagacatgttgcaagtatgggtactcctggaatggtgcgtaagcatcttcttctgggcatgatccttttgcaacttcactctaccaaagttataaaatgtcttgtgcaattggccacatgctcaaaattacatggaaatctgtcttgtcgtataaagcaatccgttttctgaccacaaaatgtagcaaacttgtcaatagcagtctttggctccttttttttgtttttttgaaagagtctcactgtgtccctgcaggctggagtgcagtggtgcaatctgggctcactgcaacctctgcctcctgggttcaagagattcttctgcctcagcctccagagtagctgggattacagatgccttattatgcctggctaatttttttgtatttttagtagagacagggttcaccatgttggccaggctggttttgaacttctgacctcaagtgatccacccacctcggcctcccaaagtgctgggattacaggcctgagccactgcacctggccaatttttgactactgatttgagaatttgaaatgagaattgttagctgatgcaacaaagggctatggcaatgaaagccaccagccataaccagtaggacgtggtggcccccatgtttgttactcctctctctgcttgatccacccactgtggccatcactggcattgggggtgggggtttcaagttgaccaaagccttgcctcccacacagtggtgctacagggaccaggtgtccagcaccaaggccagccggccagatggaaggtgtggcttggtggggctgcccagtgccgcgggaggactcatgtcacatgagtcttttcctcttgactggaaggtagagcaggcaaaagtctgttcttcctcgtgcttgtcagttggcaaagccacatcttcctcttctggtccaggcactagactgggcctggacatggttggtttcaggaaacagagtgggctgggagtgcaggcacccagagtcaaaagggaagccttggatgctacctcaccaacttcagaccccacccatggcagggaggactccgaccccaacacatggaaatgaacacgcatgctatcctgtttttccctgctcccattcctgcccaccttccatcctgccaatgccaggcagctccttccctgcccaggcagcccagggaagtggaaggggctgcttccctggaactcctacctcacaccagtcagtctgcccacccacccagcctgcgggcctgagagggcactacgctagcagcttaggagtccctgtcctcaaggagttccctttgggtagcaggcccctcccttgtgtggggagggtgggagtatcaaggggaggtgttggagcagagttgtgatacggggtggggttttcaaatgattgggacccggaagagtaaatgacctgccgccacctcaggaagaaggcgtctgtcttcactcctgcagggtaggcttgctgccccctggcgaagctcctgttttgcctcttgatcttgtcaattttaattattgtcatttactgcagaccttctgtaaaactacacaacaacaaacacacatgtgcctgtcatctagatcaagaaataaaatgtgattggtgcaaatgaaaacccccaggaatgcctccctgctcagaggttactactaccctcaagtttctttatacctttccccttcatagatttgatttacttaacaagatccagaattcagtcgcatgtaggattttgttggtgatttaaccattgtaagcgtaattcagtggcattaagtatattcacaatgttgtacacccatcaccactatccgtttccaattttttttgcatcacctcaaacagaagctctgttcccccaaacaataactccttgtttcccttcccctcgtctcctagtaacctctaatctattttctgtttctatggatttgcctattccatagaatcatacaatatttgtcctttggtgtctggcttatttcacttagcataatgctttcaaggtccagccaagctgtagcatgtgccagaatttcattcctttctaaggctgaataatataccattatatgtacataccacattttatctactcacctgtttttttttgttttattattattatttttttgagatggagtctcgctctgtcgcccaggctggagtgcagtggtacgatctcggctcactgcaagctccgcctcctgggttcacaccattctcctgcctcagcctcccaagtagctgggattataggcacccaccaccatgcctggctaatttttttgtatttttagtagagatggggtttcaccatgttatccaggatggtctcaatctcctgacctcatgatccgcctaccttggcctcccaaagtgctgggattacaggcgtgagccaccatgcccggccctactcacctgttgatagacatttgagttgttgccacctttttgctgttgtgaataatgatgctgtaaacattggtgtaagaatatctgttcaagtttctgctttcaggtttttggagtatatacctaggagtggaattactgaatcacatggtctgtgttagctttttgaggaactgctaacctgtcttctacagaatttgcaacattttacattcctaccagcaatgtgcaaaggttcccatttctccatatcctcattaacacttgttacttttctttctttttttttttttttgagatggagtctggctctgttgccaggctggagtgcagtggtgccatctcggctcactgcagcctttattatagccatcctgatgggtgtgatagccatcaggatgggtgtgaagtggcaattcactgtgattttgatttatagtttcataatgattagtgatgttgagcatcttttcatgtgtttattggccatttgtgtttctttcttagagaaatgtctattcaagtcctttggccattttctatttgagttgtttgttgttgagttatagttttaaacacattctagatattaacctcttatcagatatatggtttgcaaatattttctcctatggattgtcatttcattcttgagaatgtcctttgatgcagtaaagtgtttgattttgatgaaatataactttcctacaggtagggtgacacaagcacccctgtggccaccaacactgggactgtgctgggtcagacctgaagtcagcacaggactgggtcttgcccaaggcctgctgtaaccactatgtggctaccgcctgtattcacacaaggccccagggctctacagttagccagcggtgaagccagccaggcttgtggccttccctttggggcggcaagtttccccaggccccgggcagatagagatgctttccgggagccaggtactggagtcaaaaacattagaaagctacctcgtgttctattctactgtagctgagctggcactcacaccatgtgacacagtccttcccacttttcccttttcacaggcagaggagcctcacaccatggcgaccaccacaggcccacagggaggactgccaggataccaccagcattcacttaaggcccaagggctcttcagtcagcttgtggtgaatgctgccaggcctgagactcacccttcagggcagtgggctcccctctggcccagggttggtccggaaaggccacttaagagccaaggcctggaatcagggaacccaagagccctcttggtgctctcctccactgtggccaagctggtgcctgatttttggttgctatgaaattgctccctttgtgcagatagttgtcaaacttggtgttcctgtgggggtggggggcgagggggatgattgatggagcaaatagagatttgccatcttgctcttctcctccctgatttcagtcttttaagatgtattaagatttgttttgttgcctaacatatggtctctcctggagaatgttccatgtgcacttggaaaaaatgtatattctcttgttgtagtgaatgttttgtatatatctgttaggtctccaactggtttatagtgttattcaaatcctctgtttccttactgatcttctgtctagcttctgtccattattgaaatctgagtattgaagtctccagttattgttgtaggactgtttatttctcccttcaaatctgtcattgtttgcttcattttggggccctgatatttggtgcatatatgaattgcatgttttaaaacttcacatatatacaaatatatgtgaagatatatatatatatatataatctcatttaggccacagcctcttataatattctttttgtgtgctgaatatatttttaggattcatccatgttgatgtgaggtgctatgtgtccttcattttcactgctgtctggggtttctttgaccaactgaactatacctttttctatgtcctttatatttccacatacattttgaaatcagcatttcaatttccaccaaaaaaaaaaatgcctgctgggattggcattgcatcgaatctataaatcaatttggggaaaactgacatcataaaaatattgggtcttcctattcgtagtatttatttaggtcatctttaacttctgtcaatgttttgtagttttcagtatataggtcctgtatatattttaagtttattactaagtatgtcatgtttcctggtgctcttgtaagtgttattgttttgtcttgtggttgcccatggagggtgggatcaaccccccaccacccaaagttggtttgaatgttgagactaatgacatcacacacacaccaagtggctaccataaggtttattgctcacataatggagctttatagggtgaggagggcaagcacccaggcttgtctgtgaaggaagaggtgagtgttcctggttattattatagttagggagtggagtcaaggtgagaatcccacacgtgaattggatttgcatgacttgaacctccctgttgatactccaggcaggaatgccagagcttttttattcacttgcccaggtgtggggcaagaggggaagagggagggatggagcttgaaagctatcggtagtcaaacatcaaaaatggagtcaggctctattatagttttaaaatactgtttaaaaaggcagtttcaggctcacagcaaaatcgagaggagggtgaagagatttcccatataacctttgcccctacacgtgcataatcctcccattaacaacatcctcgcactaaagtggtacatttattacaaataataaacctatattagcacatcattatcacctaaagcccatagtttacattagggttcactcttggtattgcacattctataggtttggacaaaaatgacctgtatccaccactgtacagaaaacagattagttccccgccctaaaaatcctttgtggcctgcctgtttatccctctcccaactcctggtaaccactgatcgttttactgtctccatagttttgcctttttcaggatgtaatatcgttgaactcatacggtttgtagccttttctgattggcttctttcgtttagtaattatgcatttaagtttcctccttgttttttcatggctttctggctcatttctttttagcactaaatgatattccattgtcaggatgtaccacagtttatttatccattcacctactgaaggatatcttggttccttccagctttgggcagttatgaataaaactgccataaatatttatttcctggtttttgtttggacatagttttcagttcctttgggtaaataccaaggagcacaattgctggatcatgtggtaagagtgtgttgatttttacaagaaatcaccaaactgtcttccaaagtggctgtaccatttagcactcccaccagctatgaatgaaagttcctgttgcctcacatccttgtcagcatgtgatgttgtcagtgtctggattttggccattctaatatgtgtatagtagtgtctcactcttgttttaatttgcattttcctgatgacatatgatgtggacgatcttctcatatgcatctttgccatctgtctgtcttctttagtgaggtgtctgttaaggtctttgggccattctttaatcgggttatctgttattgagttttaagaatatatttatttgtgtatttacatagtagtcctttataaggtgtatcttttgcaaagatttacttctcgtctgtgacttgtctattaattctcttggtagtgtctttagcaaagtagaaaactcacatttgattgaagtccagcttatcaattatttctttcatggactgtgcctttggtgtcataatatataaagtcatcgtcaagcccaaggtcatctagaggttctttctcctgtgttatcttctaggagttttatagttttatattttacatttaggtctgtgatccattttgagttaatttttgtgcagggtataaggtctttgtctatatttactctgtgtgtgtgtgtgtgtgtgtgtgtgtgtgtgtgtctagttattccagctccctttgttgaaaagactttcttgctctattgtgctgcctttgatgacttgtcaaagaccagttggctacatttatatgggtctatttctgggctctctgttctgttccattgatctattcaccaatatgacactgttttgattactgtagctttatagtaaatcttgaagttggttagtgtcagtcctccaattttgcgcttcactttcagtattttgttggccattctgtgtcttttgcctctccatatatactttgaaccagtctgttaatatctacaaaataacttgctgtggttttgactgggactgcattgaatttgtagatgaagttgagaagaactgacatcttgacaatattgagccttccaatttgcgaacatgaaatatctctccatttatttagtttttaaatttcatcagggtttcatagttttcctcatatagatcttgcacatattttgttagatttatacctaagtatttctttgtgatgcttatttatttatttaggggcagggtcttgctgtcacttaggctgaggtgcagtagtccaggctggagtgcagtggctcaatcatacctctctgcagcctcaagctaggactacaggtatgcaccaccacacccagttactttattttttactagttatttttttttagagatggtatatttagtcttttctctcattgctataaagaactacctgagactaggtaatttataagaaaagaggtttaattggctcatggttccacaggctttacaggaaacatggcttgggaggcctcaggaaacttacaatcatggcagaaggtgaaggggaagcaggcatgtcttacatggctggagcagtaggaagagagagaggaggggaggtgccacacgcttataaacaaccagatctcataattcactatcatgagaacagcaagagggaagcctgcccctataatccagtcacctcttccaacattggtgattacaattcgacaagagatttgggtggaggcacaaatccaaaccatatcagatggggtatttctatgttgcccaggctggtctcaaactcctggcctcaaatgatcctctgaccttagcctcccaaagtgttggggttatatgggccactgcacccagcctggggtgctaatttaaatgatattgtgtttttaatttcaaattccacttgtttgttgctggtatataggcaagcaattggcttttatatattaaccttatatcctgaaaccttgctataattgcttattagttccaggaatttttgttgattcttttagattttctatatggacaatcatgtcattagcaaacgaagtttcatttcttccttcccaatctgtaccttttccttttcttgtcttactgcattagataggacttccagtacaatactaaaaaggagtggttcaaagggacatccttgcttcgttcctggttagtgagaaagctttgaattttttaccgtcaggtatgatgttagttgtagggtttttgtagatattctttaccaagttggggaagtttccttctactcttggtttactgagagtttctatcatttaatggatgttaaattttgtcaaatgctttttctgcatctgttaatatgatcatgtgagttttctttttcagcctgttgattatttttgaatgttgaaccagtcttgcatacttgagataaagcccacttggttgtggtatataattctttctatacatactttgattcaattttctagtatttttgttgagtgtttttatctatgttcatgaaagatattggtctgtagtggttttttttttttattgtaatgtctttgtctggttttgttattagggtgatgttagcctcacagaatgagtcaggaagtaatcgtctgtttctatcttctagaagagactgtagagtactggtataatttcttccttaaatggttgatagaaatcaccagtgagcttagtcaagcttggtgctgttttggaaggttatcaattattgattcaatttctttaatagatataggcttatctggagtgtctttctgcttgtgtgagttttggcagcttgtatctttcaaggaattagtccatttcatctaaattatcatctaatttatttttaaagatgtattccctgggtataatttttcaatttcagtaaactaggactagaggtttttttttctttcaatatttaaagttgtcactccattatcttctggattgcatgttttctgagaattttactgtcattgttatatttattcctctgcatatgttttttgtctggctacagtgatgattttctctttattttgaagtttcagcagcttaactatgatgtacttagatgtgtttttctttgtactaatcctgcttgggatgctctaagcttcttgaatccatagtgttttgtcttgcactacgtttgggaaagtctcagcaattatctcttcaaatatttctcctcccttgttctctgtctcttctttccgccttgccctccttccccactatttccccctcagactccagttatctgtactttagtttgatattgtcccagagttgttggttgttttttctctcttcccctctttatatttccagattcttttctgtgctatatccaattaaaaattgttcttctctaacattgtatttttttcttgcatttatgtttttttctatagttttcattgtttggctgaagtttcctatctgtccaccttttcaactatatcttttataatgctcaccttggttaaagtccctgtttgatgggttctaacatctgggtgcattactccttggtctgtttctgttgactactttatctcttgataaggagtcattatttgccttgctttttggtatgtatcctaattttttattgaatgctagaccttgtgtgtaatgggatagtggagactgaggtaaacagtatacctagcaaaggacctgtctttcattctgttgggttgttagtgtggagtgttgtcagtctggtggggagtggtgtggggcctggagctctgaagagttcttctcagtgttccagcagcctcagacataccattcaggaggccccgccacctctgtctcctatgcctgtgcaacggtggacgggaggaggagaaagagcctctgcactccagtggtaggctgctgttacttggtgcagggcttgtggaaggggtggtgagatttatcagggtttccttttgtttcagcctgtcttgggcaggccttgttggtctgagcctcacgggtggggtgttctcaggtgttcttttcaatggaggttttcatgacatatcctgtttcttttctacctctgtgcactatgctgggattgatttgaacattgttaggaaagggccctttcaaagctattgccatttttctgttaaaacgctagcattctacagagtgatctttgaagagtgtagctctgatcttgaacctgcttcaaatccctctagtgctccccatggcccctcgggtcaaaggctttgagctctacagtctcgtgcctctcatgctgatcttccttcagttatttaagtcttgtccttttcccaggccctaaaccatccgttttgaaagcagatgtctttctgtgtattgctgcaggaactgggtggggcagggaacagtgcctagcacatggtaggggctgagcccactgtcttgaagggatgagtacaaatactctgttttctttctcccttggaaagccctttgcccccctgccttccagcaggcagactccagcccagtctccaggttcatacacagggcacagggaagcattttacccctcagttgggggaggggcctttctgctgccccatcccctggcctgtgcctgtccatcctggcacatacaaaacagttctgaaattcctgtgtgtccctcacttcctcctcctagttcctttgagcagccacatcaggctgggcctgctgcaccctgtcccagcaggccgttggtgagcataccctggatatgcggagttaagatttttaaagcccctcttcctgttttagggagaagtgagtcatctcattcccctccgtggatcagaggacttggactagatagaagcatgtggtgtctcctacgaggcctgggccggcctggagccctggcacggggagccctggggcagcagcaatccctgggtgcccgggccctggccagcgcaggctctgagagccgggacgagtacagctatgtggtggtgggcgcgggctcggcgggctgcgtgctggctgggaggctcacggaggaccccgccgagcgcgtgctgctgctggaggccgggcccaaggacgtgcgcgcggggagcaagcggctctcgtggaagatccacatgcccgcggccctggtggccaacctgtgcgacgacaggtacaactggtgctaccacacagaggtgcagcggggcctggacggccgcgtgctgtactggccacgcggccgcgtctggggtggctcctcatccctcaatgccatggtctacgtccgtgggcacgccgaggactacgagcgctggcagcgccagggcgcccgcggctgggactacgcgcactgcctgccctacttccgcaaggcgcagggccacgagctgggcgccagccggtaccggggcgccgatggcccgctgcgggtgtcccggggcaagaccaaccacccgctgcactgcgcattcctggaggccacgcagcaggccggctacccgctcaccgaggacatgaatggcttccagcaggagggcttcggctggatggacatgaccatccatgaaggtagtggtctcccttctctttttaaaaaagcactaccccctaccccagcccccacccatcttggcccgtggctccaggctcctggctccagcatggtcaggaggcatgggcagactgaggctggcacgaccgggaagagatctggcttagtatacccctccaagagtacaacccagagccctgagagtgacccaggatggtgaccctgggcgttctctgcacctctggcccctgttggtgtggataacagagaatcagctctctggacagagagcctaactcctctagggacttgcacatggggaaactgaggcacagagtggtgaagggccttgctcacagcaggacagaggcgagccagggctgacccggggcttctgcctgcctcttgaaggctctcacccctctggctgtgctcctggtctctgtgtcctcctgtttgagggtgaagggtacttttccacctgcctccaggggaccccaggcagatgtggactcagtagggcagggtcttgcagggtctttccgtctcagctttactttgaaggcgggacttgcagtcagagctgggcatatccactctttctttctccagctccttcctcctgcccaggtgccaggggagggcggagccatgcctgaccacctcactccatcctgcaggcaaacggtggagcgcagcctgtgcctacctgcacccagcactgagccgcaccaacctcaaggccgaggccgagacgcttgtgagcagggtgctatttgagggcacccgtgcagtgggcgtggagtatgtcaagaatggccagagccacagggtgagtggactgcagctggggtcctggaagaagggggtgggcagtgaccctggtggtccagctcagagtgggcaggagtcacgccctcacccccagacccacgtgctcatccctgtgatggcggggggaggggcgagtagctgatggcagtgggctggtggaggtgaagaagcccctagtcctgccaccgagaaagggcctatggtgtcagtgcccctgtgtgccatgcctaattcagagctctcccccagtaccttccacaccatttcaaggcaccgatgtcacagaaagctataggtttaaagctataggtttacactagaggttttaaaacccataaatgtgattgtactctatttctgtgttgttggcagggggtctgattgttttgcagcttcatgtgtagatctggttcaccgcttgctctctctaaaccacccacttgaatgcctgctttcatttatctcatgtaagccctcccctcctgtttctaaggctgtcactactgtccagctgtagttgcacctgctggttgctttcaagtagtgactcagtgagtttcctctccttagctctggggcctgtcccgggtgtgccacaggattctacatcccaaggctgtgttctcatggtgctggctagagtagggcgctggtctgtgagtcaggagaacagctggcttttcagggagtgacctggctggacctcttccaggcttatgccagcaaggaggtgattctgagtggaggtgccatcaactctccacagctgctcatgctctctggcatcgggaatgctgatgacctcaagaaactgggcatccctgtggtgtgccacctacctggtgagtccccttctttactgctccccagaggctgtctctgctcaacaaaaggcttagtgtatgtatcttattagcatgaagtggggaggtggtggcagtcagtgatccttggaactatcacattgtccccgagagcccgaaggtttcccaggcctcactggacactgtcatccctgggccccgagtcttgcattgttttccttctccctcctccggctgccctatttcatttggagaagggcaccctgcagcagggagtatctgccctgaagccccactgggtcgggcatgggcgtgtcaccagggcagctctatggcgagaggggtccaggcctcgtccttccatccacaggactcgctggctgccctgagcatgaatgaggtcagctccgtgctccagagcctgctcttcatgttaagatgtaaactttgttttataaactgtctctgatgctcttgagggtcgggctctgtctcttgccctccttgataaccccactccgggagggctaggcctttgtgcctttaggcttcatcatgaggggcccggggaagtgctgcttcatgatgttgacctgcccagtgtcccaataggcttggatgaattcatgcaaggacggtgtagcacgacagggctgcttcctccttccccacgctggcgtgagggtggggctgctgtctgcccctctggccatcaccatccagcaaccgctcaccaagcagtgcctgctgaaggcgtaggccctgccctcacagagggggctgctgagcagggctgacaaggggcacccagaggctgccgtaggagtgagtgacaaggacaggtggccttggcagcatccgaggcaggccagacttggccaggagtgcacacatagtgtctctgggaggcagcctttaagctgagaccagggaactgagcaggagctggtccagaagataagggaataggaaagaatttttcaaaaccggggggatattgagaagcagctgagcccccttggtagccattttctaaaccactccttcccgtatcaggggttggccagaacctgcaagaccacctggagatctacattcagcaggcatgcacccgccctatcaccctccattcagcacagaagcccctgcggaaggtctgcattggtctggagtggctctggaaattcacaggtgagcacgcttaccagtaacctgggaggagactgcctataagcattgagacctccttcctgaggagctgaacaggggttctggccactgggtttgatgcggaactatgccatttaccttagccctgagcctcagtttttccatcttcaaaatggggatgcacagtttcaacctgacaggttgaagcgaggaccagaaacaatagcacatgccaaggagcttggcccagggcctgctggaggtgagactcctcggggcttaggggctgctcctccttacggatgagcagggatggccttgtgctggacagcaggtgaggtccaaggagccaggagaaaaggtggagagaggagactttggggctagactgcagaatcagcattcatctttcaaccttttccatttgatttctagctgtgcctgggccaggaactggtagtttaaaatcctacccatccactcagtctgtatttctcacacacctagtatgtgctgtgtgctgtgctaggtagtgggaagagccggtaaggcaggtggcatgggcagtggcagaattggccctggtagagagcagagctgatgccatccttttggcaaatagctgacattttatggtgtggtgctgggtgagccccctgtgaggggtgaacagatgtggacaggacttgggtccaggcactagagtggagtccgggaaaaggaagaggagcggccaggagaaaggagggaaaccaggagcagccggcccacctgccacggcctgactggctcttctgcctcatcctcttctgcttctcaggggagggagccactgcccatctggaaacaggtgggttcatccgcagccagcctggggtcccccacccggacatccagttccatttcctgccatcccaagtgattgaccacgggcgggtccccacccagcaggaggcttaccaggtgagcaggtggaagagcctcggcttcccaggatgtctccttcccaccaggaaggaagatgctcccatcttccaaggcagcattctccctggtgccatatggctgcagagtgggggacacagaggcctgtcccctgccttccagctgcccagcgtgtcagtctgcgtggtgcatgccaatggtatgactgtttcatgcaggctaggtaccgagcaccagaaatgggacaaacagaggggctgacttggctctgggatcaccacctctgaaagctttgagccatggagtatgaggccaggatgaaagagtgattccttgaggtggtctgtaatcactcgtggaggtgggtaccatgcgggcaaatgctaacatgcatctgttccccactgattctggaagcagaggcccaccctacaggtaaaccagggttgacagaggtcactgtggatgtctatggagggaccgtcactgcttcctctgtgttcttctaggtacatgtggggcccatgcggggcacgagtgtgggctggctcaaactgagaagtgccaatccccaagaccaccctgtgatccagcccaactacttgtcaacaggtacttcacccacctgtgtcttcctgggcttgaacaaacgaatgcctttgtggggttcctgtttatccctgaatcatacccttggactacactttctaggacacaagtgaccctctgtcgtcccccaccgtgtcactttaggctgtaaacttgcataggcagccccgtagtgtcctgggacacatgagataaatgaagtcccagggtttagacagtaggggagattttcagctttcagaacaatctgccatgatgtgcagggagaccacgccatgcaggtgccaggtctgtaggtagagcatttttcctgttgtcactctgagcagtctctaaaagcaaattccattcctgggcctgcctctttgcatgcagcaaaaacgagcactacccactgggcaggttttgcccagcagtggctgcagggtgctcacagccccactgtagcaggggcagggtgtgtgtacttatccctgccctacagataagtcagatccctgatttaaacctgggcctctgggtgggctgtgtccgtgtaggatgctacctttgagctacacggtacagtctaacccgctgtgggcagggacaagcagcctgctggctcagtcccccatggccctgaactttgtccccaaacaccatcccctcagacagcttacagagcctctccatgccgtgaatcttccagtgaggccagcacgggcaaaaggaggggtcctcacctgtttcttctcctcgacagaaactgatattgaggatttccgtctgtgtgtgaagctcaccagagaaatttttgcacaggaagccctggctccgttccgagggaaagagctccagccaggaagccacattcagtcagataaagagatagatgcctttgtgcgggcaaaagccgacagcgcctaccacccctcgtgcacctgtaagatgggccagccctccgatcccactgccgtggtggatccgcagacaagggtcctcggggtggaaaacctcagggtcgtcgatgcctccatcatgcctagcatggtcagcggcaacctgaacgcccccacaatcatgatcgcagagaaggcagctgacattatcaaggggcagcctgcactctgggacaaagatgtccctgtctacaagcccaggacgctggccacccagcgctaagacagttgctgctggaggatgaccagggaagccccctgataagccaagagggccagcacagcccttgctcccaggctcctgcctgaaactatctagcacactaggacccaggtggtaccctactcagtggctgagaattggataaagtcttgggaaatgagacaagtactgggcagtgaatccagctccttttccccagcctttccctgtgggccatttggggaaggccagcattcagcctgagatgttcctccctgcctcctggagggacagaaggggaggatggttaactcctgccgcatcctttttcttgtgttcacgtggcattctctaacccagggcagtggttccttcccaggccatgcacagaggctgggtgcctgccagacccacggagggttcgcgaaggaaggggcatcctccttcttgagctgcaagctttagctgaggcagtaagtcacacagtagttagttcagcctgggctggcacataagtccccagtgtccctgttgagaggggaaagttgcctgctggttgaaaaactggcttttcctttctcgctgcctaatttcactctcagagtgaggcaggtaactggggctccactgggtcactctgagagggttgtggctctggttcttattaaaccagggccaggtgcagggctcacacctgtaatcccagcactttgggaaggtcacttgagctcaggagttcaagaccagcctgggcaacatagtgagaccttgtctctggaaaacaattagctgggcatggtggtacacacctgtagtcccagctacttgggaggctgaggcgggaggatggctttagcccaggaggttgaggctcctgtgaaccctgatggcaccactgcactccagcctgggtgacagggtgagaccctgtctcaaaaaaaaaaaaaaaaaaaaaaacctgagatttttatggaccttattcaaggggagaggagtctggagggaatgccgcttggcttcactaccaaaggttttatgacttagcattttaaaaggttttccttttaccaagaaatgcagaaaccaagagcaaaccccacgtaccagatcactgattcctactgaagcagctagcccgagaaaggactctctcatactggtcttgggaaatgacttggcagcctgagccatcccagcagtggacaaggatggttaattcttattctgtagacgtccacaggaacagactaggatggaaaacacagttaagcacagccatgcaccctgtggctgtagaaatgcccctgtgtgaaagaaaaataaattcaagactggagttttggaggaaaaaaaatacaagtagcatttacaacagctctttgctctttaaatttcttaccattcaataaagtgatccagtcactcacatttgaactgagatgccttctccagactgttctgacaaggtaatgaaaataaaatgcacttggatttttccagacatccacatccaccgtcaagggctgggaagaaaagcattgttgcgtggaaacctgcagctatactaggcccagaataaggacgggaggaaattgggggattccaggctttgctcggatctgagaggattggggcggcttacagactggggccgggggggggggcgtccgacagccacaagttagttttctgagaaaaaccttcgagagaggcagcaggaagaaacccatcacacctctccttttaaaaatcttaagcagctcttgtttaatcttacctgtattttttaaaatttttgttcgaagagagggtcaagaaaaaaaattctaaaccggccaagagacttatttctcctacggagggtccccacctgccccacagcagcagtccatggccatcagtcacctgggtctcggggctgcctgcaagagtgcagaaacaggagttcaggtgccagccccgtaacttggagggcctcgtgcagctttcctgctggagcgtgtgtggattcaggggcaggggatagtcctggaccaaccatgactgtgctgacccttcttctctggaacaggtatggatatggcagggtgacagtcacttagttctaccatctctgtgtcccatgggtgtgtcagtgtctgagaccatggtgggttcagtctggtggctgtattttaaaataagcaaaacgtcatatggtaagaggagcccattggtgatgctgctcaattgcacccaggcccttctttcactctcaaatacttagccatgttctacacaatcgcacaatttggccataaacaggaatgaggttcaaaagaaaagatggtaagtgtcacatgtccagaacctgagcgttcccctgccatgaagggagtctttcattcaccccaggaggagaggctgtcacctgaggaagccagcatgggggagaaaggcacttgctacaaagtggggtgcacagagggtacccccccatcttcagtctcatagggaattgggccccttggccaaaagcttgcagtacctaaaaacagagaaacgtgctttgcaaaaatggctcaaagagcacaacagaatgcgctgtccatgtgcccagtgctctcaggagccctgacctattgcagaagcctgtgttgaagccgctgcactagtagaaggcagctcctgatggaataggggataggggtgggctgtgtgggagccaagagcatctggcagcctgactggagatggtgagttcctgaagcaggagttgtaggcacccaaacatctagtctttctgcttgtagcgaaggttgcaggcatcatctccacgaattcaaatagattcttcttggctaggcatggtggctcacgcctgtaatcccagcactttgcaaggctgaggtgggtggatcacttgaggccaggagtttgagaccagcctggccaacatggtgaaaccccgtctctactaaaaatacaaaaattagctgggcatggtggtgcacgcctgtagtcccagctacttgggaggccgatacaggagaatcgcttgaacctgggtggcgcaggctgcagtgagccaagattgcaccactgcactccaccctgggtgacagagtgagactgtctcaaaaaaaaacaacaaaaaaacagattcttctccagccaaccatgtcccgccactcagaagtggtttcatgcttctactgataagccaacttaacatcagatccaatacagattttttaaagataaaataccatctctactggacctgtttagtggctcaggctgccctcacaggacatccctgagaccaccctgtcactcttgatgttggaaccagggcccaggcctgctcctcattgtctcctgccctcctagtccccaggagaggaaaagaaatactgttttagagaaataacattttcaacaaaacatccctggagtcagattttgagttggggtgggctaatcagggagtcggggctctctgcgtgatgtcagttctatggctaactggtttttctaaaccagccagctgcctatcaaaacagtacaacttttctaggaaatgcaattggcaaagacacttacgatgctgagaagtacacaaggtgaaactgctccagtttttctcatagcagggtcagcaggaaagcaagtggtgcccctggtcccatctcacacaggtgagactgcaccgagaggtaacgtggccctcacagcccaccacgcctggccttcgcccaattctgaaacttcgtaggatagagctggaaagtgccacatggtgaagcgagatccagctgtctgggtggatgtcggagtccataggctgagcagagatggttcttagtgaggttctcgctgccagttgacggtgaaatcatagctgccatttacattttgtgagattatgaaaaacataagactaaagaaactaaatgtgttattcctgtggacacaaaaatgtgtgtttttcagatggggaggggaccaaaaaggaaaaacatttcatcttaaaactttcctaagacaagggaaaacaaaaaaccatgctctacaacttcaaatttttcttacaaagaaaaatttaatattcgatgagaggttgaaccaggcttaaagcagacatactaggaaatggtgcagcctgtaagaatgccagtttgtaagtactgactttggaaaagatcatcgcctctatcagacacttagggtcctggtctggcaattttggcctgatgtgatgccacaagacccaacagagagagacacagagtccaggataatgttgacagtggtgtagccctttaggagaaatggcgctccctgcggctggtattaggttaccattggcaccgaaggaaccaggaggataagaatatccataatttcagagctgccctggcacagtacctgccctgtcggaggctctcactggcaaatgacagctctgtgcaaggagcactcccaagtataaaaattattacacagttttattctgaagaacattttgcattttaataaaaaaggatttatgtcaggaaagagtcatttacaaaccttgaagtgtttttgcctggatcagagtaagaatgtcttaagaagaggtttgtaaggtcttcataacaaagtggtgtttgttatttacaaaaaaaaaaaaaaaaaaaaaattaacaggttgtctgtatactattaaaaattttggaccaaaattgctacctatcatctatctttttgattgcagggaatccctgccaaggtaacctgacagtcggcctaattctgttgacagaaaatgaagccttgacggttctaattatccaaaagtgggttttcatcaggacgtacagtcagagtgtgagtgcattctaatgaaaacttcagccctcattcaattgcatataaaagccctcaaagagaacatacagtacagcagttttgtaaaaggcaacaatacgatttgtacagaccccgacactccaatcctatagatcaccacgttgctcctctgtccccagcaccccttatttcttaagcagcaccaccagtccccagaggacaagagcagctatatctcatccacctatgcatttctgcaccagcgatgcaaaaaacaccctgggtgggccacagagaaaaccgtaactatggatacccaaggggcagagcagccagctggacctgctctgtaattcacttacttacttaccagagggtggttcaagtcaaacaaacaaaaccaaagacagttgcaacccatggtggatccaaaggtacagtatcaaaatcatggaactcttgcccaaagaaaagactgcaaatagtcatctggtatatcttgtggaaagatgataggtttatagtgactcaaaatattttagaaaaatttctgtagtgtcaagttctttcaaacttaaaattttaaccccagaggattttcgctgaataaatgagaattggctctatttcttctacttctggatagcccgagtaaaaatactaataatttctagattttagtggggaactacaattattaggacccatggatattgctgcagttcaaatacaatacagtaattacaaaatatagaccatctctttacaaatacaaattatagtatattacaagtcatgtacagtaaatctataattttaaacaaactagtgtatctaagtttacctggttgcgagtgcattattattccagtttacagttgcccttagcgtgacagtcagaaaccgaccatcggagtgatattctcttatgtaaactggcgtcacatcacagaaaaccttatttatgaggtcccattgccctcgcaataatcactggtagctgggttctgacttacttacacaccgtatttcagaacagctaaacaggaaccaggacgcagtgtatttgggggaaagggtttaaaaatggatatgttgggcccagtgactgatatgctagaccgatggctgaggtaacgacacaggtgtgatgatcgtcatcacctttaactttcccctgcaccccgccgccatgccttcagttgggtgggcctggtgccctggtacatgggagaagcagactccacagcagtgcccatctggacaatggggcagggcaggtctggcctcctcacccatcctctgtgagagggcggggcctgctgtttcctgcagctggggccgagcgcatggtactctgccaggctcaaccgcttgggacctgttcctaccaggtttatggctttcttgaggcatgacatctcttatacaaaagtctaattaattgaatattactcccaactagtgcctaaactttcctaactatgaggcacttttcccctggctctcctgcgccccacctgaggccagagccagtctgcccctcgctgggggctacaaggtggtgatgcatatcatttcatccgccaggtcctcctcatccctcccagggtctggctcttcgtcgctgtagccaggaccaaagtcctgtagctcatagtcctgccggtgtgagagggggcccacatccccgttggctcggggacgcacgttcccattaagcagggtgctggctgcactctccatctcgtcgatggtgaggtcacaggcatcagcgatttcgtgttttgttgctgacacaaattttgggtcccttgcatagcgtcccaagccttcggatatcaggacctgtacagaaaagagggatggatggcatgggggtgttataaggctttgcagggcagggggacgacagaaaaatcaactccagtgctaacttaactgcaccgtgtgctttggggatgcagctcaatcatgttttctagacctcatacataataactagtgtaaatggctttgaaaatgtcctggagctaaaaaactacacatggcccaacaagagtgaaacccactggggaaagacatttagtataaactagaaacatatgccggaacagcacccataatgccagcacagctcatttatgagaattgacggtggtgaccagtttttgttttttgttttttttttttttttttttgagacaagagtctcgctctgtggcccaggctggagtgcagtggtgtgatctcggctcactgcagcctccacctcccgggttcaagcagttctcctgctgcagcctcctgagtagctgggattacaggcatacaccaccacgcccggctaatttttgtatttttagtagagacggggtttcaccatgttggcaaggctggtctttgagccgctgacctcaggtgatccacccgcctcggcctcccaaagtgctgagattacagacgtaagccactgcagccagtggtggtgaccagtttttactcatgcttcaggtacattcctgctgctcagaagtgtctgattgaggcagcctagctcacagcctggccgccctcccaccactgcccttcctgctgttacagttgcacctctgctgctcctggtgcttcctgcccaccacggccaagaaccgtactcactgcctccaccaagctgtccgcactcctctgcttgtcgctgtttttgttccggaagctgctggggacagtcaggctggctggtgtgaaagtccggtaggagatgtcgggctcgtctgtgtaccaggagctgcggtgcagggacggcaggctgccgttcacctggtccagggcctctgactgctccacttggatcaggggggtgtagcacggtgtccagtcccggtagggaggggttgctggaggggtggcccacgaccgggtcgagtgactcggtgagtacttctgggctttacttgaatctaggccggcaactgccatgatctgaggaaagaggggactgttgggagaccagaggttctcagaggtccgggcctcaaaccttctgcgcacagaccaagcaccggcgctgcgctcgccaggggcagtccaggcaaggacttggaaaggacatgggcacactgaagtacgctgaatgaatgggcggtgatgactttgttttctagcagactgtgctttcttttaccccgaatccataatgcatttcctttggcttttcccaaggaggtatcagttgctaattcatgaaattgcttcagaatgaagaatcagggaagcccaacaagctgtgggtgtgaacacaccacccagttcatgctgggtttaaataccgaagtacattcaggggaaactaccacttcccagcacttataggaaaacagctggttctctttgctctggagtaatgcatcctagagccggcatttggcatgtgctaaagcactgggtacaagccccggtcttacaatcccaccacggcagatgcaccttggggttcacactctgcagagagggacggggaacgctgtctgtaaacagcacaggtccatgcccaccaccctgtcgtgcacgaatgaatggcatctctgatgtgatattttcagaaagaaaaagcgccatattgttatccttgagggaaagccctagtgagtgggctccggccccaccctcttgcctgtgcagccgccctcaacgtgggcaaactgttctccccagactgctccctttgtaggcaggggaggttaaccctgcatagtacccacagggccctgcccatggagggacccataaacttaatgaaggaaccacttcttagagaaaatgaagggctgcaccgcttgttcagaatcagccaagtggcccccactccctgagctcagatcacatcaggctctgtattcaatgccaggaagaggtggtggggatcgcagggaggcacctgggcagtgaggccagctttggcagctggctccctggattcaaatgccagcagtcacttgtgtgagcttgggcagcatgggactcatggccatagctatttgacaggattgttacaaagattaactagactgtaggtgaagattctctccttccctcctggtgcttaaggccaaggagaagggagtgacctgatgggggtcctatgtggggtgcccctaggtgtgggggcaaggccaggtgggccgctcacctgttgctgcattagatgcagaggcagggccgtgcgatgggggaagatgggagacgacgggacctcttcctggctgctctgccggcgcaggcactcaaagttgaaggaggatctccggtgggctgggaaagcaaagggcatcacacagctgtgaagcaagttctctgccgggacaccgtctttcagagtcagggtggccccggatgctcagcaacgagcccaggaagaagcatgcggtttgtccaagagaaagattaggtagtgaggtctccaaactttagtaggagaggatgaaggcagaagccccagtgagggatgttttttaaagtacaaacttactactttttttttttttttgagatggagtctggctctgtcgcccaggctggagtgcagtggcgcaatctcagctcactgcaagctccacctcccgggttcacgccattctcctgcctcagcctcccgagtagctgggactacaggcgcccgccaccacgcccggctactattttgtattttcagtagagacagggtttcaccgtgttagccaggatggtctcgatctcctgacctcgtgatccacccgcctcagcctcccaaagagaacttactacttttaaacgttcgcctgttctcaggaggaggagtgaaggcagcccatagggcaactgatccgagtcagaagccctggccctgcatactgtggggagcgcacagcacttcagtgcaagaacacaagtcctgccagaaccccacgacacttcccactgtcaccttccagataccctaagtgtccccagcagctgacatatcttgctggggctcctgtgtttacacctgttttaaagggagggactttacctgcactgatcagcttgaccaggtaataagcaaattatttttgttgggaaagattcagcttctctagcactgaatacaaacaaaggacacctctaattttaagaaaatgcttgtcctgctaacagctcttccaacagaggctcacacagaggttaacaagacaatccacagctcccagcttcacagggcaccaggcccgggagatcagtctgaattctggggccctaagacacagccagcagcctcctcccagaaacctcctaccccttgcaggggcctctgtcgagagcacacctatcgtttacaaggcatttctatggctcctatcttgaccgctgcttttctcggatcacagggcctcctttctcagccctggcaaaactccacatgcccctcattcc

SEQ ID NO: 467 - DNA, 2238 bp, Homo sapiens
ggctagtccctctgagacgagcgagcaggcagccattcactaacatgcgttcattccacaatcacaaagagtgtgtaggccagccccggtcacagagtgcaccgtatcctgtcacttctggatgtgagggagaagtgagtcatctcattcccctccgtggatcagaggacttggactagatagaagcatgtggtgtctcctacgaggcctgggccggcctggagccctggcacggggagccctggggcagcagcaatccctgggtgcccgggccctggccagcgcaggctctgagagccgggacgagtacagctatgtggtggtgggcgcgggctcggcgggctgcgtgctggctgggaggctcacggaggaccccgccgagcgcgtgctgctgctggaggccgggcccaaggacgtgcgcgcggggagcaagcggctctcgtggaagatccacatgcccgcggccctggtggccaacctgtgcgacgacaggtacaactggtgctaccacacagaggtgcagcggggcctggacggccgcgtgctgtactggccacgcggccgcgtctggggtggctcctcatccctcaatgccatggtctacgtccgtgggcacgccgaggactacgagcgctggcagcgccagggcgcccgcggctgggactacgcgcactgcctgccctacttccgcaaggcgcagggccacgagctgggcgccagccggtaccggggcgccgatggcccgctgcgggtgtcccggggcaagaccaaccacccgctgcactgcgcattcctggaggccacgcagcaggccggctacccgctcaccgaggacatgaatggcttccagcaggagggcttcggctggatggacatgaccatccatgaaggcaaacggtggagcgcagcctgtgcctacctgcacccagcactgagccgcaccaacctcaaggccgaggccgagacgcttgtgagcagggtgctatttgagggcacccgtgcagtgggcgtggagtatgtcaagaatggccagagccacagggcttatgccagcaaggaggtgattctgagtggaggtgccatcaactctccacagctgctcatgctctctggcatcgggaatgctgatgacctcaagaaactgggcatccctgtggtgtgccacctacctggggttggccagaacctgcaagaccacctggagatctacattcagcaggcatgcacccgccctatcaccctccattcagcacagaagcccctgcggaaggtctgcattggtctggagtggctctggaaattcacaggggagggagccactgcccatctggaaacaggtgggttcatccgcagccagcctggggtcccccacccggacatccagttccatttcctgccatcccaagtgattgaccacgggcgggtccccacccagcaggaggcttaccaggtacatgtggggcccatgcggggcacgagtgtgggctggctcaaactgagaagtgccaatccccaagaccaccctgtgatccagcccaactacttgtcaacagaaactgatattgaggatttccgtctgtgtgtgaagctcaccagagaaatttttgcacaggaagccctggctccgttccgagggaaagagctccagccaggaagccacattcagtcagataaagagatagatgcctttgtgcgggcaaaagccgacagcgcctaccacccctcgtgcacctgtaagatgggccagccctccgatcccactgccgtggtggatccgcagacaagggtcctcggggtggaaaacctcagggtcgtcgatgcctccatcatgcctagcatggtcagcggcaacctgaacgcccccacaatcatgatcgcagagaaggcagctgacattatcaaggggcagcctgcactctgggacaaagatgtccctgtctacaagcccaggacgctggccacccagcgctaagacagttgctgctggaggatgaccagggaagccccctgataagccaagagggccagcacagcccttgctcccaggctcctgcctgaaactatctagcacactaggacccaggtggtaccctactcagtggctgagaattggataaagtcttgggaaatgagacaagtactgggcagtgaatccagctccttttccccagcctttccctgtgggccatttggggaaggccagcattcagcctgagatgttcctccctgcctcctgga

SEQ ID NO: 468 - protein, 584 aa, Homo sapiens
MWCLLRGLGRPGARGALGQQQSLGARASAGSESRDEYSYVVVGAGSAGCVLAGRLTEDPAERVLLLEAGPKDVRAGSKRLSWKIHMPAALVANLCDDRYNWCYHTEVQRGLDGRVLYWPRGRVWGGSSSLNAMVYVRGHAEDYERWQRQGRWDYAHCLPYFRKAQGHELGASRYRGADGPLRVSRGKTNHPLHCAFLEATQQAGYPLTEDMNGFQQEGFGWMDMTIHEGKRWSAACAYLHPALSRTNLKAEAETLVSRVLFEGTRAVGVEYVKNGQSHRAYASKEVILSGGAINSPQLLMLSGIGNADDLKKLGIPVVCHLPGVGQNLQDHLEIYIQQACWITLHSAQKPLRKVCIGLEWLWKFTGEGATAHLETGGFIRSQPGVPHPDIQFHFLPSQVIDHGRVPTQQEAYQVHVGPMRGTSVGWLKLRSANPQDHPVIQPNYLSTETDIEDFRLCVKLTREIFAQEAPFRGKELQPGSHIQSDKEIDAFVRAKADSAYHPSCTCKMGQPSDPTAVVDPQTRVLGVENLRVVDASIMPSMVSGNLNAPTIMIAEKAADIIKGQPALWDKDVPVYKPRTLATQR

SEQ ID NO: 469 - DNA, 2252 bp, Homo sapiens
gggccgggccgcggccacccgctcctcccgctccggtcccgactgtcgggctctcggccgagtcgccccggacaatcacaaagagtgtgtaggccagccccggtcacagagtgcaccgtatcctgtcacttctggatgtgagggagaagtgagtcatctcattcccctccgtggatcagaggacttggactagatagaagcatgtggtgtctcctacgaggcctgggccggcctggagccctggcacggggagccctggggcagcagcaatccctgggtgcccgggccctggccagcgcaggctctgagagccgggacgagtacagctatgtggtggtgggcgcgggctcggcgggctgcgtgctggctgggaggctcacggaggaccccgccgagcgcgtgctgctgctggaggccgggcccaaggacgtgcgcgcggggagcaagcggctctcgtggaagatccacatgcccgcggccctggtggccaacctgtgcgacgacaggtacaactggtgctaccacacagaggtgcagcggggcctggacggccgcgtgctgtactggccacgcggccgcgtctggggtggctcctcatccctcaatgccatggtctacgtccgtgggcacgccgaggactacgagcgctggcagcgccagggcgcccgcggctgggactacgcgcactgcctgccctacttccgcaaggcgcagggccacgagctgggcgccagccggtaccggggcgccgatggcccgctgcgggtgtcccggggcaagaccaaccacccgctgcactgcgcattcctggaggccacgcagcaggccggctacccgctcaccgaggacatgaatggcttccagcaggagggcttcggctggatggacatgaccatccatgaaggcaaacggtggagcgcagcctgtgcctacctgcacccagcactgagccgcaccaacctcaaggccgaggccgagacgcttgtgagcagggtgctatttgagggcacccgtgcagtgggcgtggagtatgtcaagaatggccagagccacagggcttatgccagcaaggaggtgattctgagtggaggtgccatcaactctccacagctgctcatgctctctggcatcgggaatgctgatgacctcaagaaactgggcatccctgtggtgtgccacctacctggggttggccagaacctgcaagaccacctggagatctacattcagcaggcatgcacccgccctatcaccctccattcagcacagaagcccctgcggaaggtctgcattggtctggagtggctctggaaattcacaggggagggagccactgcccatctggaaacaggtgggttcatccgcagccagcctggggtcccccacccggacatccagttccatttcctgccatcccaagtgattgaccacgggcgggtccccacccagcaggaggcttaccaggtacatgtggggcccatgcggggcacgagtgtgggctggctcaaactgagaagtgccaatccccaagaccaccctgtgatccagcccaactacttgtcaacagaaactgatattgaggatttccgtctgtgtgtgaagctcaccagagaaatttttgcacaggaagccctggctccgttccgagggaaagagctccagccaggaagccacattcagtcagataaagagatagatgcctttgtgcgggcaaaagccgacagcgcctaccacccctcgtgcacctgtaagatgggccagccctccgatcccactgccgtggtggatccgcagacaagggtcctcggggtggaaaacctcagggtcgtcgatgcctccatcatgcctagcatggtcagcggcaacctgaacgcccccacaatcatgatcgcagagaaggcagctgacattatcaaggggcagcctgcactctgggacaaagatgtccctgtctacaagcccaggacgctggccacccagcgctaagacagttgctgctggaggatgaccagggaagccccctgataagccaagagggccagcacagcccttgctcccaggctcctgcctgaaactatctagcacactaggacccaggtggtaccctactcagtggctgagaattggataaagtcttgggaaatgagacaagtactgggcagtgaatccagctccttttccccagcctttccctgtgggccatttggggaaggccagcattcagcctgagatgttcctccctgcctcctgga

SEQ ID NO: 470 - protein, 584 aa, Homo sapiens; identical to SEQ ID NO: 468

SEQ ID NO: 471 - DNA, 21586 bp, Mus musculus
  misc_feature (1)...(21586): n = A,T,C or G
atatcagtcattcataccaaggtccggggaccaagaactggcagcctgttccgtaaagaccttttcattgttgtgtgaagacaattaaaacatcatccttagatcactaacatgtttaattagcattctgattacctttaatacgacaagcactgtgctacaatgtgtatatattggaaagtctacccctcacacccacacaccttgcttcaaataatattgattgattatgtggcaagcactgtgtaataaatttatgctgatctgagctggaagtgagaaagaaccagtggacacttgagagggagaatggatacttctcaaattggttccaaggtgaatttttttaactaagcagagaaagcccttagtctcgcaactgtcaggtattcaaggaaagcccactattctcaccaaaataagcaaggacaccaacagaaagaatcatctcatctttggcaccaaaagatcaggacctccatgtggcattttacttgtagatagtattaggacaaatctcttagcaaacctgggaagataaaaggcaaatctagggggctgacgagacggctcagtggttaagagcactgactgctattcccaaggtcctgagttcaaatcccagcaaccacatggtggctcgcaaccacccgtaatgagatctgacaccctcttctggtgtgtctgaagacaactacagtgtacttacatgtaataaataaataaattttaaaactttaaaaagaaaagaaaaagtggggagtggtggcgcatgcctttaaaaaaaaaaaagacaaatctaatatatatacacaatgcaggtcaccagataactgtgctggcctgggaagtatttgaaggtcacagagatgcatcaccagaaaaactaggcaaactaacacattccacaaatcacagttcagaaggagttccctaactttcgtacaagccatgtaggaaaagctatggcaagcagctgaggttttttgcagatggcccatcatttgcatggctgccatgggtgtgcgtgagaccaggaccccggagacttcatcccaggattgcctctgtatgcctttcctaccactgttatatagcctaataattcctgggcattagcccaccctactgggcagatttcctgaagatcaatatgaagatgtactttcagataataataatgtttagatgaattaatgactttatagaattagtgatttgattcaagaaaatatagaaagaaaggtttaggagatggttttagttgttttgctagaaaaatataataaaatcagaatcaagaatagaatgtgccccctcctcatagaatagtgagtaaaggctgcataatagagagtacaaagagctttcataaattacactgagaggagaaattggcttggaacaattaatgatcaaagaaaaacattcattcaaggtcagatccaaggatgaagctgatggtatgcaccacgtagcgatgtgaaactttttctttgaacttataatgagcttatagaatgaaactgctttgaacttaccatgacattttccataaatcccttttctgtgaggtaatttcataaagaacttctgtctaagaaagtataaaaggctgagacaaaatataaattgtggctgttggggcactgctacatttatcaaatgtatgtgtgtcatgtgccatatgtatatatgtatgtgtgtgtgtatttatgtaaacatatacatatgtaggtatatgtgtatgtatataagcatgcatgtgcaattgtgaaattgatgaaccaggtgtgtactggctagttttatgtcaacttgacacagctggagttatcacagagaaaggagcttcagttgaggaaatgcctccatgagatccaactgtaaggcattttctcaattagtgatcaagggggaaaggccccttgtaggtgggatcatctctgggctggtagtcttggttctataagagagcaggctgagcaagctaggggaggcaagccagtaaagaacatccctccatggcctctgcatcagctcctgctccctgacctgcttgagttccagtcctgacttcctttggtgatgaacagcagcatggaagtgtaagccaaataaaccctttcctccccaacttgcttcttggtcatgatgtttgtgcaggaatagaaaccctgactaagacaaggtggttaggtccagccaagtgtgtgtgtgtgcgcgtgcacccacatgactttctatccttttctatttcaccagcctcaggttttgcccttcctttgtgttgtcaggtcagggtcttaggcagaaccctactgctgagggacaacaccatcactgagaagaagagctttagaagaagaaaaccttggagctgagagtgtagctcagcaaaggaggctcagataaggttacatcagaaagcagacagacactcaaacaagacaaaaacaaaccaaaacaaaaacaaaagccgggcgtggtgatgcacgcctttaatcccagcactcaggaggcagaggcaggtggatttctgagttcgaggccagcctggtctacaaagtgagttccaggacagccagggctatacagagaaaccctgtctcgaaaaacaaaaaaaacaaaaaacatttagagtaaccttaagagattgtctgccttcagtgtgtgtaggaagacagcatagtgtggatgattagctgaatggtagcacactgacttgcagaagacaagatgaagtcacagagaggacattgacttgctcatgtcactacaagacctctgacaaaggccgtgtgagccagtttgctctgtgagggaaataatgagcgccctgctgagctgtgctttcccagtcctctgtgagattagaaataaatccaggatgaagaaagagacagagagtgaggaagggcatgtgggtgggagtgggtgtaagagacactaactattagtgtattttaacaaacactgttaaacttaccttaatgacaaaggaattcatttttaattttccccagctttaaagactttaatgtatataccctcccccactttcgtttacctaaagggccagctgcagtctcagaatttaaactactgaaaaagctggctccttcccccctttccttcattttctttgtgcagatgaggcttttagaactagttaatgtgagaatgaactgcagctgcctggtgtgctcgctcctcagagctcactctcttgattaggagaaaagttttcccttgtccagaaatttcagttagagtgggggtctcttttattgtgacatcaaacttattggtttgtagcagggtggagggaacagagagatttggagactcttcttagacagaagcagtaagccacagagcagctaaggactggcttttctggaaaagtgagagtcatcttcaagggacagaaacaaggaaaggtatcaggactctaaagcccaaagcaggtctgggcacagatggccaagactgaagttattggttaatagaaggatccatgttctccaaaggagccaggctgagctctctgtgcttctgcattgagcccctcaggtggctgcagcctcaagtgacttccattccatttgcaagaagctcttctgtgctgccatggtgctaatggtgaactgaaggaatgcagaagatggagggtgtgtggtgactaggggttgcccactgtcctccagatcaggcttcctggatggaactgtcctgccaagcctcctggaaggaaagaggtgtgcttgaagaagttgtcttcctagggcttccttccttcctgtttttttcctttcctttttccttccttccttttctttcttccttctttgctttctttctcactacctttttatttcttctctctctctcctctctctctctctcttctctcgctctctctctctctgtatgtatgtatgtgtacatgttttctatggaagtgtgagaagcatttctgcacctctaaaaactccttggggagacttgatgagtctgagtgaggcagagggataaaggcaactgcatgctgtgggcaggtgagaagccaggagatggatctcagtgggtctgaaaggagcaaacaacctacttcaaagtcatggcggccatcattcctcttgatcacgcccatcgagtaaggctccccacctctcctttcgcccctctccacccctacatcaactctgagaagagatctttccaacatccaagccctgggttgagatcaagcaggcacacagtccccttttccagatggtcgacctgacttgcctgtgagttcagcaggtgcagtcacagccctatctccagaacacacagaccttatctcctaccccacctcagactactgacactatcagttttcttccatttcaaggaaagaggctcattcaccagatgccctttcccactttatcagttctaagtcttcctaaatggatcagacgttgaccagccttttagaagaaagacatgtggcactcgccccctttctctctgtgtgtatggtattagtgttgttgtcattacagcagaccaaattctcttccaacctggttgttcccaggtctctttcagtcactttagggaaattttacctatctctggcagcatttccctccagagcaggcaccagtatccccaacccaaagctgaggggccactcacttgtccaccccagctcattctctgcagctcacctcccagggtttctttctttttttaaatatttttattaggtattttcctcatttacatttccaatgctatcccaaaagtcccccataccatcccccccactcccctacccacccactcccactttttggccctggcattcccctgaactggggcatataaagtttgcaagtccaatgggcctctctttccagtgatggacgactagggcatcttttgatacagatgcacctagagacacgagctccagggtactggttagttcatattgttgttccacctatagggttgcagaccccttcagctccttgggtgctttctctagctcctccattgggggccctgtgatccatccaatagctgactgtgagcatccacttctgtgtttgctaggcccggcatagtctcacaagagacagctatatctgggtcctttcagcaaaatcttgctagtgtatgcaatggtgtcagcttttggaagctgattatgggatggatccctggatatggcagtctctagatggtccatcctttcgtcacagctctaaactttgtctctataactccttccatgggtgttttgttcccaattctaagaaggggcaaagtgtccacactttggtcttcgttcttcttgagtttcatgagtttagcaaactgtatcttatatcttgggtatcctaagtttctgggctaatatccacttatcagtgagtacatattgtgtgagttcttttgtgattgggttacctcactcaggatgatgccctccaggaccatccatttgcctaggaatttcataaagtcattctttttaatagctgagtagtactccattgtgtaaatacctcccagggtttctgtgtgaaaggaccccttgttatgagaaagcaggaggagggagaaaactggcagttggaacggctcttaaaaagcaggagagccagtgaagcaggggaatgtttagagcaaattgtgctgaggagaatttcatggaaaaagaaacatacccatacacttaaaataaaatttagtgaaaagaccagaaaatgtggacagaaaacacttagaaggagaagcactcacactgggcactgtacacttaccacatatcaagtgtctgtatgtgaccaagatgaatgttaatgacaaaggaaaaaggaaatttagtccagtgaagggatgtcatgactgccaaaaacaaacaaacaaacaaaaaacttcaacatgaaaaagacaaacaaacattgacttttaaatttgggcaacaaaacctcttcccacacaagggtcagacaggcttggcagcagaagcagaagccagccttgggcacacacagctactcagctttgggcacacacagcttgtcacaacactgggcacctctttcctcagaactgaagaaaactgatagtgtcagtagtatgaagtggggtaggagataaggcttgtgttctggagacaggactgttgactgcacctgctgaactcacaggaaagtcaggtcggccatctggaaaaggggactgtgtgcctgcttgatctcaacccagagcttggatgtttgaaccatctcttctcagagttgatgtaggggtggagaggggcgaaaggagaggtggggagtcttactcgatgggtgtgatcaagaggaatgatggccgccatactttaaaataggttgtttgcttctttcaggcccaatgaggtccatctcctggcttctcacctgcccacaagcatgcagtccccttcatccccctgcctcacacagactcatcaagtctccccaggaagtttttagaggtgcagaaatgcttctcacacttccacagaaattggcccatctctattcttcttagtgactcaaagtcttcaatagtaggtaaaacatgccattctacccttggaagcaagaatcagaacgaatattcaagttggctgggctacaaaccatctggacttttaaaaaggaagagtaagagagaaggagagagagaaagggggaagggaagataagaagagcaagactatttgcacaacgtgcagaagaaaggagaaaagagtaaagttcagagaggagaaaccgagccctcaggagaaagcccagcctgtggagggtgatgatgaccatcttctctaggacaacggaactcctcagcctctctccctatctctatccaatcaacaagcatctccccctctcccctccagtcctccattccccaccatccaatgaggggacaggtctgagtactggcctgtgagtccctaatttgaaaaatctattctacaaccattaaatcgttttaatgcttatttcattttaatctcatgatttcttggcttacatagacgtaagtgagtaaactactggaacatgaaagctaaccttgtgccacattaggtctttgtcacccgtactgccacagcatcctcgttcatcctagggatgctgattttatttgggcaccacatgataagcaatcttaaatttcttccttgaagagctttttcttctgctcctgcgaaagtagttggtagggctcttgcttgcctcacatgcacgaagccctggcttacaccccaagcacctcataaaacgaggtgtggtgtgcatggttgttatcttcaagctcagaggtgggggcaggatgagcaaagatcagagtagttacagaaagcaggcttctgccgagaacaaccttcagccccaaagtgaggcagggtatgggtttcaaagtcctaaatgctgtcattgtttcacatcaggtacaggctaagggagtcatctcacactcccagtgtcctccttgtttacaagggatcacttcccagctgcgaaagaggaaccctttgatctgtcaactttataagcaccataagaaactctttgtttataggtcaggatggggctccctaggagaggtgtacagtcagggtaatctggcctcccctaagctatttcattgtgtattttctccagaaaatgtttgtggttttggtttatctttagctctgtcttactaccttgaatactccagaccaggcacagaagatggtggaaagtggccagcagtggtagagctcactctggaggtctcctctctgggcaggtatcttctctgtcttctccaaacctcctataactattctgaaagatactcttaaaaaaaagacagctgtaccccactcctcggctaccagactactgagacattgggtccggtcttagagttactattactgcgaccaaacaccatgaccaaaaaataaggtggggaggaaagggcttctttggcttatacttccatatcactgttcatcgttgaaggaactctggacaggaactcaacagggtgaaaacctggaggcaggagctgatgcagagggcgtggggccaggggtgggggtgctttttactgacttgctccccatggattgctctaccggctttcttgtagaacccaggatccccatctcagggatggctttatccacaatgagctggtcccttccctcttgatcataaagaaagtacccttcagttggatatgatggaggcattttctcaattgagtttccctcctcagatagctggagcttgtgtcaagttgacataaaactatgcagtacagacctcagtggatgacagttcccgaggcatcccacagctgccgccaacatgctagacttcaaggaagctaagatgcctttggatgaggccctcacttcacacagagactagtaccacactggcagtcctcatagtcacaggaccctctgagctctcctgcatctgctctctctcatcctgcctggtgatgaggtgacagtcacaggataagatcaacagccccccttattaaagcagctagttgaaccgttctggtctggcttgtttgcaaaggccctggccaaggtcaacatgaagtttcatctgcaatgtagggactggtaggctgttcctgccccctccaccactgctgccacttcagagaagaaagtggaagcaaagaaggaagaaactgggagtcggatgatggatgatgacatgggctttcgtcctcttggataagcctcttttgttaacatgcttaactaaaggctgaacctgttgaaaagaaacaaccgcgaacaacaagaagaatttccccaggagtctcatgctagggaaagaaagactgtgaggggccttgtgctagtcagagagggaattgtgtcttagaaagagctttcataccagtctgacaacttgtctgaccaccttgtaggacagactggagtcaagccagggatgagtcagtgatgggtggggccaaactttgatcctgattgattatttatataataaatgccttttgtcatccacttaagcctaaagctcatgtcaggacccttcacaggacttttggacacctgcctctgccccccaagtgttgggattaaaggcatgagacaccactgcccagcttttttttttttaatttttttctttttcagatttatttatttattttatgtatatgagtacactgtcactgtccttagacacacaccagaagccaccatgaggttgctgggaattgaactcgggacctctggaagagtagtctgtgctcttaactactgagccatctctccagccccttcactggactctctttactccctttcccaattagccacattgaatgcactgtatttttccacttttttgatattatttgtcgataattggtctattgaggatgagtggctgagtttggcttggcaagtctgccacaacccagactttcaccctaccaactccactagtagggaacccttcaagctgcagacaggacggcctcttattttctccccaagagaagcacggctgggagatctggaattctgactaccatcaatttgattcaaatagagaaggagggcttccctcttccatgattcccaggatctctgtgtgtcctttgttaacctccaggttgtatatgatgcaaacagcatgctcataaattacaaggctttgtgaaagactgtgaagtgtatgtgccattgtccctgtggctagctctgctgccccttgggaatcagcacaggaggcacaaaaggtgttttctctttcctggcagccttctggggatttcctttccaaggtttcaatgcccttgtttttattattcagataagattgacccagatttactccgcccattttttcttagaagccaaccccttggaatccttttaaactccacatcacagagactgtgtgactgaagaaactgacttccaattcgtcttggagttcaaactaaaattttaggtaagtggcctcagtaactatttctgcttgagagttagaactgagagagtccaggccaggcactcttgactgacaccaactccagaaaagctgagcccagcaaacagctggaggcaggggtggaggcatggcacagtcagatataaagaacgagtgggtcggggaggatggagctcccaagctggggaagggagcacgtgtctttagactaaaacccaaaccctgtatactgccagagtcaggcactagaccaagttcccctatgtcataagataatgagactacagccacagtcctggatgtcagtaaagacccagaaatacaacttagcttaaggcgtcttccaaatgaccttctgacgaggtatttggacactatttacaaatgtgctctagttttcaaatgtattttatatgaggaaaaaaaaacccaaccgtattgagcattttgccaagagtttaggagacacagcccaccacctagagaaaagaatggcttctcttcagtaggtaatgaagaaaaactgtctcacttgcaggatctctcagcagagggaaatctttctggctcacctaaagaatgggacagtcttgagattggggcgtatgctggtggctgcagggactagggtagtggtggagggggtgctggggagtctggggagattgtgctggggaggctgggggtgttaatgtgtaaggaagctgaggtgggagagtcttctgtggagacagaggtgggtgctgcagctcttctgagcatttgtcctttttttctcttcctttcctttcaggcttttccgagcagccaagccaccatgggtctggagaagtccctcattctgtttccattgtttttcctgctgcttggatgggtccagccttccctgggcagggaatctgcagcacagaagtttcagcggcagcacatggatccagatggttcctccatcaacagccccacctactgcaaccaaatgatgaaacgccgggatatgacaaatgggtcatgcaagcccgtgaacaccttcgtgcatgagcccttggcagatgtccaggccgtctgctcccaggaaaatgtcacctgcaagaacaggaagagcaactgctacaagagcagctctgccctgcacatcactgactgccacctgaagggcaactccaagtatcccaactgtgactacaagaccactcaataccagaagcacatcattgtggcctgtgaagggaacccctacgtaccagtccactttgatgctactgtgtagggctccacataggccaaaccagtgagatgtctatgtctcccaacctcatcacctgtctcccctctgtctaccattctttctctgaaagaagtaagtcatgttaggacttccatatgacaaaacatgcgttcctgtcctgtgtcatgctcccagatccctctcttgctgtagacaaatgaagcaagatggccctcaccagaacatgtcccttcaaccttagactttcttgactttagaaaacaaccaaataaaattctgttcatcataaattgtgcatttagggcagttcgaagtggagtaaggacaatgggcaagtcacctcattcattggtccagaatttcctcactcctgactactttaactacactattgaaactagacttttctgcctctctgctgatcattcattcttcgcatatacaataaagtctaacatctatttcagcactcagtagccatagctcccaagtccatctgctcctcataccaatacagatcagtcacatctactgaagagagttcttccattaagagagtagaagatggttacctttgcctctgcctttcagctatcttcttccatccatgtttcactttgtactttctttctcattgtaagtgaaaagcagcatccagtcttgccttccaggggctgcttcctactctcctgcctccttaccttgactcagacctcatggaacaaataggaatgtggagggtagggggtggggaggcttcagttttaacaaccacagtggaaatccaatttcgatgatgcttttgggaaacagtcacatgcacagccttgcctacggatgatccaggattcaaggcgcggttctccatggaaggtgtagagtggaggtatgtttctataagaaccagccaccagcactcctggaacaaactgtagagttcctctgcagattagtcaatagttttaggtatattggggttttcctttaacaatttgagtagcacagagtgtcctgaagcttagtatgtaaccagtgttggccttgaactcttgcttctgcttccccaacctctcaagtactgggctcttaggtgtgtgccactgtgccccagctatttttggtgggaaagaacttcttccaagtaggtaggtcagtgtctaaatgcactgactgctttctcagaggccccagatttgttgtcagtacccacatgacagctcacagtcacctgtaactccatttccaaaggttctgaggcttttctggcctctgggcatttgcacatatgtggtgcacataaactcatgcaggcgtgtaagtacagataacagagacaggctttatctcgcagaacagttttaggttcacatgctatttctagccatggctgtcttcataactaaacagaagctcaggactccagctgtttcctgagcatcgttaacctgagtgcccatgttttctgtaatataggaccagtcttggcatcaaagggtgtttaattgtgcctgtttctctctactgcttgtgacattctgctatgtctaggaaagtgtttctgtctccaagacttctgaagaactaaaagataacctgtgtgtaggcttaggtttttttcaaaaccactttaataagggttcataaaagctttatcttctcttctagcccaccacccatcagaggtagtggaaaggaaaggttaataaggcaaagggggatgtggacctgtctaaaaatagttctttggggaatttcaatcttcactgtcaggatatcagcagttcattttgcatgaatcactatcagtagtttggtctattggcaaacaccatttatggatcagtaatagcagtttgacacagaagaaactttgaggctctgccaattttggcctgagtctgcagaagtggcaagaagccacagaagaccagcaaagagtggtaaagtgagccaatgccacactgccttccattgtttgttgggttatatttatactcgtgccaaacatcacgagtcctctcaggcatctgttccagtgaaacatcacatgccccctttccaggcagctcccagaaaaacaccacatgtctgttttcagcaaaacaccctgcctgccttagtaaaacattctctcatatgacagtttccagaaaaacatcacatgacacaactgtgtctccaaagaaaccagaaatgtccacttcacctgtgatcttcccagaggtttaatactgtgttgctaaactctctttaacaccagaaactgagttcaacagactgtatgtggtaactattccttcacgtcccaacatcagatgggtaaacagaagatgagtccagtgaatccttaaactgtctcatggcaaaagaccggatagaaaaaaaataatgtttcacctaaaaggctcattttattttctctaattttttaattgaaaaatgagggggttttccctaaaatatactctaatcatgttttcttttgtcttcatataatctctaggagaaaaaaaaaaccctcatattatctcagtaggaaagatcactgttgtcaaaatagtaacaataataacaataataataaaccaagaaatcaaacaaggcagtgacagacgatatttattatcagcttggcaagatgtagaatcaactgagaagcctctgggtgtgtttctagactgggttaagtgagatagaagagtcccactgaatgtgagtaaccctacaggctaaacagagaggagccaaccaatggagtgccagcattcttcactctgctttctgactgcagactccacgttacctcaggaacttgctgtcatgttttccttgcaccatagactatgcccttcttaaacctttcctccatacattgtttcttattaggtacttggtcacggccacgagaaaagcaactaacacagtaggcatactataatgctccgaattaacctgtaggttccacctgcccaggaaacaggtaacttcctggaatgctggaagttgtagttcttggaagataacaaaattgagggggcagtggaccctgtcaggaatcttggtaaggtttagcgggttggaagcctcagaaccttataccagagaacggtaggagcttcacctgcctctgaccaggcccctgtcacttgatcacactgcctacatagataggaacgtgacctatggtcacatagatcagaaaagagttctctactctaatgatgtggatgggccctgagggtttagccaataagtgtcccttctcagacattccttcctgcaaaaggtatttaatctctggtccaccctgagaaaacagtttggaaccaaagactgtctcgtttatgaagagccactgtggggagcatggagaaagcctataggtttgtccttatgcaacaatggtttgggatccagcttggatattccaggcaatgtgtactggctagttttgtgtcaacttgacacagatggagttatcacagagaaaggagctttagttgaggaaatgcctccatgagatccaactgtaaggcattctttagtgatcaagggggaaagaccccttgtgggtgggaccatctctgggctggtagtcttgggttctataagagagcaggctgagcaagccaggggaagcaagccagtaaagaacatccatccctccatggcctctgcatcagctcctgcctcctgacctgtgtgagttccagtcctgacttccttggtgatgaacagcagtatggaagtgtaagccaaataaaccctttccttcccaacttgtttcttgatcatgatgtttctgcaggaatagaaaccctgactaagacacaatggttctaaccaaagtctatctcttggttagaatttaatatttaataaagcttacttgaaatttggcccaaaattgtagagttggtttttctggaaaatgtcaaaatgaacaatacctgttgatcaaacttataattgcagcacaagcatgttaagtgctcttgactaatcctagttgtgttcttcccagagctaggaaaaaagaaagaaagtgggcaagtgagtgaggcacctgaaatctcagcactcgaagtggagtcaagggctagaaattcaagatcagttcaactcatagtgcattctgggtcaccctgaggtcctgtcttaagagaagggggcatgggaaggagataaaatttaacctagaacaaactgaaaaagttaataaaattagcatataaatcaatgaaataagataaaataatattttaaaattttgttttatatgcatgggtggtttgcctgtacaaaggtctatgcaccatggacatgtctagtactcttggaggccagaaaaggttggcaaatcccttatagctagagtttcgggtgcttatgaatgctgagaattaaacctaggccttcttgaggagcagtcagggctcttaatcactgagccatctctctagccccaaacaataaattttacaaaactaatggctgagggctagaaaggagtctcagttgggggcaaatttgctgcccccccccacacacacacataccagacccattgtttttagcacaagacaccctacttcctaaatgcaccttggaaagaaatagttagacctcggagcctagaagtttttactttaggattatctgtattagatctactaggaggttcctttattcatgatcatttacaatttgccagtagcagcccatattagatatgttctccctgccctgcagtatttattgcttgatgctattcagggtcatgggcagatgattcagacagacagatttctcgtaccaaaggttatagggaccagtctatgtttagacaacaagaagttcatgtagatatctggaatgagtcagctaaaacaaagcagacaatggccatctggggaacaacaaagcaatacaaaacaaggttcctgggaatctcaaagtaaacaatgatgcaatctgtaatgtaactatttttggcagtgtgccacctttgtgtggcttctttgtgttgctgtgagaaaacactgtttccaaaagcaagtagggaagtagagggcttatttcatcttataccacatagtcatatagcacatattcctgccgggatgtgatgtccctgacgacatctgggcaggagctcacagcaggaacctggaggtagaaactgttacagctcttagaaaggttgtgttgcttgctggttttctcttcatagactcttatagcagccaggatatcagtgggtggcgcggcccacagttagccaggcccttccatatcagttaccaattaagaaaatgcttcaaggcctcaggatccacggaagccatcttggttccgggactccacagaaagtagtctgcacaggtgagagtgtggactacagaagctaacagcttctgtgacaggcaggagacacagagcttctgaggcagcacccttttccagctccagacatccggccatcttcccgcccagaggacagctgtctgcctggcctgggaagcttttgcctcaggaatccttgggagccatcttggttccaggacttcgcccaaagtagtctccacaggcagagagtgtgaactacagaagctaacagcttctgtgacaggccaaaccaacacagcttctgtgacaggccaaaccaaccacagcttctgagaaaggtcctgttttgggacttcatctgcggccaggaggaggttcaaacgccagatatcagtgcaccttccctgtaagaggagagcttgcctgcacagactgctctgaccactgaaactcagaggagagagctagtctcccaggtctgctgatagagggtaacagaatcaccagaggaacaatctctaaacagagacaactataacaactaactccagagattaccagagggagaaaggtaaacggaagaatcttactaacagaaaacaagaccattcaccatcatcagaacccagcacgcccacttcacccagtccagggcaccccaacacaccagaaaagctagacctggatttaaaagcatatctcatgatgacgatagaggacatcaagaaggactttaataactcacttaaaaaaatacaggagaaaactgctaaacaggtagaagacattgaagaggaagcacaaaaatcacttaaagaattacaggaaaacacaaccaaacgggtgatggaattgaataaaaccatcaaagacctaaaaagggaagtagacacaataaagaaaacccaaagtgaggcaacactggagatagaaaccataggaaagaaatctggaaccatagatgcgagcatcagcaacagaatacaggagatggaagagagaatctaaggtgcagaagattccattgagaacatcagcacaacaatcaaagaaaatgcaaaaagatcctaactcaaaacatccaggaaatccaggacacaatgagaagaccaaacctacggataataggagtagatgagaatgaagattttcaactcaaaggaccagccattatcttcaacaaaattatagaagaaaactacctaaatctaaagaaagagatgcccatgaacatacaaaaagcctacagaactccaaatagacatgaccaaaaaagaaattcctcccgacacataataatcagaacaacaaatgcactaaataaagagagaatactaaaagcagtaagggaaaaagatcaagtaacatataaacatgagcctattagaattacaccagatttttcatcagagactatgaaagccagaagagcctggacagatgttatacagacactaagagaacacaaattccagcccaggctactgtactcagccaaactctcaattaccatagatggagaaaccaaagtattacataacaaaaccaaattcacacaatatctttccacgaatccaacccttcaaaggataataacagaaaaaaaaccaatgcaaggatggaaaccacaccctagaaaaagcaagaaggtaatccctcaacaaacctaaaagaagacagccacaannnnnnnnnnnnnnnnnnnnaatgccaactttaacaacaaaaataacagggaagcaacaatttcttttccttcatatctcttaatatcaatggactcaattctccaataaaaagacatagactaacagactggctacacaaacaggacccaacattttgctgcttactggaaactcatctcagagaaaaagatagacactacctcagaatggaaggctggaaaacaattttccaagcaaatggtatgaagaaacaagctggtttcatcccagggatgcagggatggttcaatatacggaaatccatcaacgtaatccagtatataaacaaacttacagaacacaatgaaagcatttctaagaggaaaactcatagctctgagtgcctccaaaaagaaactagagagagcatacattagcagcttgacaacacacctaaaagctctagaacaaaaggaagcaaattcacccaagaggagtagacagcaggaaataatcaaactcaggggcgaaatcaaccaagtggaaacaagaagaactattcagagaatcaaccaatcgaagagctggttctttgagaaaatcaacaagatagacaaacccttagccagactcactacagggcacagggaaaccattctaattaacaaaatcagaaatgaaaagggagacataacaacagatcccgaagaaatccaaaacaccatcagatccttctacaaaaggctatactcaacaaaactggagaacctggatgaaatggagaagtttctagacagataccaggtaccaaagttgaatcaagatcaggttaatgatctaaacagcctgatatcccccaaagaaatagaagcagtcattaatagtctcccaaccaaaaaaagcacagaactagatgggtttactgcagagttctatcagaccttcaaagaagatctaatcccagttcttcacaaactgttccacaaaatagaaacagaaggtactctacccaactcattctatgaagccacaattatctgatacctaaaccacaaaaagaccccacaaagatagagaatttcagaccaatatcccttatgaatattgatgcaaaaatcctcaataaagttcttgctaaccgaatccaagaacacatcaaaacaatcatccatcctgaccaagtaggtttcatcctagggatgcagagatggttcaatatacggaaatccatcaacgtaattcagtatataaacaaactcaaagacaaaaaccacatgatcatctcgttagatgctgagaaagcatttgacaaaatccaacacccattcatgataaaagtcttggaaagatcaggaattcaaggcccatacctaaacatgataaaagcagtctacagcaaaccagtagccagcatcaaagtaaatggtgagaagctggaagcaatcccactaaaatcagggactagacaaggctgtccactctctccctacctattcaacattgtacttgaaatcctagccagagcaattagacaacaaaaggagatcaaggggatacaaattggaaaggaagaagccaaattatcattttttgcagatgataggatagtatatataagtgaccctaaaaattccaccagagaactcctaaacctgataaacagcttcaatgaagtagatggataaaaaattaactcaaacaagtcaatggcctttctctacacaaaggacaaacaggctgagaaaaaaattagggaaacaacacccttctcaatagccacaaataatataaaatacctaggcgtgactctaacaaaggaagtgaaagatctgtatgacaagaacttcaagtctctgaagaaaaaaattaaagaagatctcagaaaatggaaagatctcccatgctcatggattggcaggatcaacattgtaaaaatggctatcttgccaaaagcaatctacagattcaatgcaatccccatcaaaattccaactcaattcttcaacgaattagaaagggcaattagcagattcatctggaataacaaaaaacctaggatagcaaaaactcttctcaaggataaaagaacctctggtggaatcaccatgcccaacctaaagatgtactacagagcaattgtgataaaaactgcatggtactggtatagcgacagacaagtagaccaatggaacagaattgaagacccagagatgaacccacacacctatggtcacttgatctttgacaagggagctaaaaccatccagtggataaaagacagcattttcaacaaatggtgctggcacaactggctgttatcatgtagaagattgcaaattgatccattactatctccttgtactaaggtcaaatctaaatggattaaggatctccacataaaaccagagacactgaaacttatagaggagaaagtagggaaaagcctagaagatatgggtacaggggaaaaattcctgaatagaagagcaatggcttgtgctgtaagatcgagaatcgataaatgggacctcataaaattgcaaagcttctgcaaggcaaaagacaccgtcaataagacaaaaagaccaccaacagattgggaaaggatctttacctatcccaaatcggacagggaactaatatccaatatatataaagaactcaagaaggtagacgccataaaatcaaataaccccattaaaaaatggggctcagaactgaacaaagatttctcaccggaggaataccgaatggcagggaaccccatgaaaaaatgttcaacatccttaatcatcagggaaatgcaaatcaaaacaaccctgagattccaccttacaccagtcagaatggctaagatgaaaaattcaggtgacagaagatgctggcgaggatgtggagaaagaggaacactcttccattgttggtgggattgcaagcttgtacaaccactctggaaatcagtctggcggttcctcagaaaattggacatagtactaccggcagatccagcaatacctcttctgggcatatatccagaagatggctcaaccggtaagaaggacacatgctccactatgttcatagcagcgttatttataatagccagaagctggaaagaacccagatgcccctcaacagaggaatggatacagaaaatgtggtacatttacacaatggagtactactcagctattaaaaagaatgaatttatgaaattcctaggcaaatggatggacctggagggcatcatcctgagtgaggtaacccaatca

SEQ ID NO: 472 - DNA, 793 bp, Mus musculus
gactgaagaaactgacttccaattcgtcttggagttcaaactaaaattttaggcttttccgagcagccaagccaccatgggtctggagaagtccctcattctgtttccattgtttttcctgctgcttggatgggtccagccttccctgggcagggaatctgcagcacagaagtttcagcggcagcacatggatccagatggttcctccatcaacagccccacctactgcaaccaaatgatgaaacgccgggatatgacaaatgggtcatgcaagcccgtgaacaccttcgtgcatgagcccttggcagatgtccaggccgtctgctcccaggaaaatgtcacctgcaagaacaggaagagcaactgctacaagagcagctctgccctgcacatcactgactgccacctgaagggcaactccaagtatcccaactgtgactacaagaccactcaataccagaagcacatcattgtggcctgtgaagggaacccctacgtaccagtccactttgatgctactgtgtagggctccacataggccaaaccagtgagatgtctatgtctcccaacctcatcacctgtctcccctctgtctaccattctttctctgaaagaagtaagtcatgttaggacttccatatgacaaaacatgcgttcctgtcctgtgtcatgctcccagatccctctcttgctgtagacaaatgaagcaagatggccctcaccagaacatgtcccttcaaccttagactttcttgactttagaaaacaaccaaataaaattctgttcatcata

SEQ ID NO: 473 - protein, 157 aa, Mus musculus
AFPSSQATMGLEKSLILFPLFFLLLGWVQPSLGRESAAQKFQRQHMDPDGSSINSPTYCNQMMKRRDMTNGSCKPVNTFVHEPLADVQAVCSQENVTCKNRKSNCYKSSSALHITDCHLKGNSKYPNCDYKTTQYQKHIIVACEGNPYVPVHFDATV

SEQ ID NO: 474 - DNA, 21850 bp, Homo sapiens
tgacgacctcagcaataagctcttagaggggctggggcaggtgggctgtcccttagggaagggatgagaggcactggtgcctgatctagaggtgaatggtggtgttgggttgagtcagggataggaaaagttctcagaaaatggatgaagtcaagagaccactgaacaacccaggctgaaagggaatcaggtcttctgtaatcaggaaccagagataacgaagtctctatctttctatagacaccctggcaacatttgatttccattttaaaagaccagggctggtctgtggggtgggaagggacctatggagagtgaggaaaactggtagtgtcaggaggctgggatggtggcaccagaggaggtggaggccccctgtgtgttctggagaccagattgttgactgcacctggtgtgctcacaggccagtcagagccactgtctgggaaagtagaacctgtgcttggtgggcctcagccaagggctcaggcatcagaacctctttctctcccagttcatactgtggggtgggggtggggtgggattgggggtgggagtggaagcctaatggacagagaggtggagagtcttataaaaggggaataaacacaggaatgatagccagcacagccacggttgccttttccccttcagtaattggtttgtcacatgaggcaaaacgttgcaatgtggacgggagacagaaattaggaaaaacttgcataatgtttcactggggagggggtttctcagttgaggcccataaatgcttagttttggattgggcttgaggggctatactgtctcctaagagactctttagcccataggatcataaaatctcccaagctcctgcagttcaaattgacctttgctccagtcaggaaaactgtgtagattgggacgggggcagatgtgtttcctgagagaacatgggaggggtgggccttcccacagcctgtctctgaggaggttccttggggccctgagcccttgggtgtggtgtagctctaaccgtctagggctgcctttggctttaggaggatttcagggattcatttccaggcactctgtgaaaagggcaaaaatgtacttcccttcatatcctcaccgaagcctggcagcaggccagtcactggtgcggtttcctgacatgactgtggtctggggagaccaccttgaactctgaagtttgtcctcccttcaaaaattcaaacttgggacctggatagcccagtcatgctcagtgacagagaagttggcattttgggaaaagtactaagaaatctgatgtcttcactgcagagtcactttctaaggaggagactcaggctcccaagaacatgaggtaggccagttgcactcataccttctggagcccaccagactccagctccttgtttctcaccttcctgcaattggatgtttccccctcacaccattccttcacactcaggcttatcacaagtttctgcaaagagattttggggagccagcagatgctctcccgaagaaaatgattcagctatatccaccctcactgagtgaagtccttttaaataggagctacatttttttttttttttttttgagacagtgtcgctctgtcacccaggctggagtgtagtggtgtgatttcggctcactgcaacttctgcctccccagttcaagcgattctcctgcctcagcctcctgagttgctgggattacaggcatgcaccactatgcctggctaatttttgtatttttggtagagacgggggtttcaccatgttggccaggctggtcttgaactcctgacctcatgatctgcccacctcagcctcccaaagtgctgggattacaggcgtgagccaccgtgcctggccctgactgggttctaaatgattctggattcttaagaataaaagacagacagacagacagtctctgtgtagatgtgtggaagaagccagacagggaaggagctcaggaaggagaggctgagaactgaagacgaagcacagcttttctgaagctgcattcctgcccctcacataccttcaaacgccctcagactcagacatacttcctcagacatggctgagaatgaactcttaaatgtatctgtcccaaattctttaatgtctgaggccactgagagacagaagagagaaagagtccccagacggagggaacttaagatggaggtctctgactctgccacttccactgtagcctcttgcccagttctgctccttgatccatcataggtcagcattagccagtaagtggcctaagcgcacacgattcagggaagaggactctgcaggccagaaatgagcttcctacaaaagaggaagagttggttgggtgtgatggctcacacctgtaatcccagcactttgggaggccaaggcgggcggatcgcttgaggtcgggagttcaagacgagctgggccaacatggcgaaaccccatctctactaaaaagaaaaccccacaaaaattagccaggcatggtggcaggtgcctgtaatctcagctactcaggaggctgaggcaggagaattgcttgaacccgggaggcagacgtttcagtgagctgagatgggcaacagctgtctcaaaaataaaaaataaaaaaataaaaaataaagggaatgagttgagggatgtcatcttggctgttatcctactttatcttcatgggcatctgggttgtaggcaatgggtgagaggcgtgggacagcacgggcttcggatctcttttagctggttcttgcattctttcccctcacttccttcaactttcaaacaccactccgctccctttgtctgcccccactgttccgtcttttcctgttctaattttcctttgccttctcactttctggggttcaaaaggaatcccggaatatcatctattgtatgtgtgtgtgcatattgtatgtacgtgcatgcagggtgtgtgtgtgctcgtacatgtgtatttggggggctgtgctgagcttttgtagccagcctaatgataggacatccttcagattatctgagcttttcttgtaaaaacgtccttaccctgtacatacccacttccttattcttctaaagagcttgtggaaatgagcacagccacccaaatgagaataagcaaaggctgtttattcagagttggccacagatggcaggtaaccaccatcacttgcatttggcagacactcacagtaggcaggagagtgggaatcttcacaatggaaaacaggaaaggcttcagggatgctctggttgcaggctgcggcatgcagaagctgtaagtgggctactggaagcagggcatcctatgtgttggattagggatgcatattggctttctctgattggtcctaatttggggaagcggaaataaatattagggaacttttcagttattaatcaagtccataaagagagactttcaagcaaggaaaaaattaagaaataaaataggggtaatcaagtcctagctgtttggggccaattgctataggagttgtttggcttcctggattgtttgctgtatatagtgggttggcttctcatacttattgctggagactacaggtcagagttccatctttatatatggtctggtcattgttcatttgtatggtcagtctttcagtccctccttttggtcattctctgacttctgagaagttgaccaactcagagaaagttagaatttcacatcttcaccaatcataaattgttcagtcatcttcatagtgacctggattgtaagatcttcttgatctttctattgtatcattatggcaatcatctgatgacagagtggctgctagaagcatttaaaactctggataaaacggaacagactagcatcatgaccactatcagaaaaataagaaacaattgatagtccctctgagatgctttagaaccaggaactccaattgcttaacctaggccaagaaaacaaatcccataagccatgaggaccttagagatccaaatattaataggtttttttttgaagcaatatagtcttttttttttttaaccttgcctgtgtccttgacctaagtatcacaagaagcactggcaatggtgcagacaaaatcgaagtggccttccaactgtgtggaattttgaatctcttcttcagttgtgaaacatgaacccaaaggttggctccttggagtttcactgctgtatctattgttaacagtatctgataagatctcttccttttgaatgaagttcaaaagcagttattctctgatttttcttccagtagacaaatccactagttgaggatcatggagaggttgtttaggaagattttgtaggaaggggaccttaacctgttggtgataggaccacgtacaatacatgagtcccttgcagtatcttgtcatgtctgcatggagtaggacagactctagtattggaggtgaaatctctaaatgcatggaccttcccggtatcaactcatagggggataacctatgtgtctccaagaaagtggcctgtatatccgtaaaggatagtggatatactcttggtcaagggagctcaagggtttctgaaattgttgcttattttaatgtaaggatgccatgggtcgtttttgtgggtggtaaggatggtgtagtttttgagtaagagttcttttataaaggtcgccttaaagtgtgtgcctcagtcacttgatataaaaggtgggatgccccagattgaaaacataaaatcaagcagcttgttcacggctgtaagggctgtagcattttggcaaagaaattcttcaactcatcctgaaaacagacatacaatatctaaaacatattcaaatcccagggagagtgaaagccggtgaagtgtcttgtgaaataaaatttaagcaaggccattgatttggactgggctcctgcactaagcctaacagatcaaacagatacggtgtgttgtttgatctgttaggcttagttgtttacaggcttacaatatgttgcagctgagctttaactaattgcaggagactctgtaaccaattaaccaattaagctgcctctgtaccatgcttcttttgtctcctataaatgctatcagattatgtcattggttggagttctctgaatttcctctagttccaaatcgtgcctgatttttgaactgcttttttttgttttgtttttgctttgtttgctttgttttgttctgcttttctttgctcaaataaactcagctaaaatgtacacttgtctaaggttttattccatgtaacagtccgaaggtgtccaaagaggctttggtttctggccatgtcccaactttacagtttttccagagttatatttttgacaggtgacacatgacccaaaagtaagctcagttgccttttcaaagttttcctaccaatgtttacttaagatagtaaccaatttgtctatgccataatgggtgtttcatggagaaatccagataatgtaggggaggaaatatctttcttatttgtcttaagttctaaggcggggctctgtaacagaaggcagattaaaaagtgaaaagcatacacatttatttaatgtaagttttacatggcatggaagccttctggaaatgaaccagtctgagtggatgcttatatactaagttagacaaagaacagtaaattgtgaaaacaagtcaaagggatatgggctagggctgttaatcgtggagaagtggctagggagataagggctagtttaacaaggtttatttgtagttttctctcaacctcagctgcccccatctctggtaataagaatgtcttccttcttccacggagggtccctgttacgtgggagcattgtctcctgcttttagaaagatcagagtgcccttcttgcatctgctgtttttcaagagcttttaattcaaaataatccatatgccagaaaggcatattttggggtggtatgttttgaactcctttagaaatatctacttgagatcatctggtgtcaccaagcagcaccaggaattatctgagtgaagagtacaattagatgttttccattctttttcaaaatcaggggctaaatgtcaatattttataatggcctctttgaatcccccagagatttatcctttaaaggtatagatagagtcataagcttggttaaagtagcttctttggcataatgatctgctagagaatttcctttagtttccatattgtctctttttatatggacctctacctatataatagccacttctctaggaagtgggggtgcatctgaaagttccttaacttgctgtccatttctaatgcctattttcttttcttttcttttctttttgagacggagtttttgctcttgttgcccaggctggagtacaatggcacgatctcggctcaccgcaacctctgcctcctgggttcaagcgattctcctgcctcagccttcctgagtggctgggattacaggcatgtgccaccatgcccggctaattttgtatgtttaatagagacagggtttctccatgctggtcaggttggtctcgaactcccaacctcaggtgatccacccgcctcagcctcccaaagtgctgggattacaggtacgagccaccatgcctggtcttctaatgcctattttcaaagcatctcaaaatcatatgctatttcaaaagcatacctgcagtctgtatatatgtttgctctctggtctttgtttaggtgacaaattctagtaaatgcaatacattttgctatctgggctgattttactgcaggtagtagactttttcttaagaagagtttaaaataggggtagcatagcctattaataatgtagggaaccagaatatgccagctcaataattttgagttgattattttgaaaaacagtaaatgcaggaaaaactcaaaaaacagggctcatcatttccacagctgcctctcccctcttccttccctgctgtgaaagaactataaatgtccttttttttttttttaaacagtgtctctctctgtcacccaggctggagtacagtggtacaatcacgactcactgcagcctccatctccagtgttcttccacctcatccccctgagtagctgagactacaggagcatgccaccatgcatggctagttttgtatattttgtagaaaaagggtttcgccaccttgcccaggctggtctcaaactcctaaactcaagcaatctgcctgccttggcctcccacagggctgggattacaggagtgagccactatgcctagccaagtttcccttttgtaagagaaatttccatttatattcccatttgtatggatgtctccctttcctgtgctaggaagaggaggacttaatcacggaggacttatcaatggagaagacaaccaacttgaatttgcttaacaaactttactaaacaacccttatatactatacatttcctagtccgcttgtcgcaacctccccagaaactcaaaatccctttcctatgtgcagagacaaaagtgactccatcttgaatgctaatctaccatgttgacgtctgattaaccatgtcccgggaatgcctcctgatttctactttatttactgtctctagtgtagaaacatgtattcactagaaatcctgcctttagatcaaaacaaccttaacgttatcatgcaaattatgggctatgacaaacacagcattcttgcctgttctgaagagttgcctttcattgtctctatatagcacgtaccccttttccctatggtatataagctctgggtctggggaataacagtgctgagatttacatgtcttgctgctgcccaagacgacacttctggctataagttccccaatagaataaaacacgctttactgacaaactgaatttgtctgcctttctttagtttctaggctccttcagcatttggggccacttcacatatgtggccctttcatggaacactgtcttgtcacttctgcacaattttctttgtcaaaatggcctataaactctcaggtttaattgcttctttgagtcttcacttctttttttatgaagacttccatattcatgtagaatattaatattaaattaaatttttatgccttttctcctgttaaatctgtcttttgtcattttaatttacagggcccccagccctctaggagggtaaaggaagaattgatttttctttcctcagtgtactaacttcaagtttcaattctggggtatgttccatcaataaatcatattaggtccgggttctcaataggagttgctaataaatctgactgacatgcagaatgtttcctactgaggtaagacaatcaagaggctccccttctggtagggacagagggtggcagaattcagtgtgttgcagagatgagtagtaatttatgagagggagagagggatagaatcttataagaggttaatcggctgcctgaagtgtgcagtgagttctcagtcaggtgtaatgcctgtgctgcgtgagaaaccaggaggtcaagcagggagtctagaacaagttcagcagaagcaacaacaaatgttgccatggcatctactgccctaagacaagcggggctatgcctctgcaactgggtcaaggataaggctgcagtaagggcttctgatggttccccattgaagtgcaattaaagctccaagggcttgtctagattgctatgcataaatagacaaaatggcttcctgtagtttcaggattcctagggccaggggctgttgaagagccttattatagttacagaagatctgttcacatctgaactgtggttctgaaatcatcttgctgggtggaggccacttttgtgcagccacgcccagtgccttagtggggtccacctgactaaccaaaccatcccaccaggcgcccttcaggtgagtcctgtgccttatttatgtctgtatcccacagtctaatgaatgaatgaacacattctaacttgactattcaagagaataaaagtattattaaagactcagaaaaataaaatacaggtgggggctgggggagtaaggaaactgtaggggccaaggaaaaattcccctttcaccctccaaaggtttgctgaaaatcaactgacaaaagacagattgataggaaaaaacgcatagaaattgatttgatcgtagttttacacgacacgggagccttcagaagacccaaagataacaggggaaagtgggcattcttacacttggatatcaacaaagtatgaacagctgtgtagaaatatgactggacaacagggcgatctaatgaaaatagactgagtggggaaacccagcaaggcctccctgtctagattcttcttggcctctctgagcattcgtcctttttttctgggtatggggggcaggacgctctctggaatgaggatcttacgacctacaatcacacaaggtaggtcagataatttcactatggccactttttacacagaaaggctgaaacaatctgaatacacagcacgaagggatattttgataattcttagaggtatccaaattgttactcagcaaaaaaacaggtctctttctaggagggcattctgctgctaataaatatgatattctttgtattttttccccaaaaagaatttgagatttgggatttaagtttatctttagttcctctactcaattccgacctacagggtcagtggttactgtagataagaacagccccatcctctcgatgcccccagagcaggggtggagggtgggtgggaagtggccagaactgggtgagcgcaccctagaggcctcctcctcctccctattcagttactccccctttcttctccagatctgggaagccttccagctgggggcagcaggacagcctccattccccccgaccccgcctcccatccccgggagaggtagcgttgggagaatgccctcctagaaagagacttgggttttgctccctaggagccctggaatagctttggccagaattccctatctcccattagaacctctcctttgcgtcctttgttaacctccaagtctacttggtgaaaacgcccacgaagaagtaacaaggactttgttcctagtgtgccaggtttgggcaccagtgctgtagtggctttctctgctgctccttgtgcatcagcagacagatgtggttcacataggaagaaagactaacgtaggcaaagatttgctctttcttcagcagccctagaaagacggcggcctgggtgattcaccactccttcctcacgtccttgattttatttgaactgagctccagatgctcctcccacccttttcctcttggaagccaaacccctttgtaatctgtataaggtccacaccccgggagctgagtgattgcagaaactggccttccatctctctcagacaccaagctgcagatccaggtaagcagcccaagaggtgttctcaggtgccgcttctgcttcagggttgcagaagagggagctagggccagtccacagcactgagaaagattgggtgatgctagcgctgaaaaaatgtggcccaggcaaacatcagctgggggcagaggggtcagggtggaacgtgcaggctgcagagcatccatgggactggagaagaaggagcctccaaattgggggaggccagcgtttctctctggaatacaatggaatcttttatgatgccagtgtcaggcactggcctgagttcccttatgctccaagacaacaaggctctgtcacccatggccctggatgtcggggatacaatttggttcatgatttattcaaactgatgtttcgatgagccatttgagcactgggtacaaatgtattttggatcaaagaaactccagtattcaaagataggaactgacaggattttaggtcactttgtaggtcaccacctagaggggaggaagacctcgctttggagagtgggaataaaacgctcgtggaaaagggtacacgtgagtgtctcattacacgaaaaacctcaggaagtaggatggacgtctttctggctgacctgaaacagaaagtgtaaaccaggcaagccataggtgggagctggagttctttttctaagagggctcttttccttctctctccttttctcaattaggcttttctgggaaagtgaggccaccatggctctggagaagtctcttgtccggctccttctgcttgtcctgatactgctggtgctgggctgggtccagccttccctgggcaaggaatcccgggccaagaaattccagcggcagcatatggactcagacagttcccccagcagcagctccacctactgtaaccaaatgatgaggcgccggaatatgacacaggggcggtgcaaaccagtgaacacctttgtgcacgagcccctggtagatgtccagaatgtctgtttccaggaaaaggtcacctgcaagaacgggcagggcaactgctacaagagcaactccagcatgcacatcacagactgccgcctgacaaacggctccaggtaccccaactgtgcataccggaccagcccgaaggagagacacatcattgtggcctgtgaagggagcccatatgtgccagtccactttgatgcttctgtggaggactctacctaaggtcagagcagcgagataccccacctccctcaacctcatcctctccacagctgcctcttccctcttccttccctgctgtgaaagaagtaactacagttagggctcctattcaacacacacatgcttccctttcctgagtcccatccctgcgtgattttgggggtgaagagtgggttgtgaggtgggccccatgttaacccctccactctttctttcaataaaacgcagttgcaaacacctgatttctgaagcggttctgtctaggtactgtttctggcattgccttccagcaaggggtaagaactgtaaatctgattcactttggagaacggtgaatggagtaattaaatgccttcccttctgacttggattttagtggcttgagaaaattcctttccttgtagattccctgatgccaaacataaaactgttaagtgtgggctgttttagacaaaagggagctacagcctgggacactgccatgcagggtgaactgacagaggggtgaagctcaaatacaatcattctctggcacagaaggaaggcaagtgtgacctcaggaagatcctgcttagcctcagggtggggaagaggactcaatgaaattatgatcctaaatttccattttccttttttttttttgagtgagctattactaaatcagaaaaatgggcacctcttagttggaaagccagaaccttacattttagagccagaagtgactttggagagcacggaattgagggatagcaagtagatttcagtttgtgtaccaactctaattggaagtgccggtcgggcgtggtggctcacacctataattccagcactttgggaggttgaggcaggtggatcacctgaggtcaggagttcaagaccagcctgaccagtatggtgaaaccccctctctactaaaaatacaaaaagtagtggggcgtggtggcgggtgcctgtaatccagctactagggaggctgaggcaggagaatcacttgaacctgggaggcggaggttgcagtgagctgagatggtgccacttcactccagcctgggcaataagagtgaaactctgtttcaaaaaaaaaaaaaaggaagtgcctacccaaaatgctgtagcaaaaaattctggacagtggtgtggttgaacaacagcctctatcgaaggcacgagagggggaagggtgtgtgtgccacacatttgccatccctgaccaaatgtgacccctgcctttccggtgacttgcacatggcttgttgctagttagtggcacagccgggactacaccctaggtttcctgacttccaagccattgttctaactcaggaagccattgctctaactcaggaagaaagctcccctcctcagtaagtgctgtggagcggtagctctctcccagagcttgctggtgggctctcacaggctcccagtgttcttagcctgtgagtccactccactcttggcaacccttcctgacagccactgaaagactacctttggcatctgtcaacacttaacctgggaggcagaggttgcagtgagccgacatcgcgccactgcattccagcctgagtgacagagcaagattccatctcacagggtggggggtggggaagcttgccatataaagaatactttctgcagggcctgtgcggagatccactgtcttgtggctgcctgagacatggcttctatttgtaagtccctattaaatgtttctttctgagaaactgaacttgtcatgaagtgggatttaaggaaccagagagaccagatggcgtgcaggagggtgtttattttaaggtgtacactggcccagcggacttgtgtcctaaaaggctgagcccaagaacaaagaaaatgagtcccttttaagcattttgaggcaggaactaagtgaagcaggcttacagaagtgagaacaaaaggctgctgtgacacttttggaacatgtcttacatctctgtgagaacttggtttgcagcttatgcttatctgtcttgtgaccttgcagctgtgcagggaagaaagaaacaggagtttacagagcctacaaaatatgtggaggatagatatggttaacgtttcttgggacagacagttaatattctcttctaactttaacttcaggggggctacttaaattcttttcagccttggttaatacagcaattcattctatgagctattgttatttctcttattattattacgtatgctattatttgttattttcttagtttcctacttcagtcaagccctttctttggcctctcatctccctcagcccttgggggtacattggcatagacctgctcactgcagaacaaggaaggaggaagcaggagaaaccaaacctgccataccgtgttcttgaacttctggcctccagtgagaaaatgaatttctggctgggcatgctgcctcacgcctgtaaccccagcactttgggaggctgaggcaggaggattgcttgagctcaggagttcaagagcagcctgggcaacatagtgagacccccgtctctacaaaaaaatattaaaaaattagccaggcaaggttgcaaacacctatagtcccagctactcgggaggctgagatggaggatcacttgagccttgggggtcgaggctgcgctccagcctgggcaacaatgagaccctgtctcaaaattttaaaaaataaataaataaataaatgcatttctatcgtttgagccgcccattttgttatggcagccctaggaaatgaatacaccctttaaccaattcttccacttctcttggattgcatccgtagctgccctgacacatccctatggcgggctggtctaaattagatgccacggtggtggggatggggtggctgtggggtgaatagaagtgtctgtggggacaaatgaacatctacttcttcctgggacagctggatggagtggagggactttagaaaccgttaacaggtcttagggaactggccctgcgtcccttctgaggctgctgtaaggggaaaagaaaaagtaggggcatgaaagcccttggcaagatgtgaagcgaggcagccttcgtgcatgcttggtcagttgtgtacctccagctagttagtgtgcaacagccctcacgcttcctctgcaacttctcccctgccatcagctgagctttcatgttctcagttcatgttctcggttcatgagtgttcatgttctcagttactcttggaatatggttcaattcagaaattcccaatgcactattaatgaacatagagagacggatatactattctaccaaaaaaaaaatctgcccttttaaaatccagggaatgtctggacatacacattcttaagtcaaaggaacatttttctagcatttgtgaaagaaggagtgaatgaatggaggttggaaggagtgcagtagttacaaagattggcttattttttatgggtctagcctggattttaaaaacctgagacaggataacaactccaagtgcctgtgggacttctgtaaaatggaaatattcataacacttaattagaagtactgtggtaaagatgacattcagagaaagcgtagtgttcagcgttctgtggacactcagaaagttagccactatcaccgaggcatggggtatggtgtttcagagccttggctctggagtgaaacagacctgtttcacactccactgtgccttttgggagtagtgtggccgcaggcagggaacgtaacttttttaacatcaggttccctatgtaaaatatcatgataaacatggtatcaacttcagagatttgttgaggattagttgaggtcacatataaaaaatatttaggacaatgtctgtccataataaaagctattactcttagaatcaagaatcatacatcctattctatcacttgcatgcaaccaatcaagactggggacagaattgacaatgtctcactacagttttctgtatttataattcaaggtgccaacatatgatttttgtttgtttgagggcctcagatgaaagaggggccaggaacattagtactggaactcacaggagtatgaattctatcatcccaagagaggggataaccagagatctagaaagcacagaagatcaggcagagacagtagaaaggcctaaacttgatttcaagaaccgactctcaaaagagtgagtataaaaccagtgtatacaccaagtacagtcatgtgttgctgaatgatggggatacaatgtgtcattgagtgacttcatcattgttgggaaccttacagactatattacctaaaactaggcagtatagcttgctctacatctaggctatatggtataacctattgctcctaggttacaaacctgttcagcagtttactgtactgaatactataggcaattgtaacacaatggtaaatatttgtgtacataaacatagataagttacagtaaaaatatggtataaaaggtaagaaatggtacacctctgtaagacacttatgtgtggagcttatagaattagaagctacggccaggtgcagtggctcacgcctgtaatcccagcactttgggaggccgaggcgggtggatcatgaggtcaggagttcgaaaccagcctggacaacatggcaaaaccccgtctctactaaaaatacaaaaattagccaggcatggtggcatgtgcctgtaatcccagctactcaggaggctggggcaggagaatcacttgaacctgggaggcagaggttgcagtgagccgagatcgtgccactgcactccagcctgggtgacagagcaagattcggtctcaaaaaaaaaaaaaaaaattaaaagttgctctgggtgagtcagtgggtgagtggtgagtgattgtgcaggcctaggacattgctgtgcactactgtagactttataaacactgtatcattagggcacactgaacttatgaaaaaattttctttcttcaataataaattaaccttagcttactttaacttttaaactttatacatttttaaataaaaaaaattttgactcttttataataacacgtagcttaaaacacattatacagctgtacaaaaatgttttctttgtatccttattctatagcttttttcttcttcttcttttttttttttttgagacaggatctcgctctcttgcccaggctggagagcagtggcacaatcttggctcacggcaacctctgcctccccacctcagcctcctgagtagctggaactacaggcatgtgtcaccatgccagctaagttttgtatattttgtagagacagggtctcaccatgttgctcaggcttatctgttttttttttctatttaaaaaaatttttaaacttttttgttaaaactaagatacaggctgggtatggtggctcacacctgtaatcccagcactttgggaggccgaggcaggtggatcacctgaggtcaggagcttgagaccagcctgaccaacatggcaaaaccccgtctttattaaaaatacaaaaattagctgggcgtggtggcacatgcctgtaatctcagttacttgggaggctgaggcaggagaattgcttgaacccaggaggcagaggttgcagtgagctgagattgcgccattgccactatatatatatgtatatatatattgtatatatacacatatatgtatgtatgtgtgtatgtgtgtatatgtgtgtgtatatatatacacacacatatattaataatatatattatattatatatattatattatatatgtgtgtgtatatatacacacgtgtatatatatacacacgtgagtatatatacacgtgcgtatatatacacatgaaatgtaacataacattttcttttttttttttgagttgctctgtctctcaggctggggtgcagtggcatgatgttggctcactgtaacctccacctcctggattcaagagattctcctgcctcagcctcctgagtagctgggactacaggcacacaccactatgcccagctaatttttgtggttttagtagagatggagtttcaccaagttggccaggctggtctcaaactcctgacctcaggtgatccacccgccttagcctcccaaaatgctgggattataggtgcgaagtactgcgcccagcctaacataacattttctaagtaacatttgggtcaaagaagaaatcaaaagaaaaaaattaaaatatatacaatatataaaaaaattgggtgatgataagaaagtacaattaagagaaagttttgtgaaagttgtcagaatcaaaacggagtcactaatgttaaagaaaccctgacaagcctgggtgcagtggctcacgcctgtaatctaaacactttgggtggccaaggtgggcggatcacttgaggccaggagttccacaccagcctagacaaaatggtgaaaccccgtctctactaaaaaaaaaaaaaaaaaaaaaaaaattagctgggtttggtggcacagctgtaatcccagccacttgggaagctgaggcacaagaatcacttaaacccaggaggcagagattgcagtgagtcaagattgcacagctgcactccagcccgggtgacagagtgagactctatctcagaaaaacaaacaaacaacaacaacaacaaaaatcctgacaatagagctggggaaagctaagaagggagaattcttatgcttgtatgcctgataactatcacaaaagacctcaaaaaccaccatcttgcataaaggccattgcaacatcatctaaaaatatttctgcaaggatttttactcaacaactgcctatccaacctcaaattggtgtcatccttgttagtgatctttgtagccaaggataatcatttcaaaacaattttgtaatcctcttcgtttttcttttgaaaacctttgtctccctttacctccctgaatatgcacatagtttactatggcacgtgtattcccattgcaatactttattcccaaataaatacctttttcttttaaagaccctctctctgtttgttacttaggttaaaaggttttatcgctaaatacctatattagaaaagtggaagaatctcaaattatgatcttaggatcctccttaagaaaatagaaaaagataaaatttaacccaaaggaagcagaaagaaatcaataaaggtcagggcagaaatcaatgaaataaaaaacagaaaaatgagagaggaatttaataaaaccaaatcctgtttcgttgagaagatcaacaacattgctaaacctctcattaagctgaggaggagaaaagatgtcacaaacaaccaatatcagaaatgagagatgacttcctcagagattacacagatagcaaaaagataataggagaatatgatgaacaactttatgtcaataaatttaaaaacttcaataaaatggaaaagtaattaagagacacaaatttccaaagctcacttaaaaaataggtaacctgaatagccatagatctatttaagcaattaaatttgcagttaaaaacctttccacaaagaaaactttatgcttgactggtgaagtttattaaacatttaagaaagccatgttaattctatacaaactactccagaagaaaaggttttccaactaattctccgatgtcattcaagacaaattatccagagacatttagaagaaaactacagaccaatagttctcataaatgtaactctaaacaaaattttagcagtttgaacctaacaatgtataaaaagaataatatatcactaccaagtggggtttattccaggaacaaatgttgatgtaatttttcatgtcaatcaatataattcatcatactaacaaacttaaaaaaaaaccatttgatgttctcagcagacacataaagagcatttgacaaaaccccacattcatttctgataaaagctgtcagcacactaataatggaagggaaattctcaacctttagggtatttgctatgggctaaatgtttatatcattccaaagtttacatatgtaaactctgacccccagtgtgttaatacttggagatggggcctttgggcagtaattaggtcataagaatagagctctcctcatgagattagtgccctgataaaaagagacatgagggagaagaccattatccctctgaaatgtggggagagagcaaggtgtcccactgcaaaccagggagtgggtcttcaccaggagccaaactggctgatgtcttgatcttgaacttcatagccttcaggactttgagaaataaatgtttgttgtctaaaccacccagtctatggtatttttgttacagcagcctgaactgaataagacatcatctacagaaaccctacagttaacattatactcaatctttgttttcctatcagacccctaaggagctgtcttagtctagttcatgctactataacaggatgctggccaggtgcagtggctcacgcctgtaatcccagcactttgggaggccgaggcgggcggatcacctgaggttgggagtttgagaccagcctgaccgacatggagaaaccctgtctctactaaaaaacaaaattagccgggcgaggtggtgcatgcctgtgatcccagctactggggaggctgagacaggagaatcgcttgaacccaggaagtggaggttgcggtgagctgagatcgtgccattgcactccagcctgggtaacaagagtgaaactctgtctcaaaacaaaacaaaacaaaacaaaacaaaacaaaacaaaacaaaaacaggaagccacaaactgagtaattaataataaacagaactttattgactcacagttctggatgctgggaagtccaacatcaaagtgccagcatctagcacgggccttcttgctgcatcatcgcatggtggaagggcaaagggagagcaagagagagataaaagggggctgaacttgtccttttgtaaagaacccactcctgcaataatagcattaatctattcagggctgagccctcatggcctaatcacctcttaaagatcccacctcttaatacttttacactggcaattacctttcaacatgaactggggagtggacaaatacataggaggagaccttttagatatttttcttcctaaccactccacccgtcctatgaaattaaatactatgaaatgagttttgttgagtagggttgattttgaaggacgacaaaccattgtaatatctatgatttttttacccctcaagaaataatttttttttttaagacagatctcactctgttgcccagcttggagggcagtgatgcgatctccgctcactgcaacctccgtctcctggattcaggcaattctcctatctcagccttctgagtagctgggattacaggtgcccgccagcatacttggctcatttttgtatttttagtagagacggggtttcacaatgtttgccaggctggtcttgaactcatgacctcagatgatctgcccgcctcggcctcccaaagtgttgtgattacaggcacgagtcactgtgcctggccaaaaaataatttttgccctctcaggggcactatcgcttccatagaaaaagcctgtactaaataatcctcaaaccccacctccaaggagattttcttgtttattttgactacatatcttcaccacaaaatagtcaactgcttccttttgccaacaggagaaattttgaatgcctgggcctaataattaatgatactgtttgaaagagaagtcaagttaaaaatacatcagttacgttttgcaaaatacctcatcaattctccacaaagttgtcacggtcatcaaaaaaagtttagtttgagaaactgtcatagccaaagaagcctaaggaaacatcacaattaaatgtaatgtggtgtcctgaatagaattctggaacagaaaaaagacattaggtaaaaactaaggaaatctgaataaagtaaggactctagttaataacaataatttaaagaaaacacccaaaccctccccctcctcactttgtccttggtagtgaaccctccgggactttctcagggagcgcacctttgattaaaatcgtagctggaacacagcattagtgggattccgacaccttgagcaagaccctgtcctgagaccttggcttaacttatcaactgcaactgttgttaagtgctataaaacatgaccatgagaagaagaagaaaaaagaacatttccgcatttgtggtgaaaactgtaagtgggacca

SEQ ID NO: 475 - DNA, 1157 bp, Homo sapiens
tcctttgcgtcctttgttaacctccaagtctacttggtgaaaacgcccacgaagaagtaacaaggactttgttcctagtgtgccaggtttgggcaccagtgctgtagtggctttctctgctgctccttgtgcatcagcagacagatgtggttcacataggaagaaagactaacgtaggcaaagatttgctctttcttcagcagccctagaaagacggcggcctgggtgattcaccactccttcctcacgtccttgattttatttgaactgagctccagatgctcctcccacccttttcctcttggaagccaaacccctttgtaatctgtataaggtccacaccccgggagctgagtgattgcagaaactggccttccatctctctcagacaccaagctgcagatccaggtcaccacctagaggggaggaagacctcgctttggagagtgggaataaaacgctcgtggaaaagggcttttctgggaaagtgaggccaccatggctctggagaagtctcttgtccggctccttctgcttgtcctgatactgctggtgctgggctgggtccagccttccctgggcaaggaatcccgggccaagaaattccagcggcagcatatggactcagacagttcccccagcagcagctccacctactgtaaccaaatgatgaggcgccggaatatgacacaggggcggtgcaaaccagtgaacacctttgtgcacgagcccctggtagatgtccagaatgtctgtttccacatgcacatcacagactgccgcctgacaaacggctccaggtaccccaactgtgcataccggaccagcccgaaggagagacacatcattgtggcctgtgaagggagcccatatgtgccagtccactttgatgcttctgtggaggactctacctaaggtcagagcagcgagataccccacctccctcaacctcatcctctccacagctgcctcttccctcttccttccctgctgtgaaagaagtaactacagttagggctcctattcaacacacacatgcttccctttcctgagtcccatccctgcgtgattttgggggtgaagagtgggttgtgaggtgggccccatgttaacccctccactctttctttcaataaaacgcagttgcaaacacctga

SEQ ID NO: 476 - protein, 138 aa, Homo sapiens
MALEKSLVRLLLLVLILLVLGWVQPSLGKESRAKKFQRQHMDSDSSPSSSSTYCNQMMRRRNMTQGRCKPVNTFVHEPLVDVQNVCFHMHITDCRLTNGSRYPNCAYRTSPKERHIIVACEGSPYVPVHFDASVEDST

SEQ ID NO: 477 - DNA, 1147 bp, Homo sapiens
tcctttgcgtcctttgttaacctccaagtctacttggtgaaaacgcccacgaagaagtaacaaggactttgttcctagtgtgccaggtttgggcaccagtgctgtagtggctttctctgctgctccttgtgcatcagcagacagatgtggttcacataggaagaaagactaacgtaggcaaagatttgctctttcttcagcagccctagaaagacggcggcctgggtgattcaccactccttcctcacgtccttgattttatttgaactgagctccagatgctcctcccacccttttcctcttggaagccaaacccctttgtaatctgtataaggtccacaccccgggagctgagtgattgcagaaactggccttccatctctctcagacaccaagctgcagatccaggcttttctgggaaagtgaggccaccatggctctggagaagtctcttgtccggctccttctgcttgtcctgatactgctggtgctgggctgggtccagccttccctgggcaaggaatcccgggccaagaaattccagcggcagcatatggactcagacagttcccccagcagcagctccacctactgtaaccaaatgatgaggcgccggaatatgacacaggggcggtgcaaaccagtgaacacctttgtgcacgagcccctggtagatgtccagaatgtctgtttccaggaaaaggtcacctgcaagaacgggcagggcaactgctacaagagcaactccagcatgcacatcacagactgccgcctgacaaacggctccaggtaccccaactgtgcataccggaccagcccgaaggagagacacatcattgtggcctgtgaagggagcccatatgtgccagtccactttgatgcttctgtggaggactctacctaaggtcagagcagcgagataccccacctccctcaacctcatcctctccacagctgcctcttccctcttccttccctgctgtgaaagaagtaactacagttagggctcctattcaacacacacatgcttccctttcctgagtcccatccctgcgtgattttgggggtgaagagtgggttgtgaggtgggccccatgttaacccctccactctttctttcaataaaacgcagttgcaaacacctgat

SEQ ID NO: 478 - protein, 156 aa, Homo sapiens
MALEKSLVRLLLLVLILLVLGWVQPSLGKESRAKKFQRQHMDSDSSPSSSSTYCNQMMRRRNMTQGRCKPVNTFVHEPLVDVQNVCFQEKVTCKNGQGNCYKSNSSMHITDCRLTNGSRYPNCAYRTSPKERHIIVACEGSPYVPVHFDASVEDST

SEQ ID NO: 479 - DNA, 1089 bp, Homo sapiens
tcctttgcgtcctttgttaacctccaagtctacttggtgaaaacgcccacgaagaagtaacaaggactttgttcctagtgtgccaggtttgggcaccagtgctgtagtggctttctctgctgctccttgtgcatcagcagacagatgtggttcacataggaagaaagactaacgtaggcaaagatttgctctttcttcagcagccctagaaagacggcggcctgggtgattcaccactccttcctcacgtccttgattttatttgaactgagctccagatgctcctcccacccttttcctcttggaagccaaacccctttgtaatctgtataaggtccacaccccgggagctgagtgattgcagaaactggccttccatctctctcagacaccaagctgcagatccaggtcactttgtaggtcaccacctagaggggaggaagacctcgctttggagagtgggaataaaacgctcgtggaaaagggtacacgcttttctgggaaagtgaggccaccatggctctggagaagtctcttgtccggctccttctgcttgtcctgatactgctggtgctgggctgggtccagccttccctgggcaaggaatcccgggccaagaaattccagcggcagcatatggactcagacagttcccccagcagcagctccacctactgtaaccaaatgatgaggcgccggaatatgacacaggggcggtgcaaaccagtgaacacctttgtgcacgagcccctggtagatgtccagaatgtctgtttccaggaaaaggtcacctgcaagaacgggcagggcaactgctacaagagcaactccagcatgcacatcacagactgccgcctgacaaacggctccaggtaccccaactcatcctctccacagctgcctcttccctcttccttccctgctgtgaaagaagtaactacagttagggctcctattcaacacacacatgcttccctttcctgagtcccatccctgcgtgattttgggggtgaagagtgggttgtgaggtgggccccatgttaacccctccactctttctttcaataaaacgcagttgcaaacacctga

SEQ ID NO: 480 - protein, 155 aa, Homo sapiens
MALEKSLVRLLLLVLILLVLGWVQPSLGKESRAKKFQRQHMDSDSSPSSSSTYCNQMMRRRNMTQGRCKPVNTFVHEPLVDVQNVCFQEKVTCKNGQGNCYKSNSSMHITDCRLTNGSRYPNSSSPQLPLPSSFPAVKEVTTVRAPIQHTHASLS

SEQ ID NO: 481 - DNA, 1229 bp, Homo sapiens
cctttgcgtcctttgttaacctccaagtctacttggtgaaaacgcccacgaagaagtaacaaggactttgttcctagtgtgccaggtttgggcaccagtgctgtagtggctttctctgctgctccttgtgcatcagcagacagatgtggttcacataggaagaaagactaacgtaggcaaagatttgctctttcttcagcagccctagaaagacggcggcctgggtgattcaccactccttcctcacgtccttgattttatttgaactgagctccagatgctcctcccacccttttcctcttggaagccaaacccctttgtaatctgtataaggtccacaccccgggagctgagtgattgcagaaactggccttccatctctctcagacaccaagctgcagatccaggtcactttgtaggtcaccacctagaggggaggaagacctcgctttggagagtgggaataaaacgctcgtggaaaagggtacacgcttttctgggaaagtgaggccaccatggctctggagaagtctcttgtccggctccttctgcttgtcctgatactgctggtgctgggctgggtccagccttccctgggcaaggaatcccgggccaagaaattccagcggcagcatatggactcagacagttcccccagcagcagctccacctactgtaaccaaatgatgaggcgccggaatatgacacaggggcggtgcaaaccagtgaacacctttgtgcacgagcccctggtagatgtccagaatgtctgtttccaggaaaaggtcacctgcaagaacgggcagggcaactgctacaagagcaactccagcatgcacatcacagactgccgcctgacaaacggctccaggtaccccaactgtgcataccggaccagcccgaaggagagacacatcattgtggcctgtgaagggagcccatatgtgccagtccactttgatgcttctgtggaggactctacctaaggtcagagcagcgagataccccacctccctcaacctcatcctctccacagctgcctcttccctcttccttccctgctgtgaaagaagtaactacagttagggctcctattcaacacacacatgcttccctttcctgagtcccatccctgcgtgattttgggggtgaagagtgggttgtgaggtgggccccatgttaacccctccactctttctttcaataaaacgcagttgcaaacacctgat

SEQ ID NO: 482 - protein, 156 aa, Homo sapiens; identical to SEQ ID NO: 478

SEQ ID NO: 483 - DNA, 79329 bp, Mus musculus
  misc_feature (1)...(79329): n = A,T,C or G
gacaagccaggctcagcactctggagcagacatttagaaggaaagggtgcagaagggaggctgccagtggacaggagctaaagaccgagcctgagggagaagaacatcgaagagctggccacacaccctggctgtgaacgcctgctgtgtgctggttgtttgtttactacaaagccatcactatcctccaatgagggtgaggagccagctgttatcatggcggcccttgtaaagctaggctagagggaagcactgaatttgaggtcagcctgggctacagggtgaagctctaacctggggctgaccggtcccttccataggctgctgtgaggttggcccaggctgtctggttcctccacacaggctgctgtgaaggtaagcaaggtatcacaggtgtttagcacacccgacttcccgtgtctctccgaggcttgcttgcctaggacgatgccaggtgactaaactgctgtgcttggggagctgcagatgggctagcgagacgggagaaacggttggccaataggtctggatatggttaggaagggcctgccttggagctgtggacttggacctcaccctgtaggcattgaggggctagggagagtatgagcaggtgtagcaggggggcccccttgaagtcagggttgactggtccagtcttggagaggagctgtagccttcctgagtctattccacaggtcacaaggtcgnnnnnnnnnnnnnnnnnnnnnnnnnnnnnnnnnnnnnnnnnnnnnnnnnnnnnnnnnnnnnnnnnnnnnnnnnnnnnnnnnnnnnnnnnnnnnnnnnnnnnnnnnnnnnnnnnnnnnnnnnnnnnnnnnnnnnnnnnnnnnnnnnnnnnnnnnnnnnnnnnnnnnnnnnnnnnnnnnnnnnnnnnnnnnnnnnnnnnnnnnnnnnnnnnnnnnnnnnnnnnnnnnnnnnnnnncccacacacacacacactcagagcaatagagacgtcctgcagggagacagtaagttcgggccagttttcagcttgagtgaatgactccatgggcttctgctgctgctgcttctgtgccgttcagtggaggtgcaggagaccctggcatggtttaggtacctggcaagtcctgaggtgttgcttctgggaggttttgatggcttagacattaggtattaggttttaatggcttagacgcagccattcctataaccaggaagttgatgttacatctacagaagtgtagctgggtgtgttgaagctctgggttcaatccccagcacccataaaccaagcctggaggtacatgcctgtaattccatcacatgggaggtgatctgttgctgcgtagtgcgttcaagacctgcctggactatataagactccataaaaaggaaggaaggcaggcaggtaggctggctggctggtgagaatgctcaataggtgtaggcatatgtcatgaagcctgacatcctgggttctaacccccagaaccctcatggtagaaagagagaaccaatttccactattcctctgacctctactctggccatagcactcatgtacataacacatgtatgaacaataaacaaacaaacaaataaataaaatccatgtttcaagaaagggagggatgtagtcatttcagaaaattagttcaagattaagggcttccccacaccttcccccaggcctccttagagtcagtgtatgcttgcagcccagaaggggcacctgctggttgcctttggatctctgtgcggctgtagttcattgccttagccactgatcaaaacagctactgtaggtttgctgttaggttttcttttctttttttgttttgtttttcatccaaggcttcaccaggtagcctgagctagaacttgatatgtatatcaggttagccttgaacttacagatagccaccaggttttgccttcctagtgcagggattaaaggcatgtgccaccatgccaggctgtgctttttagtgaacgtttggcgattcttgtaaatctgtgggctaagggagcaatcatgtgatatgttatcttctgaaaccaacgtttttcgatggcagattgtcctcagtgttgacatgtgtcatagcagctttcatgttttaattctttattcctttttatctaaatagtagatagatcaaatcttgttgatgcatttgtggtcacacgctagtgaggcagaagtaagaggatgtcggtaatgtattcaaatttgcaattaaaacaagcaaaagtattggacttttagaaaggtgcagaaccagcagggacttggaagagatgtactctggaatggctgcttcagggatggaggtgggcggagtctcgccatctgccgtggcaggatggcgacccagcaggctactgatggcatctcagtgtaagtttgaaggcctgagaacagaacagagatgcgaaagctgctgtcagtcctgggttgatgagccaaggccgcatcagatatgagattaatagccctactcagtgaggagtccggcatccctgagctctctgtggaatagatggagttggcctatgtcgagtcacggtgagagtggatctttttacccatgctgactggaaacatcctcacagaaacacccagaaacaatgctttattgactactgggcacccccagcccaatcaaaaggacatagactgttaggcatcgtagatgattgcagagagttgttcctgctctgccctgtctcattgctcatcgtgccttccaaagtattaaaatctcatgcttctctcctccccgttctgaacattgagcccaggcctctgagaatgctaagcgagccctttcactgcgctccacccacaggcaagctccctcaggttgttgtgttctggcttaggagaaagcccctctgcgtaactcaggccggccacaaactcagtcctcctgccccagcttgctgagagccaggatgactgctatacactatcacatctaccttggatgcggtttctttttttaaaagggtgttggatgtgtaccacagcgtgcttgtggtgctcagagaacagcctgtggggaactgaacctggccgtgcatgcctgcaaccccagcgccccaggctgaggcatgaagacggccatacatttgaggacagcctggtgtgtacatgaagactctgctgtttggtttctatccccaaaccccaccccacccccaaagaaggaaaagggaagaaaacaagaaaagggttgtttgcagaaacatgattagacattcagaccttgagtccttgtgaagtggccccttatttgtatagtggagtcattttccaactcagtcttttcaaaagttgtttccatccgctctgagcagctcgttccccgttattccacacaaaggctatttttttatggtgatagttttcctagcgttctcatggactcctagggtctgacaggatggacctccatgaacttagcaacacttctgggcgtgatgacacgggcaagaggttcgtgggaagccagcctgggctatatagtgccaggccagcctgagctacacatgagaccttgtctcaggggagaaaaaaaataaaaagccttttaagattctctctaaaagctgaaatctgaagaaaagtgcacgtgtttgtcagggctcctctggcttatatctaggccaatttgcggctgctgaaatgtcatcagagaggatttgcctcttgaaaagtccaggggcaaggcctgtggtgagcacctgtagtttccgaacttgggaagacaaggcaggaggatcatttgagtccatgtgtcctaggccaagtgcaaagcacagggaagaccttagttcttaaaacaaacaaacaaacaaacaaacaaacaaacagtaggggagaagaaccaaaatcacagctgctttccggagcagagcctcattcccacctcttagccttttctggacacttgcttactgagtaaatgttttaatttggtgcgtggaagcagtgtaataatcatagcgagatgacaagctgtgtccatagtctctcattatctgtttcattttgtggggcagggtccttgaagtcctgatcctcctgacaccacacactcctttttggagggagaaggggagaatgttcgctatgctgctgaggctggccgcaagctcttgattcgcctctggactaacagggacacttttgactactccaggcccagagcactagacccagcctaagaagcagttaattattcatccttggatttttttttaattaagatacttctttactttgcaggcaaatggacggcattaaaaggtatttttatcattgaatggagttactatattttcttgccaatctgggggatagaattaaaggccaatcaaaagccatgattcttccccagtgtatcctattaatgttaagagtagcactaataaactttctggtacctattattaataaactgttaaccattctttttttcttttattgggtattttatttatttacatttcaaatattatccccttactgttaaacatcctacatttatgagagactgatatttgagtgctttgtctaacacatgcaagaacctcagcactgaatatataagataatcacgttagtgtgaaccatcgtgtgtgtgtgtgtgtgtgtgtgtgtgtgtgtgtatgtgtgtgtgtatatatatatatatatatatgtatatatgtatgtgtatatatatatgtatgtatgtatgtatgtatcaaaagatacatcgtcgtagtatttaacagcttgtttaatatggggctagaaagtcataataagcctttactgaaatcctaaaatgagaaaagtcaatttctgtattcttttctaagggaaattctagctgctggctaagaaatgttctagcatgtatatttttgtggccatttttttctttctaagcttttcctgtgataacatcagagtggggattcttttctggctggcagggtgacagatgtccatctgcctatgtcggctgtggttatcagacaatatcaggcagtttattaagttttttgtttgtttgtttttgagagagagagagagtcattctgagtagcccaggtcggccttgtcctctccactttcctgtctctacctggtgggtcataagtcctacttatgtgtctgcccttgctttgaactctgaaaaactgtcattcctctgggatgtttagagttcttatttaatatcctaggacatatatgtaaaactcccacaaatgcacaccaacacatgttgctcaggctggcttcaaacaccttgttgatcgtgacagcagttaccatcccatgagtctggaagcctcaagttcaaagtcagtgtgtcagaatccaggctctgcaaggctgtcctttctccagcttctggtagaagtgacatctgtcaagccttgttcatgtgtcactttttgtctgggaatagaactcagttgttagaacactgattacactgcctgtgtagtcccccagattgggaagtggaagcagaaatatcaaagttcaagatcaccctcagctaaggtcaagactgaagctaacttggcctacataaaaccctgcgtccaggtagataaatcaacaccagtctctattccatccacgagtagcttgcttcctttgtgtttgtatccacattttccttagcatataaagtcagccactggtttagaacccacataatccagggtgagcccattagaaggtgaccactctgcaaagcacactggcagaccctcacagtggttaggagtccatctgtctgggggcagttgccagctagccctgtgtgcacttactgcttctgaagagatgctatcataccaggttcttgtaagcatttatttttaatctccagttaataattcgtagaaatgcctttcacagaaacctttcaaggaagcagtttctattagtttgtataagtctttcatttttggagcttttgaaaaaaaagagatcctgtataggaagaaaatacggctcactgaccaggaaagccactttacaagagttcagaaaagcaagagttaaaagggcagtccccagagtgcaaggtctgtttacaaaggtttatgacttgggtgtgacttagtggttcaagcttcagggacctggagacacgtgagttgagcctgctggactggaccaggcagagctctgcatcgctgctgctgcgtagggccctgaccacagcttttaagagacctgaacaactctggaactcatggatgtggtcaactgcctgttcttccagtgtgtttgtgggccgcccctgcccatggctaaatctcaggtaggttctctggctggagtatatgtttaaagttctaagaacgggcctcttaatctatagtctttgcagtgaacctggacagtattttagaagtacaaaaactttgctgaaaataattttaaaaaagatgtagtttagaatggtgcacctatgagcagagagagtccttgcctggcttgcctgggtccgtccatagccaggtccccattggctttggaagggacctgtctttttgactgaggagcagcatttgaatgtgagctccaacccctaaaatgatcaacttcacttgatgttttatgattagattttgagatccctaagccattttggtgccctttagggtaccgcctctggcatcttcaggggaactgcaaacactgaagtccggttagggtggatttcactcttgctgcctgtattcagacagtaagtggctggcacagaggcccagcaggaacacatgcagggctgctttgcctgtgcctaccttgcccagcccctgtcacttcctggtatatttcttatttttggcatcagtaagaaaatacaagcagcatgttgcataagcacaaagcagcttctagctaataaaaaaaaaactgtgggtgggttgttttgttgttgtttttcttttttttaatgtttgtgagtagttagaccaccctatgcctctggttttgttctgcacacttctgttttttctagcaagttgtctctgtcacttttaagtgactttatataaatagatttatgcttactgtgtatttgagttgcctatgtcattcaagttagtaatttgtttcagtcccccataataatccgattttcataaattataataactttatgatctttctctttatcccatggtgatgttaggtaggatagaaacatatatattgcctcctgagtgtgcgcagttcacagaagaattcctctgatgggtggtggggatctgaagtaggagggaaggaagttgagtgggaatgagtcttttataaggaataggccggtaggagagtaacccaggaaaaccagggctctttccccctccccagcagtcagtgtaagaaaataggactgggagggggcctgaggaccatgggatttatcggggagaccgttgcagccaggtcagaatgaagaagctgattagagtgtctctcaattccagtatagtaaaactttctcaaacaagccagtggcataattaataacacgagacttctgttatagtttaaagcttaggtcttttgcttggacagtctcccagctaccttagctaacttaccctgactgtctagcccacagcctgccatgtggctagctctgtcccattctctgctctgctccaatacacgtctgttcttttccatgttagctgttgagtctcccacttctctttctttgccctgcgtccttctctctctggaagttctgccccctacttcctgcccaagcttttggctgtcagctctttattgtatccagtcagtagcgagacaacctctgatatgttatagatacattacatcacctgttctaggcagataaggaaggccaagcacttgcatatagaaaacctggtgacaggccacaggaatggcaatatcagaatcctgccagcacttttgaacatacactggagcgccttcacgcagagcaagaaaaggtcactcctagcattctagccgctgtgttagcacaggtctagttggctgatgagctgtacttatttatggggtttagaattttaatttaatacacgtatgctatatctttttttcttttgagttgtgagtctcactgtgtgactcagaccggccttaaactctgctataatcttagtgaacactcaaacatgccagactggaaattaaacaagccttctttttaggactctgtttttactggcatgaagtttctcttcccgggcctccaccatttaacttccttctggcccagaatctctcctggacagagtagggccagactgcctcggattactgtgtcatcctttggccacctgcctttgacagccacccacactgcctgctctgctgccatctctggcttcctgtgtaggctttttctgcctactcagcgtatcccagcaccctcccccaacctgtggcttcataccctgtttgacttgtgtttttaaaaacatgaatagagacaagccagatggtagcacttgcctgtaatctcagcacttggaggtctggggcaggaagattgcctcaagacagacaaacagacacacacacacacagacagacacacacatacacacattattgggctgggaacttgaagttcaggcttggcgcagagtagctgttgtgcctgatgctgacaactatggccagtctctggaccagcccagtccttcctgcgtccagattttggggtctgtcaagtagacgggtacctattttccaggcagggcaagccctgaggatgctctgtggctggctatctttgtagagtgatgactgagtttacctgctaaggcctatcctgcctatcttcctaacaggcatttcggtcacttgcctgaggttactcatccagcccctggccctcacagggatggatatggaagtctgcctaattccaaactgcatgttttcctgattgcttttgagacggtatatgagcctgggtgggccttgtggcccacaactgcttacacagggatggcagggaataggttagagttcagagccagtctgggatccatagcaaaattctggcctccttccttccactaaagatggaaaacttatttgaagaattagaggtggtgggagtctagcttggtggtaacacttggtggagtgcttgctcagcacacagaaggcgttagctttgattccgggatctctatcaaaaaagtgttgcctcttttagagtcacagaatccactgtcctcttgtctctgtctcccaagcaccgagattgctgcatggaccaccgtgctcagctgagggtcatagaatatgggattgtgtaatttatccagtctgagagccaaggttagccttgacttgtccaagcctacacagtgtttgtagtctgatagttcaggaactctacctagctcagggtactcccatcagactggctgtggtgatggtggtggtcagggtgtcctcaaatgttgagcctctcagccctggatataatctcattgtaccttctaagtgtcactagcatccacactgaaagaagatgtagatcttgttacacatttaacttattatatggtcacttctggctgctgtggctaacctcctgctccgaagcatatttggggaacgtctaccttagtcgtatattcatttttattattgtagacctgctggcattcttaatgtctcactgtaacttgtcttggtcccccaaagatctctgaaactgcagagttaattcagtctggagtaaagttcggctcatttaatccacggttgattgtgtcctcgctgtctatagctctgcagagtgggaggggacagcaggcatctgctccgttgtcacacctgcctggatctctgagctcactcagcctgttcatttgcaaaggtcctggtgactgaggatgactggccgcagggctcagccctggaggaggagcagaatgaggcgcctcgaatctccaggaggaggtggggctcgggacgccgcacccggccacgaccactgtctgactatggccagctggccggcagaagcttgtccattcctgaagatgccattgctgcagaccctccagatgaggaccacgtggacaggatgcacccagcaagtgtgactaccaccagccaggatccatgcgccccctcaggctcttgcaggggaggccggagaaggcgacctatatctgtgattggaggggtcagcttctatggcaacacccaggtagaggatgtggagaacctcttggtccaagtaagagctggtttcttcaaccatggccagcagagacgctcagctccctgcctctgtcctccctgcagactaaactggacactgcttttccttctggagggggacatacctcctcactccttttcttcctgactttgaaacctacttggatccacactaacagtccgctctctcatcatctgctttctattctcctttcctggagcctcagctcacagcacagacttgccattagtctgaaaagccctgagacctgagccggggggggccatagcctggctttatctggtttacttcctgaggggagtgattttcgaaagacttaagtggtccgttattagaatgcaaacataggaacaaagtaaagatgaaagagaagggactggggtggggggttggcggggtggatgtagctcagtgatagcatttgtcttcatgcaggaagacctgtgttcctcccatccatcccccaaaacaaagcagaggaccatgagaggagaactaacttctctgtcttctaaaatcacgtctgtccccagtgattaatcaccaaccattcctagaacggacccaggctcggaacatcctgggcgagctctctaccataaagcaacaccaccttgccttgttctgcttttgggttgcaggttagaccatcaacaccattggcccccagcacatctggcaaggatttcttaagtgcctagtgagcactttaaggttatggaatattcatgtaaaggctctatcttggtgaaagtcaaactttctgttgcttagctgtgccaactaacctcatgagcatactcatacggtcatggaatagtttatataataacttatatgctcagtttcatattgaaaacctgcgaggtgctttcttaaattacctgtaaaattctctggggcgggggtggggggagaaattctatattgggcttgggctgtgtgttaaagtttttcctgccaagctcagcacaatgtcctgcttgtagcaaacactctaaaacccttgcttaagtcagttgagttgaattcttcaagtaaagttataaggccagtgtggtggcacacagctgtgaccccagctcttgtgagaaggaagtggggggggggtgaggaattcaagtccgttcagccaagggagactattgtgggttatgagaccatgcctcagagacaagcaaaagacacaagcaaaagtgaagttaaagatatgacaaggtctttaagatccttttgttttcaggtgctccacttgttgggaaatatttctaactaaactaaagcaaactgtaatgtatctaaatgcaaggcacagttgaggcaaggatagtcagagatacttagaacacactttgtttcggatcgtcaaaatagtattgtgccccagacatggtgcttgtgcctataattctagaattcaggatgctgaggcagagaacttgggggattgaggccagcctggtctacaaagtgagaccctagtatacaccctaaaaagcccaggaggggagacagctcattagtaggggagacagttcttattcctcttatagaacacccatatgaagcagctcacttacacctttaactgcagtacaaagggatcagacaccctctttgggcctctgcaggtacccactcatatgtctgtctgtctctgtctctctgtctctctctccccctctctctcatacacccaaactatgtaagataaaaaacaattttagtgaattatttattttaactttatgagcattggtgttttgcttgcatgtatgccagtgtgagggtgtcagatcccctgggactggagttacaaatagttgtgagctgccatgtaggtgctaggaattaaatccaggtcctctggtagaacagctagcactcttaatcctgagcctcctctccagcctcctaaataagttctttttaaataaaagctgtcactggagatctgtgaccatgcctgtgtgctgtggtcctgcccttgcatcctcggatgctgctatggtcaccgtgctttcctaactgtcgctcacagctctgctgctgcctcagccttcctctccctcagaggcctctctttctctccctgttccccaccggcatgtctctcacaagtaggaagaagtgtgacagagccagctttgaagctgcctgttggaactttagaacagcctattgctacagagcttggtgcagcatacagctgctggcgggggtttgaagaagacactccacatctgccagtggcttcaaggcgagaacacagaactgttttgtggctcgcaggagctgagacttcctggcaccttctcacagcttctcacttcctttcacagccagcagccaggcctcctgtgcctgcacaccaagttccaccctacaaggctgtgtctgcccgcctccggcccttcaccttctctcagagcactcccatcgggctggaccgcgtggggcggcgacggcagatgaaaacatccaatggtgagtcttggggcttcctggaatcttttgtctgggaccagggagcctgaggcaccaagggattctgcacttttcccatcttgtggccagggcagtgtggaagttattatctgggttactcaggatttcaaactcctgtcaagtctgcatgtctcttgagttgctgcagagccatgccagggtaaaccgatgaccaggctagagacctaaggttctggtgtggagggtagttttttggttttttgaggatgcaggaatggggagctgaacctcgcctggcttctgccagcctcagggctccctggctggcccatgcagcctgtctccacctgcacactctgtgacattcgccctgttgcaaatgtgccttcttttgtaaggacatccgtctcaagtgggccccttccccaccccaaggccctcatcctaactcgccacctgcaaagaccgtgtttccatctaggtcacaattaggggtctggagcagggatgccaccatcatttgggggttcaggtcaatcaaaagtgctttagcgaattgtcccgatgtctatcatgcctgcatgtgctcagataccaacaaggatcagaaaggcatggaaaacactaggttatgaggaacagagggggtctctcctcagccttcacatacagccaagaagcctgtttcatggtctatgtgactttttttttttaatttataaagaaaaacagagacaaacctcttagggttctttgtttgaaaacagtaaaactaactgactagtttaagaaaaaagggtgttggggtgcattcatttggtggggtgctggcccagcactcacaaagccctgagcttaaaccctaatgtaaaacggcgcagagtggaacatgccgggagtctcagtacttgggagatggaagcaggaaaaccagaagttcagggtcctcctcagttacaagtgtggggctaacttgggctacgtgagactctgaattgaaaggaaaaagaaaagatggcgtggtggtacacgcctttaaccccaacacttagacagatctttgagtttatggccggtctgatctatagagctagttctagaacagccggggctatacagaaaagcctcatctagaaaaaccatagagggagagagggagaaaaaaaggggggaatgaattaggaaggtgttgggtgctcccatataaaacattgaggataatacgatagctcctggtagtcacagaaggttgggcatggttccaccaggagaaggggaaaggctagcctgccctactctactctccagttgtacttgcaagagtcaggatcccaggagggaatctccagccacttgagcccagtggcctgttcatggtgtaggtggtggggcaaggtcaaggtctgggagtccgtttgtgggctccgcatttggacaggggtttagccccctgccgtcagtgttagtacaggagaagggtaggcctcgctcccagaggtgacacccagaggtgacagagctcctccatcccttaaagctctgtgagaggggaatgattggcagggaactgttggctaggacaggggcatcgtgaaggagaagacagcaaggtggggtatgcccatggccaaacctacactgctatacctataccatttacacagttaatccactggaaatagtgagaagagttatatcttcaatgaatatgcccagactcctctccgttgagcatgaacccagggtctcacatgctccgtgttccagctccacccttttcatgacctacgcactagacttgagcaagtgtgcacatgctgtttacattgtacaagttttgtgagtcatctagagatgattgcgagtattcaggagaatgtatatgttatgtgttaaggcaactattttaagtaaaggggcttgagtatccacagaggagcttgtcatccaaaggaccctcggatacagaggggtactgtacactccagcatttgaatggcttcctggtaggattccctaagtcactagtgctcgcaagaaaatgaggaggggtgggggaggacaggaaggggcaggagtgaccctgagtagtcaccagaacctgggtgatgaggaagagtgagtgaggtcccctggagcagcagcagatgttccaccaaggttagcaaggagatcagagtgactgtgctcaggagacatggacagaagagggcactgtggtcaggggtagtagctaaatggaaggcaactcattcctgaggaccagggcttctgagtacgatgtggacccattgccaattggaaaatggtgggttcaagtttgtgctccaattaaaaacaagacagagctggatgtggtagaacacccctttaatcccagccctaggaaggcagaggcaggtggatcggagcttggggacaccctggtgtacagagcaagttccaggacagccaggacaacacagagaaatcctgtcttgaaaaacaaaagaaaagcaaaacctctttgtgtgtgtgtgtgtgtgtgtgtgtgtgtgtgtgtgtgtgttgagcgtctgagggcacagatatgtcataggatgtctagggcggtggctcctgatttgtgctttggaagggagaatggcctatgtatgtggtggtgcaatgtctgtaatctcaggaggccaagttagccaaattagcttgggcctcactgtgatttccaggttcgcctgaaaatcctaaagatgaataaaaaagattaaaatcagagagaacgaaggaacaaagcacgtatagtagcttggagtaaggcaaacaaagagaagatggatatgaggctgctctatgagtcctaccgagtatcctcagtgttagtgaccacaaaggccacccacagttcccacgggtgttcatttccctgacgcaagaggaactcgaaatgactagctccggctttgtctgactctgtggctagaactgggatgtgccatggaaggacttcttttggagatgaaattccgttttgccagagcagtgcttctgggaggaaaatgttttgcaagtgcgctgtggagtaagagagtagctgcttctgtgtttacccatggtttccagctgtggcttagcatccctcggtgacatgagtcacaggttcacagcatgtgcccctgcagggtatcatggcagcaccagggtgtgtccccgggtttcctaggcaattgagttacattgaggtggtgttagatgtgacccagtcactgggaagttctaggtggcatctaggagatgccatggctgtctgggagcctctggtgaggccagagaggggcatgaataatctgtgtccagcacaagtggctttttcagggaggacaaatcattgcccacttcttttataaaaatgtccattgtaataagcttaccacaagtagctatctggttcctacagagaactgtatcattaaccctgatgagggcaggccctgtggtctagctcagactggacatcctttctgcagccatggcctggtgggtgttttgtttcatcctgagtccactgcatcaagataagtagagaaggggctgcagagatggctcagcggttaagagcactgactactcttccaaaggtcctgagttcaattcccagcaaccacatggtgactcacaaccatctgtaatgggatctgatgccctcttctggagtgcatggagacagctacagtgtacttacatataataaataaataagtctttttttaaaaagtacagaagatgagccaatgtgtgcaccgtgagcatcatgcccatgtggctattaagcagcatcttttgcatttcactttgtaagcttttcagggtcttctgatatgtctttcatacccttggccccataccaaggcatagtcaccttctgctctcccctccttcctctagctatccagtcaagccatcggctctccagcatgcatgcttgcaagctcactctctctaaagagttaaaaagcaattcttccacagagagtgactctgtcctgggtggaggtaaatgagagaagcctgtcagcagcaaaaggactagagtttctgtgcaaagatgacctgctccttctcgatgcaggagtctgggtttccctgtcacaatggctgatgcacagattttctgcttcattagtcaaatgatctcttaatgttagggaccccaagatcagggaggcataaccagagacttcatgggtcaggttatgaccttcctgcccaacacagcaactacctaacaggtgcttgcttcacttgcatagccttttgggtctccatggcaactaaagcatctctggtttaaatgcctaatggtccatagcttctagaagctgccaacatgctcacttgctgacttgtggctcctgatagaccatttcctacctcactgcctagttagagaacctttctttctagatgctaagatgttatattagttacttttatgatgcaatgataaaataagcaatttatggaagtttgttatggcttactgttctagagggataagagtccagcctgagagatgtgggagattgggggttgggggcaagcttggcagcaagcagcatccatggcagcaggagcaggaagctgacagctcagatcttcaaacacaaagtagagtgaattggaactggggcaaggcagttaactcaggctttgcccatgctgtacttcctcgaacaaggctacaccatcttctcaaatagtacgaccaactgggcaccaagttcttcaagaacatgagcctatgagtgaacactgtccattctaaccactacattccactacctggcccctgtagactcacaatcatatcaaatgcaaaatgcgtatggccccaaagtcctttagtctaagcactgtttaaaagtccaagttcaaagtctctttggggagtcaagggttttgggttttttgttgttgttgttttgttttttgtttttttcaagacagggattctctgggtagtcctggaacttactctgtagaccatacagagatccagctgcccctgcctccaagtgttggggttaaaggtatgtgccatcaccacttggcttcaaggtaatctctttatgtgatttttaaaaaatatttctttattattatatctaagtacactgtagctatcttcagacacaccagaagagggcatcagatctcattatggatggttgtgagccaccatgtggttgctgggatttgaactcaggaccttcggaagagcagtcagtgctcttaacccctgagccatctctccagccctcaaggtaatctcttaactgtgaccttacacacacacacacacacacacacacacacacacacacacacacacacacaagcaaagtagacagtttcaacagatagtggcacagaaggtccattctgtgctggttagttttgccagcttgacacaaacctagacatagctgggaagaggaattgagaaaatgcctccgtaagattcacctgcaggcaagtctgtaaggtattcactgtaggcaatgctgtccctgtgcaggtcctagatggtataaggaagcaggctgagcaaactctaaggagcaaaccagtaagcagcaccctccatggcctctgccagttccttcttccaagttccttccttgacttctctggctgatgggctagaaactataagacgaaataaatcctttcctcctcaagttgcttttggtcatgatgttttatcacggcaatagaaaccctaatgaaggcaaatgtccattccaggaggaaggatttggggatagagggaactcctggactgcttaggatgacttaccgtcttcactttgctgctgtggcatactgttgggcagaatcctctcccttgcgtgcagctctccttgggtgatggatgcctcatactctggcatcgccaacatctggaggtctccacagcaacctagtcttcaccatcccagcgtcacccagtggcctctcacagcctccctccttctcagttacttcacgcagggactccctgccacacacagcctggcttcagtggtcctctgaagctggggaggaagactctgtgaccctcttcacacttgcattccccactcctcaaaatccagcactgtgtgggcagcaccttcaggttcctgtcagcttgggatggagcctggccccctcaagccacttttgcagatggctttgctttattgttcctttttaggaacaggaaaaaaaacggtttaggtctttctctttcccttgttggtagctttcagacagtgatgtcttgccttgagggcacagctctctgcattccagtgaggagcctgagggctctcctgggtggagctaatctccgtaagagtcccagtctctcttagcttgagcctagctcgcaaccttaaacctaaccagtgtttccctcttcagacttcatttgatgtatttctgtcacacttgctccttcttcattgtaggctgcacgtgcattagtcgtgctaaccacaccacagactctatgttacgtcgtcttgaaattttctccagcaaataaacgagtccattacgtttaaatttaccctcaggcaaattcttaggaccagagtagaaggcagccatgtttgttgttcatatcgatgaaaagcctctagttcagttgctgttaaagttcttgctgctctctgagaccacgtgagctgagcttctatgtcctctttgatgtcagcactcctatgaggacagaccaccaagctctgcctgctgcatccaatgcttttctagtccagagtcttctcatgtcttaccctacaccccaagtccacatgctcaggttctctagaatccccccattcttggtatcaagttctgtttctgggataaaataccatgaccaacagcaacttacagaagaaagctatacaagatgcagagacacatggacttgtgtcagatcttgggggagggctgggccatctaaatgccttctaagaaacagttagaggttaacgtctaggtatggcttctcttagtggaagagttggagagagaaggcaacagagtgtgatgggcaacggatgatgagaaagcttgtttacagtcctgtgtgaaatgnnnnnnnnnnnnnnnnnnnncaattctttacttgggttctgcgagtctgactcaggtcccaaggcttctcagttaagaactttactgactgagatgtcccccagaagctcctagtttaagtcattgtgtatatgtgtgtgtatgtgtatgtatgtatgtgtgtgtgtatatatgtatatataaatacatattttttccataaagttaaataaaagatttgtttttatatgctccagaaaagttgatgagaaacagttgagataaaatttaagaaatattctcctctgtgaatgcttaaatttcctcctccctggttgagtgtgtcagaatctgcagaagaagaggtagccatgctcagtggtagagcatatacttagggtatgcgaggcttcatcccagtcaccaaggaaaagagaaaagagtatctgcctatggctgcagttttctcaagatctagagatgtgaatgctattattccacttttctctttcctgttgttgctgttgttggacgtggttttgtttgaacctaagctgttctcaacctcgcgatccttctctttgtgcctctcaagggctgggattataactgtgcatgactacacccagctaacgaactcactttcattcttcctttctttttctttcaagagacatctgtgcagagcgggagagatggcttaggggtttagagcactggttgctcttccagaggtcctgagttcaattcccacaaccatctgtaatgagatctggtgcccttttctggcatgcaggcataacactgtgtacataaataagtcttagaagaaagaaagacgcatctgtgctttcttagtgaaatggtctcttttctcaagtttgccatagtgtgctctgcgtgtgaaggaaagccatgtgggcagtcctgagaaccgcctttagtaacttgggtgtggtgttggtgataactgaggaaggctgataatcactgtggcacttaccagtgtctttataaaagtccattggcaaaacgttgtgggcagctgggtgtggtagtgcaagcctgcaattgagcatttaggaggctaaggtatgagtttaaggaatttaaggctggtgtgagccaaagagttacgctaagttccaggccttgagcgtgcttcttaggcagtgctctgtcacggaccgacattcccaaccctttaattaactaattttcactttgagtgtctccctaagttttctagtgtagaaattattcctggttctgcctcccagccccatgctcccagaattaagactcagactcaacatagatttaccaataccgtggccatatagctaggctctactctgactagatataactagagataacccatttactttaacctacattctgccatgtggacagtaccatgcgtccatctcatcacatcttcctggtgaatcttaccaccctggctctatcccagaatcctttctctctcctggatgtcccacctccatttcctgcctaagccatgggccgtaggcattttaaattgacaggtgatccatacaatacacaagatattctctctctatcctaggctagccttgaactcactgtgtatcctggacaggctttaaatttaacatcatcttgcttcagagttctaattgctaagatatagccatatgnnnnnnnnnnnnnnnnnnnngggttctgtcctcagatcactctaattaagtaagtcagtaaagcttcagttagtcagtacagtgtgttaaggcactactccttagtaataacaagaagtaacaagaagacagggatgagcttggttagctacaataacaacaactagagaaaaacatctctcctggaggcgagtacaacttttgtccattttctcacttgtctgtgtggttaccagggattgaactcggttgtcaggcttgacggcaagtgtgtttacctgttgagataggcctctctctctctctctctgtgtagcccaggccttctcaaactatatagctcagattggcctcagattgacaacaatcctcctgctttaacgtcccatcccaaatgatggaattacaggtgtgagccacacacccactgtgaattgactttttatggttttataaaatccttctaacatacttgaataattgctcattacttaattacatttgtgtgtgtgtgtgtgtgtgtgtgtgtgtgtgtgtgtgtgtgtgtgtgtgtctaccatcactccaagttaagaaagaacatcaaatcaactttgtctagattcctagtgtaccactctggacccgtcagtcttcttcagaagaccacgaatttctaacaatgttgtcatcaccatccaaatagaagcaactgcaatttcattcgtcccctgccacaacccctgcccaggttccaaaccagggccttgcctatcccatggctgtaccactgagccatgtccagcctttcaactccagtgcttccaaggcctgatacagataaagaacaactttatctacaaaggatacgtgggtaagatcacagctgtccttccttacctgtgtgatccacacttgcagaacaaatctcaggtaaaaatatttggaagaaaaattgcagaaactcagtagattgaatataaactttgccctcgttaccctgcacatagcccagcgtgacgtcatttcacaccgtgtttacatggttttgnnnnnnnnnnnnnnnnnnnnctgtagctgtcttcagatgcaccagaagagggcgtcagatctcattatggatggttgtgagccaccatgtggttgctgggatttgaactcaggaccttcggaagagcagtcggtgctcttaaccatctctctagcccctgggaattctttacataggttctgcgagtctgactcaggtctcaaggcttcccagttaaaaactttactgactgagatgtcccccagaagctcctagtttaagtcattgtatatatgtgtgtgtatgtgtatgtatgtgtgtgtgtgtatgtatatataaataaatatttttccataaagttaaataaaagatttgtttttatatactccggaaaagttgatgagaaacagttgagataaaatttaagaaatactctcctctgtgaatgcttaaatttcctcctccctggttgagtgtgtcagaatctgcagaagaagaggtagccatgctcagtggtagagcagatacttagggtgtgcgaggcttcatcccagtcaccaaggaaaagagaaaagaatatctgcctatggctgcagttttttcaagatctagagatgtgaatgctattattccacttttctctttcctgttgttgctgttgttggacgtggttttgtttgaacctaagctgatctcaaccccgagatccttctctttgtgcctctcaagggctgggattataactgtgcatgactacacccagctaacgaactcactttcattcttcctttctttttctttcaagagacatctgtgcagagcaggagagatggcttaggggtttagagcactggttgctcttccagaggtcctgagttcaattcctagcaaccacatggtggcccacaaccatctgtaatgagatctggtgcccttttctggcatgcaggcatataggcaggcatagcactgtgtacataaataagtcttagaagaaagaaagacgcatctgtgctttcttagtgaaatggtctcttttctcaagtttgccatagtgtgctgtgctatctggatagatgacagtctgcgtgtgaaggaaagccatgtgggcagtcctgagaaccgcctttagtaacttgggtgtggtgttggtgataactgaggaaggctgataatcactgtggcacttaccagtgtctttataaaagtccattggcaaaacgatgtgggcagctgggtgtggtagtgcaagcctgcaattgagcatttaggaggctaaggtatgagtttaaggaatttaaggctggtgtgagccaaagagttacgctaagttccaggccttgagcgtgcttcttaggcagtgctctgtcacggaccgacattcccaaccctttaattaactaattttcactttgagtgtctccctaagttttctagtgtagaaattattcctggttctgcctcccagccccatgctcccagaattaagactcagactcaacatagatttaccaataccgtggccatatagctaggctctactctgactagatataactagagataacccatttactttaacctacattctgccatgtggatgcttacctgtgctcagtaccatgcgtccatctcatcacatcttcctggtgaatcttcccaccctggctctatcccagaatcctttctctctcctggatgtcccacctccatttcctgcctaagccatgggccgtaggcattttaaattgacaggtgatgcatccatacaatacacaagatattctctctctatcctaggctagccttgaactcactgtgtatcctggacagnnnnnnnnnnnnnnnnnnnnaaatcaactttgtctagattcctagtgtaccactctggacccgtcagtcttcttcagaagaccacgaatttctaacaatgttgtcatcaccatccaaatagaagcaactgcaatttcattcgtcccctgccacaacccctgcccaggttccaaaccagggccttgcctatcccatggctgtaccactgagccatgtccagcctttcaactccagtgcttccaaggcctgatacagataaagaacaactttatctacaaaggatacgtgggtaagatcacagctgtccttccttacctgtgtgatccacacttgcagaacaaatctcaggtaaaaatatttggaagaaaaattgcagaaactcagtagattgaatataaactttgccctcgttaccctgcacatagcccagcgtgacgtcatttcacaccgtgtttacatggttttgggtcttgcaagtgtactaagaatgattaaaatctgggagagaaagtgtatttgtataacttctgtcttagggatttgggcatcccagggggctggaaatcagcccaaggcagatgtggagggagctggccaactgtcagtgaggcacaccagcacagccaatgactggtgcgaaggatggagctttggaaacctgctctgaagttttcacacacacacacacacacacacacacacacacacacacacacacacacaaatcccagccacatggtagctcataactatctgtaatgagacctgactcttctgctgtgtctgaagacagcgacagtgtacccacatacatgaaataaataaatctttaaaaaaaaaagatttacgggggctggtgagatggctcagcgggtaagagcacccgactgctcttccgaaggtcaggagttcaaatcccagcaaccacatggtggctcacaaccatccgtaacgagatctgactccctcttctggagtgtctgaagacagctacagtgtacttacatataataaataaataaatttaaaaaaaaaaaaaaaagatttacattctcaacataaagttctttattctattgttttggttggttggttggttggtttagatttttttgaggcagcatctctggagcccaactagcctagaactcaggccagcctgggatttaaggcaaccttccagcttctcccttctgagtgcgggaattatgactgtgtaactcacattgctcagtgatttaaaaagagaaagtaaaaaagaagagtgtgtaagaactgtttttaaatttatttttttctttattttcttttcattttatgtgtatatgtgtgtatgcacctgtgtgtatgcacatgtgtgcatatatgtatgtatgtgcacatatgcatatgggcatgtgcgtgtgattgcaggtacccgaggaggccaaaggcatgtggcctcttagaactggagttgtgggcaagcagttctgagccttgggacatagttgctgagtatcatatcaggtccttggcaagagcagtacactgtaggagctcaagggatgaaagtcacccgatgggggcacttaggggggtctgaaaacactagcattccctcaggggttccactggctaactacctagtcaactttccagcctttggggagcgttttaaaaaaacatgctgcttttcgtacagttgacgcagcggtttccccactataataacctatgtgggaaaacttgccaggagcatttgtcagggccaagaggatggtcagaagaggtagctgggaggtcctgtgccatctttctatgtgggccctgtggatgggtcaaagtggtcctgggcgtggcttctggccagcagctagagtctggcttggagctcctcccaaactgccgggagccgaaatcttggggtggggtgctctgcagggctgcgtaggcttagagccacccaactagtgggcactctgaaaacactagcttccctttgggggttctcctgttccctccctgtcctgcctctccctgggccccgcccccccgcccacctggccctacccccacacagctgccaagcatctgcccagcgcctcccttgtttgcatcatctgctaaacatttacttcgcagattaaagcctggtgtatctaagtaagaaaatgtaccgagtccttcccagagtttaagggccaatagtttcaaaattcaatcgaataaacacagggacactcccagacttcctcatttgatagtgaaatgtacacctaactcagaagcacaaagatttacgaacatatttactttcttctccctaacaaggagctggtatcagttgtaagaacaccttcatattagttcagtgtttgggttgtttgttgtgttttttgaggtggggtctcactatgctgccctggcacagcttggtgcctggcactggttttcggtttgctatgattaattggtaggtttggaacttttaggagctgctgtctgactgtctgtgaaggcctttctgttgtcgtctctgcaagtgccctggctgttctaagactgtctgggttgaactggtttattctattttgtggtgtaacggtcttctgcttcctgtagctggggaggaacaccaagccatactcaaggggcctgggatagagatcagggataggcctttagttttgtttgtttctccatctgtcttacttggatgccattttcttcctttctcttttgttttgtttgttcataagttagactttaaatgtgcagtggctttaaagaaacttctttaaaaaaaaaataatgaggcatggtgatacacacctgtagcctagcaattgggaactagaaccaggaagatgagggattctaaggtatccttggctacagagcctgagactacatcaggcaatgtatgacctgccccaagtacatatagggaagatacatcatatacatctatgacattatcaaagaataatcaaatattaacagaatgaataaaagcaggcatgattgcttatatctgtaatctcagcactgggagattacagctgtaatcaccacctgaggcagggagattgtaatgggttcaaatggacctgggctacaaagtgagtttcaggctaattccagggacagtataagactctggaggtgggggagcctggggagatggctaagtgggtaaagtgcttgctgaggaaatacgaggatctgaatttcaaattcctagaatcactgtaacatttggggagtggtgtcacacacacacacacacacacacacctctgaccccagtgctcctacgggaagataggaaatggaacaggagagaccccgaaagcttatgggtcagttgtcctggcctccatggagggaaaacaagagaacctgtcactaaaccaggtgtaagggtggaagtgacacccagagtttcctctgacctttgtccacattggtactttgtcatgtacagtgtgtgtgtgtgtgtgtgtgtgtgtgtgtgtgtgtgtgtgtgaaagagaggcagagagagagagagagagagagagagagagagagagagagatttttaaactctgtccctactctaaatgagatcccttgtcataggtagttcgttttgtgtctatgtgataaaaaacaaaaccaaaagtgtgtgtgtgtgtgtgtgtggggggggggtgacgagtaattggatgccatggtcctgagcagaaattagagtgttttggttaagtgttttaagaagatgggtgggtcaggaaaagggggtggatctgggaggagttggagagggagtgtgatcaaacccgcgtgtaagagtctccaagagctactataaaaatgagaagaagagggagaaaatcgggtgtctgtacttgagtggccgcaccagtgtctctggattcactgctgtgctaaggcgccagaacttcaagtcataactgacccatcatggtgtggattgggcaagaaggcttgtgcacaggaagagctctgtcctttgtcaccggtgtggatgaaggtgaacagctgcaccttgactgttcgcagctgagccacttatgatgcaagtctgtgtgggtcagtgtctgtgacttcctcctggaaggtgggaggttaggtatcccaaattgttcctggtgggaagagctgagtttaaatagccctgaggctttgtcagggggaggcgcttagaggccggggtaaacctgagattcaggtaccagaggagggagggactgggcagcctggaactgctctggggttggagctggagtgaggcagtcagatttgcgtctctgctgtcctggggcaaggttgtggagtgaaaagtgttcccttactaggttgccttatagctcaaaagtaggaaagatggaagtaggactgccgggagtgaagagcgggaagtctagcaaattgcctggatgctgttggcaagggaggagtccatgatgacagtgatgccagggtgacagggagcaggttcccagccctgtgggcggaactggggccctcagctccgactttattaagccccagatcacaaggctgtggagggagagagggacccgggctaaaggtaaggattttctggactgggtttgggggtgaaggaggggggcaggaaaagacagtcacaaagatagcaaatagttgggataagtagatctctaggagcttggaggagctccttggtgcaaaggagattgagcccccgttcccagtgcctgtagtttccaggtactcaaaaggctgaggcgggaagatggctggaacccaggcattgacacaccacagggaaactgcatttcaagaaaaaggtcgtctacaaagtgagttccaggacagccagggctatacagagaaaccctgtcttgaaaaaaccgaaaaaaaaaaaaagaagggagaaagaaaaaagaaagaagaaagaaaaaagaaaaaggaaaggtcaaatgctgacaaactggccagaataaaaacctgcacttatgtggctcagggtctggagcagcttggtgacctgagtaaaaagaacctttgggttctgcaggagagcaggacactgcagccagggaggggtcaggatgtcgccatcgcactagttgatatgatttgctgaacccatgtgatggtctcctcatcttatagctgaaaataccctataagtgccaagaatccatttgcaatgattaaagaaacttctaacccgtgggactgcatctgagagctcattaatgtgaacgtgctgatgttcacccttgctaaatggttttggtgcaagtaacagcatgcgcacgtatgagtccccgaggagagctgacccgggatgcccacggtcctagcttccctcctcagcaccaccaaatagaggcatgccttgatttagagttatgatgtaatctcctgataccctgagacatcatctccctggtctgtatttccataagatgtttatatattgattggccatttggcagacatgtccacttgagatttttgcctagttttcattttgtccgtgtgatattttttgttgctgaattgtgtgaatttagaaaataatatactctgggtattaatgcagctccccgtcttcccctaaaatgatgggatttactcagaggaacttgttccttgtgtcatgtttttatttgatttttttaatcttttttaaaaagatttatttattattatatctaagtacactgtagctatcttcagatgcaccagaaaagggcatcagatctcattacagatggttgtgagtcaccatgtggtcgctgggatttgaactcaggacctttggaagagcagtcagtgctcttaaccgctgagccatctctccagcccttatttaatttttcagttcaataaattgatatgtgagcgggtatagaagcatatttctttgcaaaggggtgtgtgtgtgtgtttgcgtgtgtgttactggggaccaaacactgcgtcctggccatgcttggcaaagcactcttcctgctgtgttacacccccccccccccacttcctgcaaagttctgtagcactggtggtccgcatccaggcactcaggaggctgaggcaggaggatcaggagttgaagggcagctggggctacctagcaagaccttctaaaacccaaagttaaatttagtacaagtctttggaaatatttttattacatttctttctctattttgtgtgcatgtgtcacggcatgcaggtggaggacagaggtgcaggagcctacctcgtaggtctcggaacccaagcaccttgagtcttgtgagcccttgaagttgttgggcaacacaatgatcatttgcccgccgttgccttagcggtgtgtgtatgttcaaaaatctgcttctagtattttgaaagtaatggatttatatattagttttcgtttttgttttttgttttagaaaacaggccacgtgtttctgtttttctttggtacagttagcagaatgaagcaatgcagttggggaggagaggagacttgcacggctgatctagcatcattctgacctaacctctgttggaacgattttctggtgaacagactgttgtctcaaaaagccaacataggatccccctcttccactgagtcctcctggccagggccaagttacttatctcagagtcttaaaccatccgtaaagagaactgacttaatctctgactcagagccagaaacctggcctggcacagtgtgagtaactatggtgatgacctaggaacatcccacaggggcgtgagcagtgagcctttcagcagcttattcgaccacacctgccagtggcccattctggacaagctgccctctctacagagtggcttagagctctgggtacgacactcagatatagctggagctaatttaaaatacgtatactcaggttattaggggaaatcttcactgaatcttttcctttgattcttgtgacccaaaacctgagtaaccacataattggccatgaatcacctaaaattttattatcccgagactccatttggcattttattagaacgaagggcaaaagagaaaggctgtgtccagtgcttgtggtgtgggtctcacatgtgtgggcagattcaggtaagtatgaaacacctttgtgactcctccaagtcatagctgttggcaaggcattgggatgcatgactgactgtcttagtatgccagagattatgagtttgagaccagcctgggctgaaaaatggttgcctagcatggctccgggaaatccttttggcttgatctgtaatatcattattattcaaggcgtgcgtgcttttatttctttctttgttgttttttaaagtatttgtatgttgtgagcatacacctggaggtaagggcagaatgtgtgggatcctgggtctcatatggcttccagagatcaaatcaggaggccaggccctgtggtaggtgactttacccagtgagccagccgtcttgccagcctcatttgctgtcttgaggcagtctcactatgtatgaccccaggatggccctgaagttgccctcctgtctccaactcctaagccctagggttacagcgtgcccctccatacccaccctgctggagttacagcctgcctctcttggcacagcctgctcctgcactccctttatgctgctttttcaaaaattttcctggacagtcctagccagacagggtggtttacacctataatcccagacattagaacaccatgacagaactgccacaaattcaaagctagcccagactacagagtcaggtgggtgtgtcgggtgtgggagggggaggaaataggaaatctgatctgagttgcttaagcatctgaagagggtggcagtaactaggctgtaaggacagttggttaaggctgcgggtgaccccagctttgtcaggtgtagaggtcacgtgtcctagcccatcatccctttccctgccggccttatactgcataccaagggattatgtgtggtattggctgtacttaacttgtaaaagaggatgaatccgattgcttatctgcaggcacatccttgctgttagtgctttgctggctgctaagactggatagtagaatgctgtccccagttgggagatagtgtggattccacagagtcctaggaatccagaaattgtgctgcttcctttcaaagagaggattaggaacaggccataactgcctgaagcctgctgcctctaggctgagattctgtgggctctagtagccactcctagctggtatttcgtggcttatcgttgcccataatcaagggttttaaaaaggaacagagtgttctctctctgtctcagaaaaacatgataaagattttaactttttattatttttataaggtacagggtcttgcttttttatgtaacccaggccggcctgaaccctcactcctgcatcagcctccccagtgctggggttataaacatgcgctgctgtgtccagcccggaatttaaccctttgcagcaaactcatccatagcttcccatcttctagcacttcaaacagtctctgttttatgtctagtgtttgttccagtcactgtaaagtcgaatcgaaaaggagaaccatctcagaagaccgtgtgtttgatttccaagtttcggaaagtgacttttaaagaacagagaagattaaacaccctaggaaggacacacacacacacacagtcatggtccccatgactggattgatcttacagagaaggaacgggaggcctgagtgtgtgtgcttagggacttctgcctagctcagctgttccactgaagaagtctggagtagagcttgctggcacttaatccagatcacataggcatagggttttaagtaactggagagacactgaaaagaagataaagaagtcaagtgtatccttcatctgtaactggaggcagtccccctgcctcagatttctcttgtgctggaatgataggtgagagctactttaagccggcagatgctggcttacaattttactttcatttatttattttgaatgaatttgggctggtatttaaatgcctgagcccctgggagacatttcttattttaaccactatgttccactccctcacccctataatcatataatgcaatgtgctttcaatccaacttcaaggtctctcactgtctttcacaatctcagagctttttaaaagtccaaagtctcctctgagactgaagccatctcataaatacaccctctactaagatcaaaaaggaaattacatacttcaacatataatgaatgccacaaaatatatattaccattccaaaagggaggaatggggacatcgagggcaaagaatagaccatagcaagactgaaatccagcaaaacaaataccaaactctgtagctccatgtctggtgtcaaaggctttagatgtctgtacccctctagctacctacagtctctgtctcctcgtctcctcatacttccctcttcctctctcttcctttttctctcattctggctggtttcaccccctgtgtgtagctctcccccgcagatgtctcacaactctggcatcttcaacatctggagtctccgctgcacaccaggcttcatttcctcagcttcatacaatagcctctcacagcttcccaccctctcagccttcacgcagaggcctgtcttacatggctctctgaaactgaggaggaagaatgaatggccttcactcttaaacccttcatgcctctaaagccaccaccatgtggacaacactgccaagtttggctgccacttggaatggaccctgccccacttgaatctcattagcagcgactttttacacttttagtctcgaagagagctattttctatctttcagtttggctctcttaggctctctttcagtttggaaatttagttggatggggtcttgcctgaggacaccttttcctcttcccattgaggcgccttaggcttcttgttcatgctgttaacctaagattgcagccttatgctttggaaatgtctctccaaactgtagattgtgtaattttttttttattgtggatcttcataagcattctttaaaaagtaactctactacaaactcgatattaaacagtcttgacatgtccttcaccagagaaatagtccattacttttttaacttaacccagggaagttctcaggtcacaggcaaaagtcagccagattctttgccaaatgtcctatgagtagcttctagcccagttgatggtatctttcccctctgaagcatcttgcactgggctccatcatccatgtagctctcagcactgctgtctttctgctgagcatggctcacggcattcaaccacttttttagttcaacatcttccagaaaataacgtggctagcttcttcctcacatcagcagccctctttctggtcccactttctatattagttcattttctgttactcaataacacaaggcaacttagtgggaagaatttatttggcttatggtgccagaggggtgagtccagtcactgtggagagacatcgcctcaagcacggggcaggtcagtaggagtaggaggctgaagtaccacgtctccaaacacaaacacgaagcagagagagccaactggaaacaaacaggtgagactctgtactctgagagcccacccgcagtgacacattccatcagaaggatggcacctactaaaccttcctgaaaagcacctccaactagtgacccgagccttgaaatgcctgaatctctggggaatgtttctccttcaaaccttcaaacaagacctgtgccaccatgcctggctgactttcttttagtgtttgctatcagtatgtgagagatagatagatagatagatagatagatagatagatagatagatagatagataggtatgggtatgggtatgggtatgggtatggtatggtatgatatggatatggatatagatatagatatagatatagatatagatatagatatagtatgtgaatacattgtagctgcattcagacacaccagaagagggcatcggtcccattacagatggttgtgagccaccatatgggttctgagaactgaactcaggacctctggaaacgcagaaggacaagactttaattttcaccctgcttgagggttccccacccccgtcatccaccggcaaatgtaggctgtaatcctcatgtttttaaaaagccctaaagtcaaaccactttgttctgtgatcgcttcttcccctcagcctgtgtaggtgtgcacacacctgcgcaagtgtgtgtgcatgtggggaggccagaaaccaacactggatttcttcctcattctcttcactttatttttgagacggcatctctcattgcttggtctaggcctcacacatgcaaagcaagttcaccatccctgagccacactccttccagtcatacggcgtcttttaaaggaaagatttgaaactgacttggtcttgctttgcctttattttaggttgtttattttgttttgttttgttttaatgtgtatggctattttgcctgcatacatgtatgttaaccacatgtgcccatgatatccaagaggacatcagatccctgatcctggagttatagatggttgtgagacaccgtgtggatgctgggaattatacctggttatcagggaaagcaaccagttctctggaccactgagccaggtctcaagccccttgtctggttatttttttccttgtctggtttttaactaaatgaaatttatttccagttgttctggaggccaggagtttcagtgccaagctgccagcaccaagtgagggctctcctgctctcctgattgtatgatgaaatgtatcatgtgaccagagcaatggcctgtgtgatatgggatttttttttttggttgatatttgtttgagtttaacaatttcttatttatttgtgtacattggtgttttgcctgcatgtatgtccgtgtgagggtgtaagatcccctggaactggaattgcacacagttgtgagttgccatgtggtgctggaaattgaactcaggtccttttgggagaacagccagtgctcttaactgctgagccatctctccagccctatttacttatttttgaggcagggattctatcagtccaggctggtgtctaaatcactatgtgtctgaagatgaccctggtcttcctgcctcagcctactaaagtgagccatgactctgcccccctccagtccacctcccttgtgtgtgtgtgtgtgtgtgtgtgtgtgtgtgtgtattttactggtgattaaccccactttgcactgagctgtaccctaagctttggttccgttggactgatttattttgaggtaagctctcactaccacagatgcaggctagctttggactcactgttctccggagtgcagggtttatagacatgcaccacctgatctagcttgatgctgtgattctgcagggaacttgatgattctagggtccccagtattcacaagctgctgtggcccaggacagctaacctttatcagtgaccagggagatggcccaggtactgccaacactgggtcaaatctttcagacaaccaggggagggtcctgagtgcccagccgcccctccttagcatgtgaggaagcagaagccaggtggaaacttgctctagtctagtgaagacagcagcagtgtagtggttccctccggttttgaagcacaagctcacaattgccgttgtattttaccagctgcctttataaaaccctttttaacccatatgttgaggatggtcacgggaccggtggttttgtgcatattaactcgttattcataaagtttaaaagacagtgacttcctgtctagaagagatgaaggaagcacactgttgacagctgtgtggaaatgtaaaagagtagcctgctgattgcttatttgggaaatacagaaaagcatggcggaattaaaagtaactcacaccaatatttaagggaactgtttttacaacaaagcccatattttacctagtagtggatacaagtattactttcacaaagcatacacatacttgttatgtgtgtgtcttcatcggcttgcagtttttacacatatattttttttaaacaaaagtcccttctttagtgactccataaattatagttagttaacactatagtagcatcataactcagatttttggcattctatgctgtgaaatcctaaccccatctccaaacccagcaactctgtgctttcttctctgaaaccaacagctttgggaaagtgctctgcagggcgagagcagccccgggggctggagtgaggagtggcacttttccatcaccagggctgagctgccggcgcgctcagtggatttgtgttcgtttagaatttcctcccaaaagtcagcgcgtggtgatgtcgctggagtgactagacgaagcctgagtcacgggcgggcgggcagcaggctgttagtttctgggcagctctggccaggagagcacacagcagtcaagagttcccacagctgctagcctgaaccgcgggccaccctccaggatgagctgaagcccggcttccttggtcacaccctcaacctgctgtgtgtgtttaaacagaaggatggtagctagaggagaaatagcaagattttggagtctggaaagccttcacatgggtatgtgtgcgattctcctgtgggcagccttgctgactactctctttctacattcttcttcctcttctgccccccccccaaatctggtgtgagtggtgtggaggaaaagggggaatttcacttctcccatgagagggtccatcagagaaattgatcttgggtatgacagggcagtcagaataaatggtgtaaggagcaggtgaggaccgtctcttgtgagtgttgggatcgggtgtttgctactgtgattgttacaggggctgtttatgtttggtgaaatccctttctctaaaaaggagataacttgtgagcctgtgagtaggggtatacaagcgctcccttctgctctagggggagggggaagggctaaagctgaagaattggttttaaattcttactgtttggaaagtaatctggcctagttcagtttgtgcattgcgttcatctcactttactgatatttctttcattggtaattggaccagactctaaatgtgcaagaactgatcttctaggaagttacaaactataatccatgcactcctaaggaaataagagggggaggggaacttcacaggaagaattacccccctcctgcagatgctctaaaaacagatcttgtctttggtcttgccttaaatagatgccagaaccttgtgctgggatgaatgggaattgtagttgacagcttgaaggaaggcccagccggctgctgctttcttccttgtttggatagctttgctagctgagacaggacagggatatagatatggcttctgtctctggcaaactatccagcaagactagtgtgagtgaagggctcagtcacagcgctatcagacgtgacacagcagagtaaatccaggagggaggcacggggagactaagggatggtggtcctatcttcccgcagcctccttcaccttgccttgcctgttaagaagagtgctctccccatactaccccatgcgtagtactccagagtttttcatgaaggtttgccctttgggggaatgaatggatgggcacctagcctctgccgtgccactgtggagggacggatcgccagccagcctgcttcacttccttctcctgtgactccactcgagccatgagctcccaagaactgtttcagagtcttggcatactgtgtataagcacaagcaaaatcgtggcaagtggtatgatgccttgtcataataactgtccaaaataacggaagcccctgttggcaggttcctgcacagggcattctgagagggcaggagaggggtatgaaccccagggtcagctgctggatgcttatgccattcaggagcagtagatgtgacccccatgttttaattttcaggggtttttttgtctttttttaagattttatttatttatttattttatgtatatgatcatacactgtatctgtacagatagttgtgagccttcatctggttgttgggatttgaatttaggacctttgcttgctcaggtcagcccaactcgctccggcccaaagatttattattataattaagtacactgtagctgtcttcagatgtaccagaataggatgttgtgggtggttgtgagccaccatgtgtttgctgggatttgaactcaggacctttggaaaagcagtcagtgctcttacccgctgagccatctctccagccccccccccttctttaaggtgagatctcttagtccagtcagtctggtcctgaactcgggatcctcctgtctaaccctcctgaggcctgctggacttagaggcgtgggacaccaccacagctagttgacaccagcctgcagcaaggctggctgtagttgctgctttcttctcctggataaaagagtggagctgatgataattcaggacacttattagtgttgaataccatgcaggatacagctgagcaacccagcgtccctgagagattcctccagccagcaaggtggcaggaggacctggtcaggaagtagagggaatgcaggagggatgtaacccctcaagtgtcagtcagcaaggatggatgtggccagccgccaccaaaaccaggaaagtacagtggtggaacagctgactgaggagaccaggacatgccataggtaaagctaggagcttgcttgctacagggcagagagcagccagattcctcctggctgctggcccagggatgggcaccccggggtgccagctgcctaggcttcccatcccaactcctcctgtctggtcagtttacagatgagcgcagtgatccttagtgagcatggcagaactccaggcaagctgactacactgaggggagaatactcattggtagctttgatgacactgaaggcttactgagccgtctgtagaaaaatgaagccacttctagaagtttgtaatgattaggctcgattgtgatgcctctccctccagccagacacatgtcgagtgctcgtgagagctgcaggtggagaattgttctttttaaagaaccttagacattatagaggataatcaacaagggtgactatttctagggtctgtttgagtcttgttgttggtctgtagatgcaaagagaactatttttgaagaatggatttcaaggcagcaggacatgatactttacagtttatattccactgtgaacggtgtctcgtgcttcatttagttcagtctgcagcacacagtggctcacaaatgagttcctgtcttaacgtctgtgggacatagtcgtggacataactaaccgaaatagaatagcagtaatacggtttagaatgataaataaaccagttgtgtacatgtggacagtattttaaaagaggataagccaatgtaattgaggaaaatgcgtaataaattaaaaaaaaagagaggataagcctgtgcttctagcacgtggttatcgtaggggatcgaagcatagataagagacagttaggaaatcagggaaccatctactaacaagagacagttggcctttaagaatgatgcagaacgctgagctcttggggaaggagggagggagcaaaatgtctcccttcagaacaggaaccaggagcagtcctcagcagcagagccttccattgctgtataacctgtggtgtggtgtgtgtggtgtggtatgtgtgtgtgtggtgtgcagcgtcaggccatagacacacattgtagagcaggtccgtgggtgtgctgctgtgtgaggttaacctgaaggcccactgcctcaattctgtctgactccaaagccatctgagagacgtttggaaacacctctcagctcagtcctggctcagtggccggtaataaggtgagattttcacttttctaagccttctccaatgtggcagggagccatgcccttgagtgttgggggaccactggagaagagtggataaggcatgcctgcagctgtgtgggcattgctggttccctctgtggggaaggaggtggcctgagggtggctctctgggctgaggggctgggcccaccatcatctgtaaccacagctgccagactgtgaggccatttccgcttttgaggaggggaagctggaatagtttttctcagcctggaggaagtatagtgagcggcaggaaggtttctgaaatgtatgtttttaacagactgctctaagcaagggaatttcccccaaacaaagccttggggaaatccccacccggagggagggagctgccaggcagggaaagggcactgtgcattagcaagtctgtgggtgacagcctagcccttcccagctgtgccacctcctggcccagccctgaacactagctgaaaggctgggttcttctcaccttgctccacatccgcctcagacagtggggggtcaggggtgtttttctcagttacacaagagaaagcaaaggctcagagatcatggctttcccaaggtggcctctctgggactctgcagttcagtgcttttaagccctgtcactttgccacaataagccagccagaaagagactggtttgtttggagaagaaagccgcagcggacgtggggggtgggggtggggcagggtgggggaggggacaggacacttgtttttcagagaatagccaggaagggggtacaaagcatggctccggtactgatgcagtgtgaggtcatttcttgttgtcaaactcacctttagaatcagatgctccctcagaactgtgacgtctgagttcagagaagatggtctgctgatttcagtgttcctaaccgtcctgctagcctaggcattggcccattctccataggtagcacacggccctctgcacccattcctggggtcggtcctggtcctggctggctggctggagtttcacttctagaggccattgtgaaaggaacaggggaattgaacatgcagctgttgcccaaagggtggtggcttaccatggtggtccaacccggagcgtgctgaacccactgtgttgtgtatctgaaactggtgggctcttgaaaagtgttcttccagcattgtctctagctgacctcagcacacagatctgacagagggtaagggtagggactctcttagcttactcaaggccctgagttcaatccccacctgttcaaaatactgaaaagagaaaataaggggagtccttcctgattttggctaaagcttttagttagcaagtacttaggaatataattcgtctgctcttgtagtggatgggatcttagagtctgggatcttaaagtgactttggttttgagcagccccctctccatgtgtacaggattattttgctgagagagggagaattagtcttccccagggatgagctctgaaatgattatacaataccaggctgacagccctgtggtcagtgcacaggaacaacactaaacagactcagcaggttgtatttatatatttattcgtgtgtttgtgtgtgtgtgtgtgtgtgtgtgtgtgtgtgtgtgtgtaataataattaaagaaggccatgcgtttgagaggaagttggggcctgggaaggattaaagggcgtgggaagtgatgtaactatgtttttaattaacaaaaaagaatgtcacaaagagaaaaggtgtcttttccatacttggaattgtcaaccaaagaaaccctataggtagctgggcccttgtgcgttggcggtggggtaataaaatgctgtgtccaccttgaaaacaatatggaaactcccaaaatcttacaacagaacgagcaacatcaccactatcctgatcgagttcagaacccaaagaaccgaaagcggggcttctaagatgtggtgagcacactcgtgcagatggctgagaggtgggagcacctggtgtgctcagcacatggaagggggaacagagagggcggcacacgcagcctcaaggcagagggaactctgacttgggcagcatggaaggaccatgagcatactgtgcccagtgaaacacttgtcacagcaaggctgagactacatggtctggacaccaaccgtctgaaatgcttacagaaacaggaaatagagacgtggttggcaaggagtaggcaggggagagaagaaggaaaggaagttagtgtttgttcagggtttcggttttgcaagataaaagagttctgaaggtccaagcccagctgtggagcaaacctaatactactcaactgtgctttaaaaaggacttccgctggggttttaaaaaattagaataaaaagaaaaaattacacgtttggctgtttatggagatatatacacataatcccagctttggagagaaagggtgagatagaaggagggagcctgggctacatagtgagactgtctcaaaacaaccaattcgctttttacatatatacttatttctcttgggtttgtggaagtacattttgagaagttatattagttctttattactcaaaatcactgtaggttaacaagttgcttttattaaactcccatggatagcagaggaaattggagtcttttgcagctggtaggaagtggctgcagaggaccgggcctcatggaagagggtacccacccccccannnnnnnnnnnnnnnnnnnnnnnnnnnnnnnnnnnnnnnnnnnnnnnnnnnnnnnnnnnnnnnnnnnnnnnnnnnnnnnnnnnnnnnnnnnnnnnnnnnnnnnnnnnnnnnnnnnnnnnnnnnnnnnnnnnnnnnnnnnnnnnnnnnnnnnnnnnnnnnnnnnnnnnnnnnnnnnnnnnnnnnnnnnnnnnnnnnnnnnnnnnnnnnnnnnnnnnnnnnnnnnnnnnnnnnnnnnnnnnnnnnnnnnnnnnnnnnnnnnnnnnnnnnnnnnnnnnnnnnnnnnnnnnnnnntttgtaaaaccccaagaccaggattctgaatttctgtggaagcagcgcagcatagggcacggctggggagtgagatgcgggattttctagccataatctgaggtgggtgccgggatttgcgctaaggagacctggtgtccatcctggcctggcctggcctggcatggtgttacgtggttatgtaactccttcgaatcttgcttccctgctggcagttcctgtcctctttgcaaagcactgagtgtgttctctgcagcaggtgtttacgtggggtgctgagcatgcaggaacaaagcatccatctctcacccctgggacggggaactgggagtccttaggtttggggggaacttaaaatcgtagatagctttaaggtcacagaaggcaaagaatggagacaggcttgggaggccgttagacctcgctgggagaggcaaagcctgcaaggaacaggggcctagcagttactgccactcccagaacagcctgttaccagcccgtgtttcctgtattgcacacagattttctgtcttgttacctgtaattggcattacagagatggccagtgctgccctgaaatggagggagacgaatattctattgaggtccccacttcacagcacccagtaaaagaatagtctgcacttatatacgttttttttaaaaaaatcattttatttgttatttaagcatgttcatctggaggtcaggggacagctagtgggaatcggttctctgtttctgccatgtgagacctggggatagaatgcaagtcctcaggcctgactgtggacgtctttaccactgagccgtcttgctagcccccactttccttttagaatgcatttagttatttagattgattgattgagacagggtctctacacatagcccatgtgtgattgcccttgaacttactgcaattctcttgcctctttctgaagatgtggcttttaaatggaatggtcgagaagcatgagtcttgtctgaggaagggtgtcatgtaggagcagcaggacaccatcagaaccagggtgaggtggcgtgtagaggatctcggggctttggctctcccctgaggctgatgagcagtgatgcagtttgaattaggagtgatgtaatagctgcctaggtacatacaaaccataggtattgggtggggtgaggcaggaaggacaacaaggagtagctgagtggacctgttaggggggcccaggcttaagtgttgagagataggtgggaactggctgggttcttatcctctttggaagagaaagtatagttcaggtcggccttgaaacgccagggaggaagaataaccttgagtataggaaacatgaaaacctgttcctattacagttggcagggcgaacttgaaaggggtcaggtgcctttgcccaggcttctttagccagaaagtgaagccagtacagcaacctgggaattaatgacatacactcacgcctgtcttgcagcttgcacttggcacctgtgtcgtgatcgatgcaggaaggttggtgtggtcctcatgtcatctttatgctagctgtctttatgccagccatttcttcaggctgcaagtcttctgcccctagccacgcccaccccagttagccggtggggcgctgagtcagtgtacctgggctaatggaagccactcagcaagagctcactgtggtattgaatctgtcccatgtcccacctcgttcttgtaagcatttacagcaccagctcaggtcacttgtcatttgtccttgtcactttgcaaccccatcccgtgaggtctggcactttcccagtgaattctttatatttcactaatgtaaattatggattgtagataactactgtctttttaaaaaaaaaggctgcttttcccagcaatgggcagatcaggtggcagggtcctcactaggccaacattgttcagtggttctttgagggaaaagtgtcattttcagggttttgctctcagaggccccaatgcttttcttttctttcaatctggctcagccatagctgaaatgtgataaggagaaatgccagtggtactgggcagtgccaggtcgctgctggccgacatccaaagattcctgcagctctgggtcccagccagacccagggtctgtctagtctctactcccccacgatcattagaaccttttagctgtaaacccaggcaggccaccaggcctcactcaggctgctgtttcccctacaagcctcccccagttcacaaaggcttttatctttagtgcttttcctggtgcctgagacagccaacttatgcatacagaatatctcttatttcctgaagacttcctccgtcaacatcccgtacacataccctgggaatgtgtcatagaccatgtacgtaataagtagccttcagttctgcacctgcaaggcctgtgaccacagaaggggcatggaagctacgatttaaaggaagagacggtaccgtaattctcagactgctgaggcctagcttcctcaagacctcacatcctccagccctgcatccctgaaaagtgggggaggggaagcttgtaggtgctgatgactgctagcacacgcgtacacatgtatggctgcccctgcccacctggctgccctttcctgagagactcagaaagataccagattcaggacatcagaggagctcctgagagtgttcctgtgcatctgggctttgggttcaagttcaggagtggcttggctcactccctgaggcacttccaaagcagctcactacattgtagccagagcttgcctgattgcagttagggatgggagctgaggcttggggtgggagaagggactgaacactgcaggcacccagcagcctctgtggagttccagcccagctgcatctcgtgcatttgtccaagattcatgggcacgtcggtatccagagccttgacaacactggtatacagccgggcacgggagtgtgttctcaagagcgacaggagagctctgaaagcagtgttgctacaacaatcctgtgaggcttgcaggggtcagggaaccccagccccagaggacaagacaagaagacatgggcttatgagtgtacccagccagctctcacatgccactggaagaaactgagtggagcttaggcccatgggatggggcagcccagggtgggtatctatggcagaggagcctccaggtcaccccactgcttcctcctgtgctgtcccttttaccagtccctccagaaccttgctgagctcatccagttcccagcctgaggatgacgtacgtcatcagtcacccgtggactatcgttctgctcagctttcaagggtgggaccttgttgcccgttcactgcagcaaccccgtctccacacagcccaccacttcccttcttgttgtaacagagtccttcagtcctgccctgtcacattctgcaaatgttattttctggaacctacagtgtaaggggaccctggattacaaactcattacaccctgatttcaaactcagaagccaattggtatcacattcctgtgacctagcccttggccgtggcacagggatgtgaattctagatcagcctggactatgtagtgagactggtcataaaaaaaaaaaaaacacacacacacacacacagaaagagcagtcatggctttctatggccatgggagtctcctgcctcccttcccatcctcaccccatgcccagaagcgccctagccacaggagattcatttatggatatgtgaaacctcaggtcaaacctgacatgtactattatcttcctatttgtgcatacctctggtaatgttgaatttgtagactacacacaaggttcagatgaacaataataataataaaatataacagtaataaaaacatattccgtagggctcaaggctacttgcctagtaggcataaagccctgggtctatctgtagcaccgtaaatataaaccagcaggcagacataggaactgtttgtttctgggaagttcaatttaaatttttttcaaccactgttgtaagttcatggaaacctttggaggtgaagctttgtgttataaaggggtcatggagtcacatgtgatgaatgcttcagattttgctacccttggctcttggtccagggctagctcggtgtcatggccgaggtggaccctccctcccaccccaccccacccccgcccccaagagcggtattctttcctctctagaggcagcgtgtgttagacactgagcccctttgctcccctcaaagctccagctcaccagccgctggtcttggctccgtgaggcagatgagcatcccccccgccccagttccccatgtgcccccacccagcactcagcagacctcctgctggagaaaatggtgctggaaatgtcgtccctgctcctgtagcagagggaggctaaatcagtatgtctccagcactcagcaatgctgagaggagccatcattctaaaagaacatctgtgtactgtgatgttctaaacaaactgccagtccccacatttttaattaattattttttgagagtgtttcagttcccttccctttgccctcccatataccctttccactccttcagatgtatgactttttcattaatcgttacatacatacatacatacatacatacatacatacatacatacgtgtgtgtgtctgtgtctgtgtctgtgtcctgtgtctgtgtccctaaatacataactgcagtctgttcagtctgtacatggtactggtgtgtgtgttttaaggtctgaccatttggtattggataatccccctcttagcatccctcggttgcctttagttcttctgtgtagtgtacagctcatgggtttcccttcccatccacgttcacttatccgttcttttgtccttttcggcttgttgtttgggactttatgtgtagctttggttattgttaggagtctcagtctcacagcagcctcccaatcctctgtctcttatgatccttctgacccctcttccagaatgttctctgagtcttaggtgtgggagtaatttatagactggaactctaagactctgtgtttctattggttgtggtttctgtcatgggcctgtgtgacgagaagtttccttgatgaagggtgaggactacatttatgtgtgggtatagggccagtatttacgatgtagttagggattatgctggtttagtagagtggaggttttagggtcttaaagatccatgccctcactaaccctggttaagccctcatctttgaaactcctttctgtttggtaaagatgcccacagtttcctgttgtgatgctgagccaccgttccttgtggatgggtggactgagaggaggagtggcccatctgaccacatggagacctcctgacctcagctgcacagctattcccacacagactgcagaagagtgtttcaagttgcagttctccgactcttcacttcctcgaggatatcaacacattgctcgaaaacattactctgttcctgtccctttgccttttaaacaaagtcttatttagtaacttaggttggcctctaagctgtggcgatgctcctgcctcagcccaggttcaggaatcatagctgtgaacccctatatttgtttgcattttttacatccactctggggtggatttcctactaaatcataaataatcccctctcccttgactcacaaagtaacaccgtcagcaatatctgaaatgctctacatcagaggcacagggacattggacgcctgctgctgctggcaccggctgccacctcagagttagagtgttagattagagtggagattgcgaaacacttccctactctgggtgagataaaataaccatttccttgaggagtgttgcctcttgttttgccatatagattggtggcagtggttgttagcttagctgtgtcctattctgtaaccctggatggtctggaactcactgtgtaactaacccatgtctgcctcagatttgtgtgctctgcctcttgagtgccgagattacaggtgtgaactaccgtgccctcgtcttttaaaaacatgctctctctggctttttcccttgcagtctcttcagatggaggtgcggagtcttcggccttagtggatgataatggtagtgaggaagacttcagctatgaggagctctgccaggccaaccctcggtacctgcagccaggaggggaacagctggccatcaatgaggtactcggatcccacatgtgccagatccttggttctcagggctgtggctgtctagttagtccctacctggcatttcctgaagcctgcgactctgctggctgcttttcaacactgagtttccgtcatcgtccaggaccatgactgtaactgagctttgcaggtttctgacagttgtccccataagcacttagctaagcaggtactggtcttctccacatcttgacactctggagtggaacgtgacctcaccagggtgtcacttaaccacatctagtgtggtggctcagaagacatttgaaaagtgacgattccaaacactgagtttgttaggtgactgtccctgcttcagactcctgacttctccacggcatgaaagctagatgccggtgtaggtttggatcattttcggattgtggtgtggagtgaccgttctgttctccttcgctcagtgacttaggtgacacaaggcatcccatcatgtgatgcacttcagatgcgctcttcggcccatcctgggtgccactagaaaaggctgagtcagcgcagtgcacagtgactaggtgtaggaatgcatgctgggatggtttatgatgacttagcatgctatgactccattgtgagccaagaggcgcctgcacaacccagactagccttgaacttgtgagcccctgcctcaaactcctcccacatggcaggatgacaggtgtgtgttaccacatccagcatgtatgcacaccttttaaaagatgactcgagtggccctttaagagcaggttacagtcacctacctaagactgtttcccaccgttgatttcagacaaccagtttacctcggtagcacagatttttgcagacagtgcactgagcccgtggctcctttccgtctgcccactttgctggatgctaagcatgctcttctgtctccatcccagctcatcagcgatggcagcgtggtctgtgcagaagcactgtgggaccatgtgaccatggacgaccaggagctgggcttcaaggctggggatgtcatccaagttctggaagcttctaacaaggactggtggtggggccggaatgaagacaaagaggcctggttccctgcaagctttgttagggtaagtgtggtcctctgagctgtccaggggatgttcatgggcagggtattgcaacagagtttcagcagatctcagtcttcacccaggtccagttcttctgtcattgtgtttaatacacataagccagacctgtaggaaataaggctagttggagtagatatctttttggtttttttcttaaagatttatttattttttgtatatgagtatactgtagctagttgtcttaaaacacagcagaaaaaggcatcagatctcattacagatggttgtgaaccaccatatggttgctgggatttgaactcaggacgtctagaaaagcagacagtgctcttaaccactgagccagccctccagcccccaaaatcttaataatcataaatagaagccaataagctacttggcattgcttctgcccatgaacacatattgagggcgctgtggttttataactcggcacagagagagaggccagggaagtctctgccttggtcctgctaccacttcctctcccctaagctccctgcctcctgtgtgtggcctgcagcttcgagtcaatcaggaggagctgcccgagaactgcagcagctcccatggggaagagcaggatgaggacaccagcaaagcccgccacaagcacccagagagccagcagcagatgcggaccaacgtcatccaggagataatgaacaccgagcgagtgtatatcaagcacctgaaggacatctgcgaggtcagtgccagtcaagggctgccaccgcctctgacccagtgtgtctgtctcatcggattctccggcaagatgctgggtgattgccgcacaggggaaaatatggtcctacctggcgatgttgccatggtcctttcagtgatagtcggtagtctctttacagtggggagtcgggggaaagacagtgtgtgacggtgtaacaattgccgggattatggatgctggctaccacgcccagcttgttattcagtagtctcatctgcttttggagaaccaaacattagcagaagggggctgaaaggctgcttcctcccaagctggttatcattttgtagatcatgtgagctgcgtagctctgggtggtgatggcagcactgctcattcagctgtgagcacccagtgctagcgacaggcttgtgtcagggcagcctgttcttgcatgggtgagcatggcctgctgctgctcatctctctgctccacaagtgtgtggtctttagagtcagtttctggctgagcattgaggagcacggactgtggactgccccgttggttacccggctcagctcagctcttctcagcattatcaccggggaacacatcctcttagtttcttgttgcaggtgagggaactgagaccttgacatttagaggatgggttggaagacagtgtgtcccctaagcttagaatctgtgttgtcaaagtgtgtgttctctaaaaattcatacaggagtagagtggtttaggggcttgctgcacatgcatgaggatgtgagttcggattcctagcatccacataaaagctggatgtggcagcatatgtctctaactccagcactgggaggcagagatgggcagatcccatggcctctctggtcaaccaatctatccaaaactgtgagtcccagttggtgagacattctctctctctctctctctctctctctctcagtctcagttggtgagacattctctctctctctctctctctctctctctctctctctctctctctctctctcttctgtctctcacacacacacacacacacacacaaaggtgtaaaggtgattaagattaaaatcacgccaggcattggtggcacacgcctttaatcccagttcttgggaggcagaggcaggcggatttctgggtttgaggacagccagggctacacagagaaaccctatcttgaaaaaccaaaaaaaaaaaaaaaaaaaagattaaaatcatgtgtacctgaatggacactcttgtactacacatacatgttcacatgttccactgcacataagaaggcagtggtttatcttttattcagtggtcagttctgtttcagcatacaatgctaagaggtaaatgtacgtgcatgtgtggcctttccttcctatcactaactctcccaagccagagcacagctctggtagtatgcctagggaagtagtcgttacgtaggcctcttagtaggcacaggtctcagatcaaggatgtacagacccctggtatataacgaaagcaggtatgacggagcccgtggcgtggatgatcttgggtctttaccgtgatttaacaaaccaaagccacactaactcaggttatcagatttgatagcaagccttcacacactaacctctttcatctccctagccaagaaagtcagaatctagaaagtgtggcaatacggagccaggcatacacatatctctaagcctggcagtgggtaggtagagattggtggatccctggggctgggctctttgaccagccagcctcgtctgcttggagagttccagaccattaaagactctgtttcaaacaaaaaggacactacctgagggaggacacccaaggttggcttctgactctcatacaactacgaacacacatgcaccacaccccaacacaaacacatgcacacacactacacgtggtggcgtttgtaaactcttctgtttgaaacttacttctggaaacttggaggctggccacatgaaactcttcacttccatcttgttttgaaaaaatactttttggtgaattacagttgtagatgtgtaactgtctcatcagcctcacagagatgaaaataattctctctaattaaaattcaccccaccttgggaatggtgccacacacctgtcatctcagcacacgggagtctacatcaggaggtttgcaagtttgagaccagcctgagctacatagtgtgaaaccctatcctaaaattaaactaaaattcagcccaaggctgtggcgtgggccaaaacacaaacagaaacaacaaactgttcaactgtctctaagcaaataaaaccgtttgctcttgtcctttgcagggctatatccgacagtgtcgtaagcacacgggaatgttcaccgttgcgcagctagccactatttttggaaacattgaagacatttacaaattccaaagaaagtttctgaaagaccttgagaaacagtacaacaaagaggaacctcacttgagtgaaataggatcctgctttcttgagcacgtatgtcaccgttcttccgttaatcatatcctgtcagacaatagcgtagaaagatgtctccgccaaagacattccagagggtgctgccttgcctcatgcactgccattagctagataggagttttcttcccatgagagtgaaggatccgaggtcgcatgctcgtgggtagatggcagcacgatctcagagtttctctgctggtgacgtgagttactgggacttattacaagattgactataatggacaagagaagattttggagatcttattgctgtgcttagaggatagttctagtagtgctaacaatggcagcagtatcccctcacttcctgggtgctgggcctggtggttttcttgaggcaggagactggagctggaggagtggatggaccttaaagtgctgagcatggtggttccttagaaatgcaggcagaatgggtccctagctgtcccggcatcttcgagacactgaagacctgtgcgactggagtagcctggtcctgttggggagcagttagggtgaggctttcaaaatgagcaaaagtgggacaagagcagacaggtggatgtcctcagacacagaagagtcttaactgctggtcatcaccgtggtcagccctgtcgggtgatggcccgtggacaaggacaaggaggagacctgttaaaaagggtattttcaaaggaagtctggcaaggctagttgtaccaacaaagaggagagcagtgatctgtatgtagtacttgtgcatagagttagcaggtaggctgggaaatcgcatgctagggaaagggggacttgttgggatgcccgctgcatttacgctcagtcaagcatgcaaagtgggatgggggaaacgggaaggaagggccgttgtgagcatgttgcccaacaactgaagctggaggaaagacggtagccttggatgtagcctagtacccagtgacagggctttcaaagtgatgtctgcccagtcctgagggaaggatgggtgggcagaggaaagagtgtagctccaagcccaggagagcagacagcatgagaagggcagagcagcagtgtggctgcccctcaggataagactctgagagaagggacgtggagaagttggagaaggtgtaacacgtggaaactagccccaagggttgtgagttaggcagtgtgtacctccaaggcagagtttatcagtggaggacggggctgaggccattgagccgagcctcagagcattgctttgcccttctgctgtaccagctgcaggctcgggactgactgagcacagtggtagaataccctctacccacccataaagagagccccgttatccactacccccagaccacaaatgatcacccttcccaccagccacgaaagccgctgtcaagcttggattgcccttggggtcttggcctgtccccctcttctccaggggtgtccctacggacagacggctcagagccattgactgatgaggttgccttcccccttccagcaagagggcttcgccatctactctgagtactgcaacaaccacccaggcgcctgtgtggagctgtccaacctcatgaaacacagcaagtaccggcacttcttcgaggcctgccgcctgctccagcagatgatcgacatcgccctggacggcttcctcctcacgcctgtgcagaagatctgcaaatacccgctgcagctggctgagctgctcaagtacaccacacaggagcacgggtaagtaagctaggggccgcccaggaccgtgtagccaagccccagacagcctggtgctcctggaacggcagggacaggtggtggtggtgctggtggtgctggtggtggtggtggtgctgatgctggtgagggtggtgatggtggtgctggtggtggtgctggtgttgatggtggtgctggtggtggtggtgctggtggtggtggtgctggtggtggtggtgatagtggtgctggtggtgccggtggtgttggtgatggtggtgctggtggtgatggtaatgtggcagcattgctacactgcctctgagcttcagggaagtttcaagtgtttatcagtttaacagagtatgggaagttactccatgacttccagacatagaaaaacaaaagagttctttttttgtttgttttggtttttcgagacaggatttctctgtgtagccctggctgtcctggaactcactctgtagaccaggctggccttgaactcagagatctgtctgcctctgcctcccaagtgctgggattaaaggcgtgagctattacagctggcttctttcttttctcctttccttctcctttttctttttctttttctctttcatatttattttttatatgtaagttacactgtagctatcttcagacaccccagaagatggcgtcagatcttgttaaggatggtagtgagccaccatgtggttgctaggatttgaactcaggacctttggaagagcagtcggtgctcttaaccgctgagccatctctccagccccccttttctttctctttttctttttccttttctttttctctttcctttcctttcctttcctttcctttcctttcctttcctttcctttcctctcctttcctttcctttccttctttccttcctgttttccttcctttctttcttttataaaacagaaaaaaaattctagaaaaaaaaagacaacaacaaaacccctttgattctgcccttctttggggacttttagcaaaaaaaaaaaagcattgtccctttcctttgcttggggcatccacttctggggcagttgcaggtcttgtttattttgcctcctgttcttctgcctcagagaatagttctgggaagacttgctttgtggacaaagctgcagacttcccaggactggagcgcccctgtgtttggctcactgcctctgctctcaaggctgttgaggctctaactcagtccaccagggtccctgctgtgtcatcacgtgagctaagtgctccagcctgttgactgaatggctggtctacacatccccagattacttccactgaacaaaacctgagcgtaacattttcttacacaggccacgcgtggtcttagcctctgtgtaaatctcgattttgatttcagggttttccatatttgacagttttagaggcatgagctgggctctgctggaagaccttcagactgtattgctcatggtcttttatgtccctccctaaacaagtaaaagatgagacttgatgtggataattactttcgaaagggctagtggttcttaagcagctttatatagcagaagtggttgtgttgaaatcaaagcagagatcaagaacagatctcggtactaatgagaataattcacagttgctatgactaacacttggtttctgtgacatttactttcattcatggtgatttctgggaaatgaatggcaacattcttattccaaaagaattgtgaatcgcgttccccctcggctcacttaacctgtgtagactgtagtctattcacgggaacaatggttcttactcagtgcctcgtctagaccattagcatacaaaccagggactgagctcattattttgtcagccctcatgtgtgaacttcatgtctttcaattaaaatgaactttccatttttttgcagcgattacaacaatataaaggcagcctatgaagccatgaagaacgtggcctgcttgatcaatgaacgcaagcgcaagctggagagcatcgacaagatcgcccgctggcaggtgtccatcgtaggctgggaggtgagaggcactcacacatgcgcagtgaggcttgccgctcctgcatttgcacccagtgacaggatacgttagcctcctgtgattggcactgtatgttctggctttcatggagtattgccttgtgcacttggagggattttgatgagcctgaaagacaactaccttaatgatatacaatgtctacaaaaaaattaagtcagagtaggaggtgaggtagctcagagggtaaaggtgccaaacctagagatgtgagtttattccccaggtcccaatggtaaaaagagagaattcgactctgagagctgtcctccagcctccacacgagcagtatgacccacgcatgcctgtacacatacatgtacgcacacacattaaataactaaaagtaacttttaaaagaaacaaggtcactaatacagtgcttagtgtctggtcctctgacacggagagccagctcccacacagtcatagaacacagtcataggagcatgggggactcgagtcatggtgacatattaggatcccaaatgatccaagcaaattatcttttgtctgtaagttgaggaggaaaatattacttcttaggctatttgatcattatgtaatagtacaggtaatcctatctgatagtgatgggccaatggatatacttacccttatttgcgtatccatcgagcgctcacgcacacacgcgtgtacacacatacacacacacacacacacacacacacacacacacacacacagaatatgtagtgctctaacttactcactgctagttacatttatgaactcagtgaattctttcaatgctctttaaaaggtgtaagtacctcctccaggcccaggagtctagacggtcacctctgcactgcggtcacctgcactgcggtcacctgcactgcactagcagctcagaacaagctggtacctttcaggttgttgctgaaccagataagggtcactgcatctaccaactggtcagaactggctttcacagacagaaggcactgggtgagaaggcaggaatagggctgaagtcactgagaacagggtgagctaaagagaaatgctttttcccaggagccctgagcatccctccgacatcgctgtctgatcccttgttgttgtttttttaagtgaagaatctggggcacaaaattgctgtaggaaaggaaatagaagaaatattttggagccaagcacttcggcctgcaaagcattctgtgtattattgggattaaaggaaaatgaaaattttataaatggaggccagcttcataccagcttggttagggtgatgtcagtgtccatccaccctaggtattataaaggggtgattgctttcccaccttagagtctgacatttagggaccatctcatcagaatttactaagttcttgctggcagcctggcgttttgtttgcaggaccctaagctacctataccagcaggtaggtaaacgcctgacatacccataatagtaatgctctgtccctgtgtggcaaaacctctgagtctcccttattgtcatgaagtcaagtctttatcagctcccactccagaaaatgtctgcattccattgtttgtttgttttttaaagatttatttattttatgtatatgagtacactgtagctgtcttcagacacaccagaagagggcatcagatcccattacagatggttgtgagccaccatgtggttgctgggaattgacctcaggatctgtggaagagcagtcagcactcttaaccactgagccatctctccgaccccattgtttgtttatttatattttatgtgcaggatgtcagattccctggaactggagttgaagatagttgtgagctgccatgtggttgctgggaattgaactcaggacctctggaagaataaccagtgctcttaaccactgagccatctctctagtccccagcattctattattttaacatgagtttttagatcagggagacactttgagaaggtcactagatgtccttctccgacctccacacacatcaccctgccagaaagaaatgtacccatgcacatatgcaccatacataaatccatagagctaggaaatgaagagtagaaaagacatggcaaggaacctgtgaagtcgaggtctgagcagcctcggaggccctacctagatgtgtggagggcagcaatgcctggtcttaggaaactggatggaatattctaaaaggctgcatcaaagtccccttctgtatctctgttgttggaaacaatctggtttggaagactcaccggttacttgcattcccttagggcctggacattctagaccgaagctctgagttgattcattccggagagctgaccaaaatcaccaggcagggcaagagccagcaacgcatcttcttccttttcgaccaccagctggtgtcctgcaagaaggacctgctgcgcagggacatgctatactacaagggccgcatggacatggacgaggtagagcttgtggacgtggaggatgggcgggacaaagactggagcctcagcctgcggaatgccttcaagctggtcagcaaagccacggacgaggtccatctgttctgcgccagaaagcaagaagacaaggccaggtggctgcaggcctatgcggacgagaggcggcgggtgcaggaggaccagcagatgggtgagtcccctcagccccctcctccactggccttctcttcccagatactccctcaagggctgaatctgtagatggcactgcaggcatgtgctctgtgtaatattagcagagatggcccatacagcccaagaatgtgttttttgcccttattcacactttacagatgaggcactccttcagcttgatgtggtcctagggactgactacataatggtagcacacacacacacacacacacacacacacacacacacacacacgccctcacccaaccagtagaaatatccgatgattctctttatttcttcacttatctatttatttattttaaatatataagatgcatttattttacgtatcagacacaccagaagagggcatcagatcccattacaaatggttgtgagccatcatgtggttgctgggatttgaactcaggacctttggcagaacagtcagtgctcttaaccactgggccatctctctagccccacttatgtatttatttatgctgcatatgagtatgcatgttcttggtagggtgataggtgtggaggtcagagaaaggcatctagtggcctacctgttctctcaccctctgccttttccacttgtaaagggtctcactgaacccagagctaggctgggagccagcaagccctagccatcctcctgtctcaatcccacacagcattggggttacaggtacacacatgagcacaccagcctgttacgtgagcactgggaattttaactcaggacttcacacttgtagcgcatgcacaccttcccactcctgagaggccatcttcctagcccagagttgtcagacagttgtgttggtttccctttcatcagcactgttgcaaaacactctaccttcccctcactgtctggtcagttcagacccagttcctcctgtgctttcccgatcgtggcaaccacagagcctgtaccatgtgccagagtgagctcgcgcttctcgggttcagtagcgtccttggacaggtagaccatctagagtcccaagatcaaaatctctgaacatcaatgaggaaaacttcacacctggcatcatgggagggacccagtcaaaatgcagatgccctaaaagtgtatagtttggaatcactttcaggctgtgtataaataagataaagtatctatgaaacataactgaatcctgtgtttagactttggtctcatccccaagataccttatgtgctgtgtatgtgaaaatattaggaaatctaaagagtggcatgtgctggccccacacatttcagataaggggaacttagcctgtattttggtttgtcatcccaacttccgctggcctttttttaattgcatgatcttgtgagaaggaaggtgccgtgtggcattcaccagtgcagcactcacagtttctgtgcccacgctccgtagccacccacacagattgggaacgtgaacatgcacttccagatgtgagcttcggtgcccagagaccaggggtgcacaggggtctcatgggtgagaaacgcctgagttgcccagatctcaaggaccatgtgtctggtcaagtatcacccactactacagagcccaaggggctttaagggtggtttctatgtctcctgttccaagccaccagcttaagatatggccttagattctgcagttggctgtagaaagtgtcctggggtcctgtgttgaactccattggcctatcttgccattaaaagtaagaatttcttcagaaactaccagagcagagactagtgtgacagcacacaacggccagcctcacagacgggatctgccactctgggtagctgccctttagacccaaggaaatctggacacacacacccccctgcagtcgccatgcattggctgctgaccatcagaccctgttgcaataaggcatgccacgaaatccttctagaagtgtgcaggtaattactgaaacgtgaagtgatggggtcaccagttcccagttaactgagtcactctgcactgtctggtgtggctataagcacccgagtcagaatgtttgcacttcttcccctgagggttcatgacaatcacagaagagtcctgaacactcagctctgttcttcctcttgtgcctgtcctttgcctcatgggctcctgttgcagagtaccagtgaggtcaggtcttcatgctttctctggagccacacaccagtctctgtgtctgggtatggggtgggaaggagacccttgccagtcaggcagtcattaaatatgtcactgcataaaggcaggacatcagaattaaccaaagtagagtagatccaagacaaagacgagggtcaatagaagctgcagaggtagatatgactcagctttgccacattggagcctggctcctcacctcccacttgtgtcccacctcttacctcaggagaagcagccacctcagccactgtggttgctcctctgccgtcttgcctccctccaaagccagtctgtcctctcccccggtacagcttacctcaccaggccaatacctagttggcctaccatatgttgacagcattgctgtccactgcacagccagggtgcagagtcccagtctgaggcttcaggcaagtagaatctcagcccacagagctcttggcacgtgtgagcagcagccccaagcctctttgccttgggccgtcttcccagagcgtcatgctttagacctgcagttagggtgactcccatgtggacattgacctggcagtgtctggtcttgagacactaagggtctgtgtgtcacgacaattgtacctcatatcactctctaaaatacctgagctcagaggtcatcgtgaggcacccggtgacttctggcacccttccttttcctcgcctcgcagggctctttacttcagtctgtcagtctgtagagaatgcctccgcactggtgcgtggtgtacacagtttgttctgaaaatgttttcccgggttctgaacgtagaccgcatctgtttccaaatccaggtatggaaatcccagaaaatcagaagaaactcgccatgttgaacgctcagaaggcaggacatgggaaatctaaaggtaaggttggcggaagcttcgcctgcctctatgcatcccgtgatgacctggagtctgtctcacagagcctttttgcagctctgcgtggagaggaaaagccagactgcttaaggaacaaatgcacaggcaggtggagagtcttcttcaggtttggattcaggtgcctgaactatctcagtagcagtaaaggccttcagggctcccagtcttgccagtgccttctgctcctcatggccctagaggatgagtctcactgggtatccactgagccaccagtcaagtaaacccctgcaactttgatttgaggaagaatctcttaacaccaaactgtttgccagctacaaatgagtgcagtgcattccagtgaggtgaggtctcagctagaggggactgcactgcattccagtgaggtgaggtctcagctagaggggactgcactgcattccagtgaggtgaggtctcagctagaggggactgcactgcattccagtgaggtgaggtctcagctagaggggactgcactgcattccagtgaggtgaggtctcagtgaggtgaggtgaggtcccttagataaggagactggactgcatttcagtgaggtgaggtcctaacattcagagcaccggtagataagaagaccctgggcttctcctagagcactcccccactcttgtacatactagaatcacttagcagtgacatagaagacttcatgactgggccacaccacggtcctagtgctcacactcagtgctctccccagggtaggtaatgccagtgaatgctacctcattcattcttgctactcccatagtagagattagtgagctggggcacagagaaatcaaagaattcccctcaaatactcatggtcagtaagtgtggagtggcattcgcaccaagggagtgttggctccgggccttggttcaaaatgtgttactgcttccagtccacaccagaaagcccagttctgagtctttactgatctctcttgtggtggaagttgacctgctccatcccctcggcttccttcttcagaggttttgggtaggcttcatgaggtaacccttgctggtcctgcacagggtatctgaattctcattttgtagggcagttattagatgtcctcttgattccttggaattagctaataagtactttagtcccaatgtggcttcctagtgactggtctgttcttctgtccttcctgagttaggctacaacagctgtcccgtggccccaccccaccagagcctgccgccccttcaccagcgccacatcactgtgcccaccagcatcccgcagcagcaggtctttgccttggctgagcccaagaggaagccatcgatattctggcacactttccacaaactcacccccttccggaaatgagccttacccagggcgtgcctctgaggtactgtggggaggaagaccagctttgtcacttcagcgtgatgtccggggatggcttcttgctcagtgctgaacacttcatttggggatcgatgaaggggagaagaagttggactcagctttgaccttgaaaggccccagcacccttgtcgaaggaaggaaccatgaagcactgttctgtcccacactggaagccacactctccggtggccatgatataaggaccagggcttctctgtatggagactgctgactcagtttcccactgacggtcacactcctccagttccgaacagtatcaggagcctttcagttcctcaggagcaactacattgaggacagcttctgtgtttgatcttaaaggagactcattgacaggagttggtaggatgttggcagccatgggatgacctgggtctggtcaggccctgaagagaccatgaaggaactagagccaatggagcaggtgcccatagttctccaaggtgtcacagatgccaagctagagtgtaggtctcatcctgcaaggttccttactctcaagagaatcgggaggcacctgctgccctggcagtgccggggatgatagcatcctcagggcagtgccactttccagacaggtgggaaggctgctgccacctgacttgtcccttcaaacagcggtcacgccttgctcacccctcacaacctaagaacctgccatccgcagaagtacgggtgatgtgaaacgtgtaactttgataatgtgacactgcatcttcagcggccctttgtatcactggtgggatgaagaaggcacatccacagagaaaaccagggcaaaaccatcctgcttcctggggaaatggacacgcctctgtcacgtgaccctgaaacagtagtaaatcgagaatggtcttgatggctccttagctctgagagagctgactcttaatgagggccacaggagctgacacccacagagagcaacctttctctgttgacactgtgtttgttagttgatgaaaatgccttttaactcgacctaagggagactggttctgcatttgaatctgcacagcgggctggccaggaggggtcctgccgtgtggctagtgtgttcctttggacgtgatcttgtatgcgggttttgtgcaaggttctcgcctctcatcagctctcgcttgaggataagcaagtccgcagtgtcagagatgaaggtattggtccgtcagcacagttcaccgtgtctccacatctatgcctgaaacaagtcacatcacagctaataaccttgaccctgggcctgggatcaacctcaaccctgctgtgcaccttggcatggtcacttataggcagcactgctgaggactgtagtcagtgccccccatcccccgcaggtgtgtctgtgtgctatgaagtggttcaggtgtacagagcatgcgccgtgtgtgtgtgtgtgtgtgtgtgtgtgtgtgtgtgtgtgtgtgtgtaagagggtggcagggagggagacggaggcctcaacttcactgcatttatataactgacaggtttggttggttggttggtttcttgtttgttttctaatagaatgtcaggatatatttttagaaaccatactttgggtacttttctgtgctccagtgtgtgtgtgcagcaattctcacagttgtattgttaatatgaaaattgctttaaagaagtgaatagtctttggtcctgttcattttcactgcggattcctcttgagtcagacccgctgcaggctccatttgctgttacagctgacgacagtgaagaaggctatgtttgtgaccggtcctaatagaattcccagctgccctaacttccagttcccaccacctccacagagccccctaacaatcccggatatcaggacgtgtttatattgagtcacattcaagacctgggctggccccgggtgattttatacagcctgagaagtgcttgatcaaataaagtctgacccaggtgacttacttgggatttctgggtgattttgaaaactaatgtgtttttaaaagatgtaatagcctttgactttgtaaaactctgtatgtcagtatgcattttattaccaaatacagaatgtggaggacctttagtagtttttattttcagttcgccaaacttcctttttgatgtaaggcatgtgctctactttggaaggaaatagaaacaacaaagaacctcctgcccagacggctcacgaacatcccctccctctccctcaatgggccaaataatattggtgatttaaaatgttgatgaattcatttgttctatttttagcgtatttttagcattccagaatttgccagctctgttcacgtgatagagaaggcctccctggcttagattgtacctataacgtgtaggcgtcgtgtggtaggtaaaaagtgatcacaacacttgaaggtgtagagaaagaaagaacattccagcagctgattgggcttgtgtgagcgtttgatgccggcccctagctcctgtcacctgctctggtcttccttgcctctcgcgcgtggtagatccacccctgcaggtgagagccaccaccgccactgtttctaactactgtgccttttactgtccaatctattgaagactgattcctcatcctgcgtcgctgttattacatgcaaagcataaagtgtatttaatttgaaacctggttcaaagcgcaagtctttttttttttttttttaagcaccagcgctccagcattgtgtgcttgtggggatctgtaactggattgctgatgtttctcaggacaaattagtccttttttccagccagagtttcctggagccagggcatggtttctgcattacggcttcatcacagataggaaaagcagaagtgtcctcaggccagtgccaagaaatataagtcagtgcctttcagctgacaggcaggatgctgggcacattgtgcccacagattgttccttctcaggacccggggaaaggggcgcttgaaagatttaggacaaagtaagtggaaacctctagccagtcttagagaggggaaagaaacatcagcttatataatgtatgtaaatttgctaagccaccccatgtacctaccacattattgcctttactgttctcctgggcattgccaattgtatttagaaagtactttgagccaattctataatttaattggtcctcttttggggtacatattggtgcccactgtgcatgacttgccgatcttggctatgcttttgatgataacaaatccaggctgcggtgctgtggtctgtaagagtcaagctgctgagctggtgggctgcctttgaccctgaaataggacccgcgtgctagacgtgcatcttggctgaatgaagggtttattggtttttagtgtctttttgttcttaaaaaaatactgttatttgatttcttgtaaatgctgtgaatctctatttgtcattttgtatttgtatattaaaattaatttgccaagctggttctagtgatgcatctccatagtaaaagaagatagacacattatacagaaagcggccggctggggcaggcacaaagccctgggtttgattgtcagcactgcataaaactgggtgtgatagcacatacctctaattccagcgcttgggaggtggaaggaggaggttttctctggcttcgataaggggttcaaggtcaacctaagccatatgagactctgtctcaagaaaacacttttaaaaggcagcagatgctggaatttacagatcctttcttgccttgagcttggtgcttcttcctaaagactcattcctgatgggtgggagggaatcactgggagttgttggagaaaggctcttgaggggaggtggagaggggccattagagtagtctatgagtcagagaggacaagggacagtttggatgggttttgttagcctcttctgcgtttgcagatgtaaccaggaactgccccacctcttaccctcaaggccaagcaggccctcttgaccggggctgagtgacagcccagccctggaaggctaaatcccttgcagttttccatgagtgatagagcatgggtgaccaggtctctatgcctctgagtggtcagagctgctggcgaggctcttccctgggaggtcagcctgcagccatggcctccctcacccagggggtggggtgaataggaatttcctcctctcattagcaagctcagaaaaacccagtaaacaagccattgtttgtggtgactaatcagagcatggttcctctgggtggccaaagctgcctcttgctttctggtgtttaatcccagcataatctgtccacttgctccctcctccatggggtccactgacaaagagtgacaatgacagccctggggactgaaggggtggcccagggtggcaccatgcacagaagggaacatagggggaagaacgttattctagaagagttgggaagtgaaacaagcatgtatagttgtctactgcatgcacaggagagaccatgtccctttggaggaatgtggccagacaaacccaatgatgttcttgtatcagtagcaccagagatgtgaggaggtaggcataggacagctcctagaatggagtcttcaacttaaatatccaggcccagactcaactcctaagggttctgtggagaagcacatagggcttacctagagaggtgcagtgcctctgctgggtcagagctgagaccatacagtgcctgtgcagctggactttaagcaaatgaccaggaccttgtgacactgatggcatttggcattccccaatgtggctgaagagctcaaggccagctgtagccagtattgcctacgtaggttgtgaagagaagtttcaaatccgaggcagagggttgcccaggatgtcaagcaggctgcacagtgatcccagcagaccttggggaaggaaggggacactggtgaccaagtcctcctcttatgaataggagtatcataaactgaggcagaagagtagtgtaaacaatgcaccaacaggcttggttcctgctaactcgggagagagggcaggactaggaatacagctagagaggattccccacggccaggggagcagaagggcctgtggcagcctgaagctgagtgaccacagaggtccctctagcaaccaactgcactacctacacatgaagggacttggctgtagcagtcagacctaaagaagctaaaccgtgctcagtggatgcaacccagtataatggatgctgccaaacccagtcccacctcctcttgggtacattgttggggctgtctgtgggctgaggaatgaatgtggggtgtggttagctctgccaaggtgagacttcccggtacctgcataccccatccccagatggccactgagggtgagctcctgcccttcagaacagaacagtatccttatgctcttgaaaccgctgcacgtttgcctgaccgttaagacacttgtcaggagaagctacagagcctccgagtgctcctcggtgggctgaaggtcagggaaaggatagacagagtcctcatctgctccatgcctggtctaaactcacagataacgaagctggtaacttgccgcatcctctgcaccaaaagctgaagtccggggttcctggaagagaagagtaattgtcaggtccgaaaggaacctcggtttcccaaaaaagctgtgggtaaccccgagatggcagcgtttgctcagctacatttgctcagctcaggctgaactatagacagagcagtgttcctcaggaacccatgaaaggggcttctatctggtggaaagggccccgtccctcagcatgtatttgtggttgtgtatccttcagttccactccgcatgtacctgacacatttcaagacccacactcgctagcatcctgtcctcacctcctctaagttctcaggctgatctagttccctccctcagctgcttgtcctcgtagagccctacttctctagtgctgggccatgggcttctttttctcgctgctctaggctcttaagatgcctctggctattctcctttcacacctgtagtagaaacctttctagctagggagccatttcagtggattattcactgcacccccacttacagcagtgaccatgagcagagactcaaacagacttcctgggtttcttctctctgtgtagcttgtccaggaatttgctctgcagaccaggctagcctcaaagtcacagaggtctacctacctctgcttccagagtgctggaatttatttatttatttacttacttacttacttatagctggactgaacccagggtcttgtgcttactagacaggtgctctaccaccgacctaaatacccaaactggagaagataactttattttactgtttggtatatttaaaggacagagcagggtcactgggagcgtcaggccttatcgagagctttaggagtcacaagggtgctcagagctgcttcatgaaccatcctaccccccatagcatagcagaaggccttttcctcccgactggaagtgccctgcagtattctgcacagacgtgaatgccaatgggagggttaactgaatccaaggttgctcttaaatgtagttttatccttaatgagagtcccaggcaacagtgactgtaatcattaaaagttctaagtaaacaaagggaattctgctgctctgtgctgcaaagaccgcaggttacagtcacggtcctcctcgttgttacatttacgcccgtttcctcacccctgatggactcaaggccgaggagagggctgttcacaataaggaaagaagcctgtagtggggacctcttctcccacattccacctgctggcacaaaggacagagaagaaaaggacaaagttgtccatacctgggctgctgtgaagggaggctactggaccctagtgtcgctgtgattttttttcctgaagctaatccaagacatcttgtgcctccctccgtcccctccccttcctgctattttgcacttaggttcactggggagttctatggcaggaaggcttgattttattaacagtgagagggttccctgtttgcacagtgccaggatccagcctgcaactcctgggctcaggtaagtgcactaaaggatattttttcacattcagcacccgggttctgaggtagccacgtgtggtataaagccctgggtaagaacagagataatctgcttcttaaactttttttctaaaggacaaaccaggtgcggtggttcatgcctgtaatgtcacactgtgtaatgtaatgacacaaaaggtttgggctacagagtaagttccaggacagacagcctgggctatagtatgagactgtcagacagacacacagacacacacagacatgcacagagacacacatacacataggaagggaaatgaggaagggagggaaggagtgagggagggagagagaaagggggaagagagagagagagaaagagagagagagagagagagagagagagaggagaagagaagaaggaggaggaggaggagaagaaggagaaggagaagagaagatagaaaagcagagaatttcatctgccagaattttgcactactggcctaggaagaggcattttaaaaaaaaaaaaacaggataaatcacaaaaataacagacctttctagaaaagcttatagatcatcagctacacatttaatgagtgttttaatagttgtgtatatgctgatttatatggtctataaaaacaatatatgttgaagaaaagatgcctactgtaacattgtatcaaatacatgggagaaataaatgaagccaacttagtgtaaggaatgtcaccgggcagtcttacactcaagcaagctgagccttagcaaagatggctcgcaagctggcctggtgaagcagacctgtccccagcacttggagtgctggggcaggaccatgagttctaagccggtctgagctgcatagagagaccctgactgggaaaagtgttcccttgatttctgttaaatgttcgtgtgtggggtctgcataaggattatgaagtgtttgcggggggggggggggcataaggaacctggaatgtttgagaacacatggctgtaaattagagaaaatcagaagaggtaccaaaaatggctttttaaaaaaaaaaaacaatgtgtgtgggtgttatgcctgcactgtgtgtaccacactgggagccaggaaagggcgtctcatcgtctacaagggcttcgagagcctcctggtactggaagatcagccatttctccacccactaagtggcttttcatggagaaggtgggaagtgaggcagaacaccggtaaagcccggaaaagtcaatctagggtctaccagtggcttctgcacccagcagcaggagtgacgactgcagagaactcactgggttggcgctaagaaaactcagctgcctgaagtggagtggccttgtgactgagggaaaccttgggaaacactttcagtatcccatcattctctgcagctttcaccagagggcgacatcatcttttggatgtcagtgtctagctacagaggggctggagagatggctcagggatggagccccagggggagtagagttcatttctcagcacccacatctggtggcctgtaacaccagctccagcaatgtctgatgctccggcctcaaagggtttttatgtttgtgtgttatgtgtgtgtgtgtgtgtgtgtgtgtgtgtgtgtgtgtgtgtgtgtatgtgcacacacacaattaagaaaaataaatagctacaaatgtgtaaccagcactacaaagacatctttcctcacaggaaagcctcttactacatcattctatacattaacatgtttgcctatttgcatacatttgtagttttttataatatacatacattaacatcctcataatgtgcctgattttaaaaatgttaaacctgtgtgtgtgtgtgtgtgtgtgcgcgcgcgcgcacctgcgagttgtatgaatgtcctcagaggccagaaaggggactccaatctcctgtagctgaagctataggtagctacctcctgtgggtgctgagagctgaaggccagtcctccacaagagcactgcgtgaacttagctgctgagccatctcttccagcccgattttagttctttttgtttggctgggtcttttgagacagagtctcatctgtacccaagctggtcttgaactcaccatccttctgccttcatgcatcttttacatatttcactgaccttcatgatattctcagcacttacgcactggtctacttcccaaggctattctcaagcattacatattgtgcccttttccaccttagcagaaaatactgcagttaccgttggcacacagatctttgctgtattatgaataactgcagagatggtactactggatcaaagagacagacaccctgctttttgccattacagaggattgtggacatctacattgctggccacagtacataggatctggggtctgatgggttgcattaacccatgtgttctttggtttggtgggggagggatgcgttgctctttaaatattaaaagagctgccatcacatagtccttgtatccacctgtcactgcccagcctcctgctcggtactaaatatcagggactggggacgtaactctcaaagtacagccaggtgagcttttgagtcccatgactttgtatcaaacgcaacgcccctgccaggcaggtcctgggggacagatggtatgacactttgcacactcacagggatcctcagctcgatctggaatcccacccattcaaatctcaaagactcaagcccctgcaggggcttgcatgctgatcctgttatggggagcagtttgcctactgatcttgcccagatctcagctccaacctgaggctgaagacatttaatgttttgttgtttttattgtgataaaatacataataagatatataataggctcaaacttactagtctaactaatttaagtgtatggttgaatagcagtagatacagtcacaccatcctgaaaccatcgccgtcattgacctgcagaggtctcatcttccactgaacagcgccccctcccttcagctcccggcacctgccatattgctttgctccatgatttggatcacttcgcatacataccagatctgtctttcagtcccagaatgtcaccacctaatgtcctggaggggaccaggatttcctgcttttctggggccgaatgacatgccactgtatttatatactacgtattctttaactgctcatccacggatgtgcatgtggcctgctccccctagtggctgccaagaatattgctgccaggaaccccaagcatagtcaaacctttgttgttgttgttttgttttgctttgttttgttttttattcccaggaatagagttgctaggtcagatggtaatttcacgtggctttttatttttagtgtgaattttcatgtatattgtggtcaaatgtggtctttatactagccccatgggataagaaagcatttttctgtggcttaaaaaagtagcttgctcaaattgaaacaatacataggagagtctcctgacctcaaaacttggcttccacatttattgaccattaaaaatggtcccaaccatgtgttgccatctaagaacaatgtcccttccttccttccttccttccttccttccttccttccttcctccccccatctttctttccttcctttcttccttccttccttccttccttccttccttcctctctctctctctctctctctctctctctctctctctctctttctttctttctttctttctttcttttgcaacaatggggtctcagcacataactgaatactgttttgacccggaacttgtgatttctctctcagccttctgagtgctgggataacagttgggtgccattatgccaggctttgcaacaagcttcttctagtccaggttggtcagctacctggtctctggttttctcctgccctgttcatctgacgcagtaagatctggttcaggcctttgtcagtgcagagacaggaggccctgtcactcctcagcacctctgtccttgctgagagaccaaaacctgtctcattgaagaaatgagaggcagtgttcatgcccagcaactgtacctgcacccaggggctatacatccttcagtttctgttttccctctttcagttgagaccctgtggtctgaccatgaggatttggtggcttctgctggttatgggtgcatgcacgagaagtgtattctcccaggacacctgccggcaagggcactccggcatccctgggaatccaggtcacaatggcctacctggaagagatggacgagatggtgccaagggtgacaaaggagacgcaggtacttgacacttgctgcttcttatggccttcttctatcccttcagtcacccacctgccactggtatactgttccacctgcccactgagccctcacccaccaatgtgccctgcaggtgctgaatgaagtgcagggcaaggtcaactgcaccccacccccacaggcttctcgtcgacagcagatgactgttaacaagtgttcctacaaaacaggcagaaacacagagtgggatactgcgggtgtgatgcatcattagtatcatgagatcagtggagcaatctgatggctaaggacagaggcaacccccatgcacagggagaaggcccacagtggacgcctatagccatagaaagcacagaaccctacccatgtcttgcttcctcctatatatgcatcatctatgataatgtttaatttctacactaggtaaggaataattaaccattaataataaaaaagattaaggattacattttaaagttcccagcatcaatttttcttacacttagagaaatttattgttacagttaaggttatgttgccatcagcattgtgaggttgccttggacatttgaatatctgagatggctgcaaagtgactgacaaggaggtagcatatggcttcccaggagctgtggccatggcatgtaccaccatgtctgggtcagtgtttagttttgaatgtatgaaggattttaatataatttatttatttatataaattcttagtgtatgattgctctgtctgcatgtagacctgcatgtcagaagagggcatcagacccctttatagatggccttttgtaccatgtacgtgctgggaattgaacttaggacctctggaagaacagccagtgcttttaaccactgagccatctcaccagctctgaatatataaagttttaatgtttattatcagatattttgtacacatgaagcagaggggtgattacaagataaatcaagaggaatatacctcaacctggtatgccaactttgtttacttctccctttgcaaacatttctccatctttcttggttgttaatccctccaccctttaaaaaaggttttttttttttagatatttaaatatttcttatgtgtatggatgttcttttctgcatgcatatttaggcaccacatgtttgcagtgccctcagaggccagaagagggggcattgagccatctggctgtagccccaatgtgggtgttgggaattgaatctgggtactctggaagagcagccagtgctgttaggatgagttcaattctaactcgttctccccttctctccctccctccatccgtctctccatagagttgcatgtagcacaagctggcttcaaacttgatatgtactcaaagacatacttgaactctttatcctcttgcctttgtctaatgagtcctgggattataggcgtgtaccactcactgtacttggctcaaaatctatctatctatctatctatctatctatctatctatctatctatctatctatctatctatctcatctatctatccattcatctctctttccctgtctctctctctctctccttccatcttttcctctcactggtggtggtggtggtggtggtggtggtggtggtggtggtggtggtggtggtgtgtgcgtgcgtgcgtgcgtgcgtgcgtgcgtgcgtgcgtgtgtgtgtgtgtgtgtgtgtgtgtgtgtgtatgtgtacatcatttttaggtatctccctctattctgctcagctttacagagggcagggtcttctgcagtacctgaagctttcatgtggaccaagctggctgactggctagcgaatcctcacgacccccgttacctccccccgcacccccccactccctgcgttccagtcctcgaatagctatgctcgagtttttacatgggtggtggggatttgaactccagtcccttgccacagaccaccccagtcgagtatgggggtccctggaatgagggtccttgaagctaggtgggtaaggattcggtggtgacaaacagaaacaaacacagaggcagtttgaatctgagtgtattttgcagctctcaagcaggggatttaataca

SEQ ID NO: 484 - DNA, 5593 bp, Mus musculus
gggctcgggacgccgcacccggccacgaccactgtctgactatggccagctggccggcagaagcttgtccattcctgaagatgccattgctgcagaccctccagatgaggaccacgtggacaggatgcacccagcaagtgtgactaccaccagccaggatccatgcgccccctcaggctcttgcaggggaggccggagaaggcgacctatatctgtgattggaggggtcagcttctatggcaacacccaggtagaggatgtggagaacctcttggtccaaccagcagccaggcctcctgtgcctgcacaccaagttccaccctacaaggctgtgtctgcccgcctccggcccttcaccttctctcagagcactcccatcgggctggaccgcgtggggcggcgacggcagatgaaaacatccaatgtctcttcagatggaggtgcggagtcttcggccttagtggatgataatggtagtgaggaagacttcagctatgaggagctctgccaggccaaccctcggtacctgcagccaggaggggaacagctggccatcaatgagctcatcagcgatggcagcgtggtctgtgcagaagcactgtgggaccatgtgaccatggacgaccaggagctgggcttcaaggctggggatgtcatccaagttctggaagcttctaacaaggactggtggtggggccggaatgaagacaaagaggcctggttccctgcaagctttgttaggcttcgagtcaatcaggaggagctgcccgagaactgcagcagctcccatggggaagagcaggatgaggacaccagcaaagcccgccacaagcacccagagagccagcagcagatgcggaccaacgtcatccaggagataatgaacaccgagcgagtgtatatcaagcacctgaaggacatctgcgagggctatatccgacagtgtcgtaagcacacgggaatgttcaccgttgcgcagctagccactatttttggaaacattgaagacatttacaaattccaaagaaagtttctgaaagaccttgagaaacagtacaacaaagaggaacctcacttgagtgaaataggatcctgctttcttgagcaccaagagggcttcgccatctactctgagtactgcaacaaccacccaggcgcctgtgtggagctgtccaacctcatgaaacacagcaagtaccggcacttcttcgaggcctgccgcctgctccagcagatgatcgacatcgccctggacggcttcctcctcacgcctgtgcagaagatctgcaaatacccgctgcagctggctgagctgctcaagtacaccacacaggagcacggcgattacaacaatataaaggcagcctatgaagccatgaagaacgtggcctgcttgatcaatgaacgcaagcgcaagctggagagcatcgacaagatcgcccgctggcaggtgtccatcgtaggctgggagggcctggacattctagaccgaagctctgagttgattcattccggagagctgaccaaaatcaccaggcagggcaagagccagcaacgcatcttcttccttttcgaccaccagctggtgtcctgcaagaaggacctgctgcgcagggacatgctatactacaagggccgcatggacatggacgaggtagagcttgtggacgtggaggatgggcgggacaaagactggagcctcagcctgcggaatgccttcaagctggtcagcaaagccacggacgaggtccatctgttctgcgccagaaagcaagaagacaaggccaggtggctgcaggcctatgcggacgagaggcggcgggtgcaggaggaccagcagatgggtatggaaatcccagaaaatcagaagaaactcgccatgttgaacgctcagaaggcaggacatgggaaatctaaaggctacaacagctgtcccgtggccccaccccaccagagcctgccgccccttcaccagcgccacatcactgtgcccaccagcatcccgcagcagcaggtctttgccttggctgagcccaagaggaagccatcgatattctggcacactttccacaaactcacccccttccggaaatgagccttacccagggcgtgcctctgaggtactgtggggaggaagaccagctttgtcacttcagcgtgatgtccggggatggcttcttgctcagtgctgaacacttcatttggggatcgatgaaggggagaagaagttggactcagctttgaccttgaaaggccccagcacccttgtcgaaggaaggaaccatgaagcactgttctgtcccacactggaagccacactctccggtggccatgatataaggaccagggcttctctgtatggagactgctgactcagtttcccactgacggtcacactcctccagttccgaacagtatcaggagcctttcagttcctcaggagcaactacattgaggacagcttctgtgtttgatcttaaaggagactcattgacaggagttggtaggatgttggcagccatgggatgacctgggtctggtcaggccctgaagagaccatgaaggaactagagccaatggagcaggtgcccatagttctccaaggtgtcacagatgccaagctagagtgtaggtctcatcctgcaaggttccttactctcaagagaatcgggaggcacctgctgccctggcagtgccggggatgatagcatcctcagggcagtgccactttccagacaggtgggaaggctgctgccacctgacttgtcccttcaaacagcggtcacgccttgctcacccctcacaacctaagaacctgccatccgcagaagtacgggtgatgtgaaacgtgtaactttgataatgtgacactgcatcttcagcggccctttgtatcactggtgggatgaagaaggcacatccacagagaaaaccagggcaaaaccatcctgcttcctggggaaatggacacgcctctgtcacgtgaccctgaaacagtagtaaatcgagaatggtcttgatggctccttagctctgagagagctgactcttaatgagggccacaggagctgacacccacagagagcaacctttctctgttgacactgtgtttgttagttgatgaaaatgccttttaactcgacctaagggagactggttctgcatttgaatctgcacagcgggctggccaggaggggtcctgccgtgtggctagtgtgttcctttggacgtgatcttgtatgcgggttttgtgcaaggttctcgcctctcatcagctctcgcttgaggataagcaagtccgcagtgtcagagatgaaggtattggtccgtcagcacagttcaccgtgtctccacatctatgcctgaaacaagtcacatcacagctaataaccttgaccctgggcctgggatcaacctcaaccctgctgtgcaccttggcatggtcacttataggcagcactgctgaggactgtagtcagtgccccccatcccccgcaggtgtgtctgtgtgctatgaagtggttcaggtgtacagagcatgcgccgtgtgtgtgtgtgtgtgtgtgtgtgtgtgtgtgtgtgtgtgtgtgtaagagggtggcagggagggagacggaggcctcaacttcactgcatttatataactgacaggtttggttggttggttggtttcttgtttgttttctaatagaatgtcaggatatatttttagaaaccatactttgggtacttttctgtgctccagtgtgtgtgtgcagcaattctcacagttgtattgttaatatgaaaattgctttaaagaagtgaatagtctttggtcctgttcattttcactgcggattcctcttgagtcagacccgctgcaggctccatttgctgttacagctgacgacagtgaagaaggctatgtttgtgaccggtcctaatagaattcccagctgccctaacttccagttcccaccacctccacagagccccctaacaatcccggatatcaggacgtgtttatattgagtcacattcaagacctgggctggccccgggtgattttatacagcctgagaagtgcttgatcaaataaagtctgacccaggtgacttacttgggatttctgggtgattttgaaaactaatgtgtttttaaaagatgtaatagcctttgactttgtaaaactctgtatgtcagtatgcattttattaccaaatacagaatgtggaggacctttagtagtttttattttcagttcgccaaacttcctttttgatgtaaggcatgtgctctactttggaaggaaatagaaacaacaaagaacctcctgcccagacggctcacgaacatcccctccctctccctcaatgggccaaataatattggtgatttaaaatgttgatgaattcatttgttctatttttagcgtatttttagcattccagaatttgccagctctgttcacgtgatagagaaggcctccctggcttagattgtacctataacgtgtaggcgtcgtgtggtaggtaaaaagtgatcacaacacttgaaggtgtagagaaagaaagaacattccagcagctgattgggcttgtgtgagcgtttgatgccggcccctagctcctgtcacctgctctggtcttccttgcctctcgcgcgtggtagatccacccctgcaggtgagagccaccaccgccactgtttctaactactgtgccttttactgtccaatctattgaagactgattcctcatcctgcgtcgctgttattacatgcaaagcataaagtgtatttaatttgaaacctggttcaaagcgcaagtctttttttttttttttttaagcaccagcgctccagcattgtgtgcttgtggggatctgtaactggattgctgatgtttctcaggacaaattagtccttttttccagccagagtttcctggagccagggcatggtttctgcattacggcttcatcacagataggaaaagcagaagtgtcctcaggccagtgccaagaaatataagtcagtgcctttcagctgacaggcaggatgctgggcacattgtgcccacagattgttccttctcaggacccggggaaaggggcgcttgaaagatttaggacaaagtaagtggaaacctctagccagtcttagagaggggaaagaaacatcagcttatataatgtatgtaaatttgctaagccaccccatgtacctaccacattattgcctttactgttctcctgggcattgccaattgtatttagaaagtactttgagccaattctataatttaattggtcctcttttggggtacatattggtgcccactgtgcatgacttgccgatcttggctatgcttttgatgataacaaatccaggctgcggtgctgtggtctgtaagagtcaagctgctgagctggtgggctgcctttgaccctgaaataggacccgcgtgctagacgtgcatcttggctgaatgaagggtttattggtttttagtgtctttttgttcttaaaaaaatactgttatttgatttcttgtaaatgctgtgaatctctatttgtcattttgtatttgtatattaaaattaatttgcc

SEQ ID NO: 485 - protein, 691 aa, Mus musculus
GSGRRWRPLSDYGQLAGRSLSIPEDAIAADPPDEDHVDRMHPASVTTTSQDPCAPSGSCRGGRRRRPISVIGGVSFYGNTQVEDVENLLVQPAARPPVPAHQVPPYKAVSARLRPFTFSQSTPIGLDRVGRRRQMKTSNVSSDGGAESSALVDDNGSEEDFSYEELCQANPRYLQPGGEQLAINELISDGSVVCAEALWDHVTMDDQELGFKAGDVIQVLENKDWWWGRNEDKEAWFPASFVRLRVNQEELPENCSSSHGEEQDEDTSKARHKHPESQQQMRTNVIQEIMNTERVYIKHLKDICEGYIRQCRKHTGMFTVAQLATIFGNIEDIYKFQRKFLKDLEKQYNKEEPHLSEIGSCFLEHQEGFAIYSEYCNNHPGACVELSNLMKHSKYRHFFEACRLLQQMIDIALDGFLLTPVQKICKYPLQLAELLKYTTQEHGDYNNIKAAYEAMKNVACLINERKRKLESIDKIARWQVSIVGWEGLDILDRSSELIHSGELTKITRQGKSQQRIFFLFDHQLVSCKKDLLRRDMLYYKGRMDMDEVELVDVEDGRDKDWSLSLRNAFKLVSKATDEVHLFCARKQEDKARWLQAYADERRRVQEDQQMGMEIPENQKKLAMLNAQKAGHGKSKGYNSCPVAPPHQSLPPLHQRHITVPTSIPQQQVFAEPKRKPSIFWHTFHKLTPFRK

SEQ ID NO: 486 - DNA, 37415 bp, Homo sapiens
  misc_feature (1)...(37415): n = A,T,C or G
gggagtgcagccagcacgaacgggcaggggtggggggcaggtggcccctggctctcctccagcattcctccaccgccttccacacaggggaggccgagggaagcccgacccagcctccagctctgagcggtgctccctcggtgctgctggagaaacagcatgccagaatctgccctctgcggccttgaccctctacagcagtccctcacctgcctctctgagaggggcctgggtcagtgcactgcggaaactgttgccactcctatatgcgctatactgagtgaatacatgtaataaaatgacaacaagcaccatatttaaaacaaataataaagcttgcctatggtgggttttctttcctttgagagctctgagagggcagggggcaggggaggggttgtggggctctgaaagaccctgagggactgcctagtggctcccaggaggacgccatgtcagggagggcgggtttatgggttgtctgccatcttatgctgtcctgtcctgttctcctgtcagtgtgagttgaagccgagcctgagacaggctcatagcaggattgctttgctggcagacacacctggctttgaatccagccccgcaacttggggaaagttacttaacatctttgagccacggtttcctccttcataaccagacagcaacactccaagatgcttgtgaggctctcaagaggatttattccagcgctgagcgcagtgcctggcgcacattaagatgccaggaagccggatgggtgattgctcaggtctgtccagccagttgggcagccgtcagaaactgggagggctgacgagacaccagcccagagagctgtcagggagcggcagagcagaggagagggcccaggatggatcggcaggtgtcagccaggatggacgggaggagccgtgctcagagccagcagccccaggacgagcagctcctggctaggaacagaagacaggcactgtgggacaagtcaaaggtaaaacctaagagctcaccgcaagatacaaagaagcccagagccaacgacgccccagctctgaactggagacgggacagaggctgagttttgagagcaggagggagtggagctgctggcttggttgtggggtctggagccaatggggtgttggctgcccagggtgcagggccctaagttgaatactgatgtgaagctatacattaagagaatgattcttcaaagctccttagacattaataacagattattagtgagagttaatatgtcagtttctaggattccttttgatcttattgttgtccacatgtttaaaagattgaaaaatactatttgtgaagaatggcttgaaagtctagattagatatactagtgacttttccaacactaacagtttacattctggaacatgaaacatatttcatactttaattcagtcacccaacactgactattaagcatgttccttgtccttgagaaagtcatagctaggataagagtagggacaggatataaagggacagatataaacttaataataactataatgtaaatgcgatacatattttaaaagaggttagtctaacatgtttatagaacatcaaaggcagatattgttatggcagaggatcagggaactgaaaaataagtcatggaaccgtcaccaagcaatgatggttacaacttttgtttgttgtttggttggtttttgtttccttaagtttatttttaaatagagatgggatcttgctatgttgcccaggctggtcttgaactcctggcctcaagcaatcctcctgcctcagcctcctaaagtgctgagattacaggcatgagccactgcgcccggccaatggttaaacttttgagggatgagccagaatttgatgggctgttttgggtgggaaagttgctccaggcggagaggtcagcgtggacggatggaaggattttgtcctattcgttggaataaggaacattcagtggtacacattggctaacgcagaggtttccagccaatgcaatcagaatccattgcctgcaacttgtggcttgctgcatggacaggcaacaaaaggcatatgtcctagaacaacctgagcatgtggtgtggtttaagtaagcttaacctgaaggtccagtggttcccaaatttttccaggtgtcagaatcatttgaggagcttttcaaaataaattctcagccaacatccttccccactaccaccacccaacctgactcagtggcccagggcaggggaggatctttatttttctaaacattttccatgtgattagatgccacaggccctgggtgtttgggaaccactgaagggggatggaccctggaaattgtgcatcatgttttgacgttgtcagttcctgtgacccagctctttccctctgtgtgcatctccgtggcctgagctcttggggttcacccatagtttcagcccacagagcagcagcccgtgacagctgctcccagctgtgaacacgagctgcccgcctgggcttgccatttctgtttttaagatgggaagtcagaatggcttatctcaactctgaggaagtctgagccatcagcaagaggttttctcaaatacatgattttagcagattattttaagggtgggggaatttccctgaagtcaagggaggggaaattccccaccaaggagtgatgctgggtgggagatgctggtcgggaaccagctgctcattagctaggcagtgttggagagtgcctcatgaaaatagctaaatctatgtctccttgttgtcaagtgcctgatgtttaagggctgtgttagatctcacctccctttcatttaacagaacacctcaacctccaccctgttatcacaccctcaccaggactaccctcccccacttatcagtcaggggctttttttttcctgatgtcttctctaactgtatttgtaacaatccttccaatttaaaaaaatgacacctcctctatggctaccacattgttctctgtagtagttcctaaagctaaaagtggccagggctgaaaatggggactggggcattctactcactgacagctgcagccaggaggaaagcagagagggggaggaaaatgagacatttgtgtaagggatggactggggaaggaccaatgcagccccaggaatcaggggcccccagagggcagtgtttctaggagtgatggttaaccatggttattgaacaagagcattataaattcactttattacatttttggaattgatagtactctgtggaacagatgtgttctcttggaattgtccccagtcagagaggcgctgatggtcagcacgcagttttgatgaccaagggtgtgctccttctacctgactgaagctgcgggaagtgttgtagaaagagcctgctctgtctgctctcatattgattgtatgtaggcatttggggttttaaaactgatttcaatttggagcagtctttgcttcttgtttacaagatcgtttccaaaaatggctttttgggcaaggtgcagtggctcacgcctgtaatcccagcactttgggaagccaaggcaggtggatcacctgaggtcaggagtttgagaccagcctggccaacatggcgaaaccccatctctactaaaaatacaaaaattagctggatgtgatggcacgcacctgtaatctcagctactcggtagtcttaggcaggagaatctcttgaaccctggaggcaaaggctgcagtgagctgagatcgcgccacagcactccagcctgggcgacagagcaagaccttgtccctcacccctcccccaaaaaatgttttttccacaccaattttttcaacaaaagaaactacagttggtgagaatgtggagaaattggaactgttgcgcactgttggtgggaatgtgaaatgatgcagccatgtggaaaacagtatggagagtcctccaaaaattaaaactagaactaccatttgatcaagtatgctaaagagttgtaagcagggtctcaaaaagatagtagcacattactcacaatagccaagtggtaaaaggagcccaaatgttcacccacaaacaggtaaacagaatgtggtgtgtatactcacaatggaatatttttggttttttccttttttaaaaatcaatggaagtgctaaccaaacaatggaatattatatagtgtttaaaaagaaggaagttctaacacttggtacacatgaatggatgtcaaggacattatgcttagtgaaatgaaccagccataaaaggacatatactgtatgatcccattcatatgaagtatctaaagtagtcaacatcatagaaacagaaagtggaaaggtggttgccaaggaacaggagaggaagaagaggaagttggtgtttaatatgtgtggccgttctgcaagatgaaaaagttctgtcgtacaagagtgtgaatatacttgacactgctgaactggaactgtgtgcttaaaaagggttaagatggtaaaagaaaggaagaaaggaagaaagaaacaataaaatttactttttaattattataatacattcatttctcctgattttggtgacatacattttgagaatttataatagctttacagcgtcaaaattcccttagataagaagtcatcattattaactttcatctgtagttgaggttcaaagcctattgaagttagtgaggaatggaacatgtagaggtgaagaaggcagcagcaccggcctgtgggtctggccattgtgaggaactctgcccagcagagctggcattgacacgctgtggactactacatctaagatttttcagctgaactgcaaattgctatttccccatcagcaattcgtaattcaattgaacaatgtctactgagagtatgtgacactttaaaaagtgttcaagtagagtggagtcagattacagagaagatataccgtaaaagaattttgttatgaagcaatagacaactcgcatgtcatttcttgtgacatcataaaaccactgttttaagaagttcaccttgggccgggcgcggtggcttacgcctgtaatcctagcactttgggaggccgaggcgggcggatcacaaggtcaggagatcgagaccatcctggctaacatggtgaaaccacgtctctactaaaaatacaaaaaattagctgggtgtggtggcgggcgcctgtagtcccagctactcgggaggctgaggcaggagaatggcgtgaacctaggaggcggagcttgcagtgacccgagatcgcgccattgcactccagcctgggcaacagagcaagactccgtctcaaaaaaaaaaaaaaaaaaagaaagttcaccttggaagtaatatataggatggcttggggagggaaacagagtcatgaagatgaagactggctgagggatttttctagctagaatctcagatgagcacaggggtgggagtcagagagacctgggttcctatcctggttcggacccagcccctgtatagccctgataaatgactcaacttcttggaacctcagtttccacatcagcaatttgcagttcaattggaaatcacatactgagtgccttctgtatgccaggtactatgctaggggctgggaagacaaaaatcaaacgtctgtcctttcctttaagtctgtcctgtcctttaagatggtaagcgacctagacagtaagcgtggggaatcatagaaaaccaccaggcctggacgaagcatcaaagcatagcacaaagattcttcctgtctagacatcagacactgagaaatcccactccataaaacacacttgaattatgggacaggaacacaggagtcattaactttaagggactttaaaatcgtgaaagtagttagggtggtgaagggaaaaggatacaaccagaaaatggaatcaggtccttgacaggccccactgggagcagggattggtagttggaaggaagggttagtgagggaacggagggcaggacatacggctgctctccagaatgggagcaaaacacacagatttggatactaacactgtttttaatatcattttgtcttattacaagtaacagctactgctggaggagacagttctgcccagtgggtaagagttagatggcctgagcctgctgcacacagctgtgtgttattgggacttgagtttcctcatctgtaagtggggacaactgacagtacctcccatgtagcattgtcatgaggattatatgagccggttcatctccacagcttaaatcagtgcctagcacattataggcacctgataaaataacatcttgcaattctatttttaatttttttttaatttatagagatgggtcttattatgttgcccagcttggtcccaaactcctgggctcaagggatcctcctgcctcagtcttccaaagtgctgggattacaagcatgagctaccacgcccagccacatcttgcaattctatactgtttttcaatttacagggtgctttcatgtatcatcattccacttgaggctcaaagcacaccaataacaagtacttgttcagaatgtataaacaaccctgagagatgggttttatcatccacattcaacaggtgaaaaaacaaagaaagaaacttgaccaaggactcatactcaaaaaagaaaaatatagaaaagaaaaaaaatgtgcatcgctatcatttgaaggcaagttcatctgaccccaaagccttgcatgaagtccacatgctgtttttccttctttccttccttccttccttccttccttccttccttccttccttccctccctgtttccttgcttccttnnnnnnnnnnnnnnnnnnnnnnctcccttccttccttccttccctgcctcccatgtatgccaggcaggaacacagttaagaataaagcagacaagaattactgcctttctggagcttacattctggatagtgaacagaatacattatagacggtgacaaatgctatggagaaaactaaaccaggggagacagtggagtgagagtgagggttgtggttttgagtggtatggtgaaggtgagagagggagccagtgtgtgtgtacctggggagggctgtcaggcacacggagcagcggccctgggcaaggagtgcctgcggtctttgcagccaagagcccattggttggagaggggtgggaggcacagtgtatctggggagaggtctcaagaactttggctgtctcccctgtggatgattctgagcagaggagtgacacaatccagtctaggaatggtttggcagcatcgctctggcagctatggcctgccgggggcaggggtggcagcagggagaccaggaggggctgctggagggagccggaagctggatgggaacccaggcttaagtggtgggaggggacccaggcttgagtggtggcagaggggtaagaggtagccagatcctggacactttcaggaacttgagtcagatctgccagtgagtgggtcgtgggatgtgagaggtggaagaataacctctgaatagataaaacatacaggctaatgcctgctttacagatgggaaaactgaagctcaaagagctgaagtgacttgcaccaaggtcatttagttaggaagttagtgaagcaaggacattcacccaggaattttcactccaggcgccatgactttccctcgtccatgtttcaagtctcttgcccctggcctctgccccccatctcctggccaggactgagtcagcccacccatgagcgcttcaagccatcttgcttccgcagtgtcgctaactactaatccatgatgttgaaacagttgctgttgaaacctctcttgtgattaacctcagccagagttgtcttttttctttacttttttcttttgaggcaaagtcttgctctgttgcccaggctggagtctggtggtacaatcagagctcattgcagactggaaatcctaggctcaagccatcctcccacctcagcctcccaagtagctgggactacaggtgcgtaccacgaccccgggtagagctgttttgctaagtgtttatgaagaactcagagagcagtcagtatttccagtccgtgtctctgtccagaggtttttctcctggtacctcctgtaaaggtctaacttttcaatagactcctgttaattgtgaatttatacatgattacaaccagctttttttctttctttactgattttcacagcaatagctagatcatggtaaagaattctcccttggaaaacactgttcagttcttcgaggagaaagcgtcatttttcagagctgtgctgtgggtgggaagccccaatgcctttattttactgagatgcacttttttttttttttttggctcaaccacggtttaaattgataaggaaaaatgctattggtaccagacagtgccagatcagtggttgctaaaattggaagattcctgctgctttaggcattagacacccagactttgtgtatatgctcctcacccaggagcatcaggatatctcggccagtaagcagcacagttcttgggcctcgtggtctgggcagccgctccagggttagagaaggcctttgtcttcagtgttgtttcccttggagtctaaaacacactcatgcatgaaaaaaatgatgtgcttcctcaagacatcccccaacccacccccaaactcacacaccagcaaagcatactagactaggtgacctcctgctctccgactgtacgcaccctggcctagcataggaagcagaagttacatttaaaacgaaacagtcaccatgcgttgttcaggctcccgtgtttctcagacagcacatgtctggctttctcaaggcctccagccacacccccagccagacagacatgggtacacacatgcatagctggctccctgctgcccacccacccgtgctcccagggtgcactcccttctcctgaggcgccaggccctgccatgcccctggcaaccgtcccctctcctttaatgagcaggtaagaaagctagggcccagaaggcaagaccaaggctgtggagcgctttcttctgcctcttggctttgtgcttaggcccgggaatttactcctccccctccaaccccgtctcttggtctcttagacagctcactttcactttttcctcacagacacaggccctgacctttcctgaccaaaactggggatgggcccaggcaggggagtggaggtgggtagagggtgactggcaccatgcactcagagcctggaaccctgactttgtccacactgagagctctcccctggcttccattgtcagctgctccaaggttccctggctgtcgcggtgtccggcgcacctgtctgggtggtttcacggctggggcacaggtgcggacccatgggccatgcctcaatgtggcgtgtgctgtcatggacgtaagcagctggttctcctggaatcacagaagggttctggaaaggaggtgatggtggctgggatgtcggggtttctctgagaggggcaccccaggcagagggggaagcaactggaaagccagagcccatgagcagacccagctcagtgggcaccactcacaggtgctgtgtccagagctcaggcttacaggactggggctgccaggtgggaggtggcctgagcacagtctgagagaggggctggggccgggctgggagaggcgccgctggcagcacgtgcacaccttcctgctttccctccgtcctgcttcaagagctccgtgcatcaccagtgcatgagcttgaactcctcctcatcatgacagccctgtctgtgcttggcaaggaagacctaaaatgctggtgcatgaaatactacttctgcagtgttgattacccccattattgtggatctttttccatgtttatcattgttctagtgccagactcctgggctctatttacagaattggttgcttgtgacagcagtgtggctgaagtgatgaggggagggaagggaggagaggcataaggggagcaggaggctaagcatgatggtggggggtgggagtctggggctggacgtgtgtctgccgagcacctggcacatggccagtgcaggtaagatgaactgtgcatagaaaatgcaggttagattgatccgaatataaaacatctccccaagaaagaactcttcagtcagaaaccagacccatccttttctagtcaagtaactagaaacgtggatttgccaagtccttgaggaaagcaagcccatggagcaccatcccagggcgaccttcagccagccctctgtccttgctggcacaccagcttctccctcaggcttctgctttttgttaaatctccagggaacttggaatttttccaaaacatccttgactgtatctctgttgctgcaggcatgagcttggcctcccaacatggatctcagttcctgatgccatttcctcgggcagctcttgttgctgcccactcccactaacctgtgttctccccagctggcttccctggccccaggctctgccccaacagctcttcctccacgtcgtagcaaagtctgtcattagcccagccctcatcgtgcgggacaccatcaccacagtagcactctctgtggagttccagctacttgtcaaggatgctaaaagtttcacctgcattctgtggcctgattcttcaaaaagaaggacatgaagctcagagaaatgcagtcacttgatttaggtcccatgcccacagaagggcaggaccagaattcagacgagactctgtgaccctaaaacctcttctctttctgtcatatgaggggactctacttaggtcctgtggcttcctttctccaaaccctggaacagcagcccaggatgaactctagcctgtgagacccttctgtgtgcccccgatctttgcagtcttgtctttcatgagatgtgcagggagtctgtggagcatgtgcttcgaatcaagccacctgtgatttgcaatcgggccatcgcactgttctgagtcgcctgctcctcttccaggaagcctttccctgactggggaggatcccttcctctttaaaatcctgccacttgcttcagactctccctattatatttccacttcctggctgcagtcatcagaattcgggttttattgcatccccttaaagacaagggtcatctgttgtatagctttctgtccccagcacctgacagtcattccgttggaaaaaatactgatagattgcttcttggacttttggctaagatcaagtagagaaacagtgatggagacatccctgaacttgcacaggaggactgaggccatgagtctgaaagaagagactgctcagtgacagattgttggctttgccaagggtggctcattttcccaagaaagaaaatctgactagcagggtggccaatctaaaaagctgcaccatccttaaaagatctttctctctcttttctggtaaaagtactatataattcctcattctcatattttgagttccaagcctttcaaatatgtacagagagtaagaatgatggcacttttctactcaagacactgttgggatgtactggttttagtaatactgttgccttgcagataaaggatggaagcagaatattggatcatctttttcatcttttttacctcctcagctttccagcacattgcttggcagcattgttatctatatttatgttgttaatatccagtttggagcacagacttccaactaaattacacataatatcctgatggtcttcactctgcaaatggtattgtgttggcaatacactctttaacattccacctctcacttaatgtcacacttaactgcagctcttaactttggagtaatgtagacattttctaatagtttcttattctgagtaagatgcagatgattaccttcccttgggagtatgttaccaaattttttcatcatatgaaaaaatcttgttagctgtgtcttttaaatcatgcctttgttttgtatgttttagtttcttcagatggaggtactgagccctctgccttagtggatgacaacggtagtgaggaggacttcagctatgaagacctctgccaggccagccctcggtacctgcagcccggcggggagcagctggccatcaatgaggtactggaattccacacgacagtagtggatacgggatacctgattttcagggtccacaaccacttctgactttgttccctagttcttctttactaagcatgtccgaaaacctggaactctgattaaaacaacactgtgattcactttggaaggccaaggcaggtggatcattagtggtcaagagtttaagacccgcctggccaacatagtgaaaccctgtctctactaaaaatacaaaaaaattaggtaggcatgatggtgcgcacctgtaaacccagctacttgggaggctgaggcagggagaattgcttgaagctgggaggcggaggttgcagtgagctgagagcacaccactgcactccagcctgggcgacagagcgagactccatctcaaaaataaagaaagaacaacactgtgattctctgacctcgtccaggaaaatatatgggattaagctttctgggtagaggcagctcgtctttttaggtaaggaacagcagctccccatcagtgttcggccagtgctttccacttgataaagaataccctcccctccactatctcgtgtaattctcacaactgatctaagaagcggacattatggttattatccacattttcatcaacgctctaaggaaagatgtctaattactggctggcgaatggcagagctggaggcacccatgtatttctccctccaaatctggtgttcctttggccaccctgcagctttagctttttttttaggaaatcattctggaagatacctccagcttttggcattcttgagcagaacgtgtggagcataactccttagtgagtcagcgtctttactgagatggccagtgatgtgtatcgttgggcgctaaggagatgggcaaaatcacctgctcccgtggccaggggatggaggagccacatctgttcctgactttttaattgttaacgatctcaagatcatgctatgttctcttcaattgctgtaaagtgtaaagttagatgcaaaacttactcgaattgtgaataaagtatgaatgatccacactggagggagatgtgagggacttccaatagcatatgtgcataactttagtaggcttggctctgtgacatctagtacggctgccagaaaccatttttggagcaaatatttcagaattcaagtttgctagataactgacctgctgctaagtgagcagctagtacttttttaaaaaggggcctgcctgcctgcctgccttcctccctccctccctcccttttttcttgcattttgctcttgttgcccaggctggagtgcagtgatgtaatctcggctcactgcacctccgccttccaggttcaagcaattctcctgcctcagcctcccaagtagctgggattacagacatgtgccaccacatctggcttttttttttttttttttgagacagagttttgctcttgttcccagactggagtgcaatggcacgatctccgctcactgcaacctccaccacctgagttcaagtgattctccagcctcagcctcccgagtagctgggattacaggagcccaccaccacgcctggctaatttttgtatttttagtagagatggggtttcaccatcttggttgggctggtcttgaattcttgacctcaggtgatccacccgccttggcctcccaaagtgctgggattacaggtgtgagtcaccacgcccagtttaagcgctttctttaaaagcaggtagagatgtcctcctgactttgttttttcttagtctgttctcctgggttctctttgtgtaaccagtcacatagtcagtgtggaccaaatgccaccagcatatccaagtgagaggataccagtgtcaccctgagagagtgcacctagtggctccctcaccatcccgcccactcgtgctctatgctgagcgcaccccactgtctcctttcagctgatcagtgatggcaacgtggtctgcgcagaagccctgtgggaccatgtgaccatggatgaccaggaactgggcttcaaagccggggatgtcatccaggttctggaagcctccaacaaggactggtggtggggccgcagtgaagataaggaagcctggttccccgcgagcttcgtcagagtaagtgtggggtgcttgcagcttttccaaagtacctgggggagctgcaggatcctttcaggtcagaactcgccttttatcaggtcagctcttttgtaattgatatctgacatgcaagtcacacctgtaagaaattaggctgggtcggagcaaaaatgttaaaggcaggcaagcgagttgctcggtgtttctctgtggtcctcgtgcctgctggcatagccgcagccctgctgaggccatgagactcaggcgagggccaggctgccttcctaacaggtcacaggaaagtaggaacctgggaggtctcctgcctctgctccatgctgccctcccctgccccaagtcacctgtcccctgtatgtgggttgcagttgcgagtgaatcaggaagagctgtcggaaaactccagcagcacccccagtgaggagcaggacgaggaggccagccagagccgccacagacactgtgagaacaagcagcagatgcggaccaacgtcatccgggagatcatggacaccgagcgggtgtacatcaaacacctcagggacatctgtgaggtgggacgccaggctgggacctcactgagggtcacagtatgaggctgcatgaggtgcctgggctttctccccacctccaccccccgcccccccatcaggctcccacatgtatgctcatttctccgcctctgctgtctgcactgctaagtctgagtgctgcggctgtcctagctgttggtggaggttttttagagtcagggtctcttttcagagacaaggcttttcttagagatagggtcttgctctgtcatgcagactggagtacagtggcgtggtcatagctcactgcagcctcaaactcctgggctttaagcagtcctccctcctcagccccccgagtagctagggctacaggcatgcatcaccacacccagctaattttctaaattttatatagagatagggtctcactgcgttgccgaggctggtcacgaactcatggactgaagcaattttcctgccttgatttctcaaagtgctgggattagaggcgtgagccagtgtgcccggcccctctcttaagtgcactctgcaactatctctatcaggacctaattcctgagattatttgaaaagaatggctttcatagaaggcaacaccctcacttgattttacaaagagtcaaaggtttgtcactatctgcaaccccgctgcatctaatcaccaactgacagatgagatcctgagtcatttagacacagatgggaaaaaatgctggttttatattggtcatatgaaaggctatattctattgtcatgctattctacttggcaacaaattttattttatagttttatcctgatttcagagaacttgtcattagtagaggtgcacctgaaaggttttgtcttcctgtggtattttgtgcttctatggattgtgtacgagcatcacactacactgctgttcgccctgtctgctcattacggctctcctagctgtaaatgctgatatctgcactatcagttcaacgctgaccattcagtgctgaagacaggttgaagtcagagaactgcccgttctctaatcggattagccagctgtgtggacatgccagtgtttagcttctttgtgccagccatctcgttctgtatgagtgtgtggcgaaagaagcaggtctgcagtgccatttagggaaataagaggaagtgcccatgattattgagcattgactgtttgtcacccctcacctggattaactcagctaccacagcattccccctgagcaggtcctgttagcccccattgcagatggggaaacaaaggcacagagaagttaagtggtgggattggatttaaacccaggcagtctgccccagaacctatccttttctgaactattacattatattgttttcctgttaaaattcataccaagtagtcattggtatgtgttttactccatggtcagtttattctactgaatgtcatgataactctttttgagttagctgttacatgtatgtacagccttttcttcttatcccactagctcctacctaagccatagtatagccatggtgttgcacatagataattagtgcaagcctcagattaaagacccacagattgatgctgtccatagaaaggcggtgctggtggaatccttgggtaagaggaatccttgccctgatgaacagtgcacagagctgcatgggctattcagcaagcagtgacattctgcatttgacaagtctcctgggctgtgaaatggaattagggttgggagaatgattacctgaagagtttggaaaaacacgtgacgacaccaatttttgagctctggtatttgaaacttgtttctggaaacattatatggtttattggatcctaaatccaaccgcatgagcctttttgctttctttttattttaaaacacctatggcaaattgcagtcatggaagtacgatgacctcatcagagactcatagagtctttttaattaaaattcattccaagttcatggctttaggcctacaaaagctgtactattcaaataatttatttggatttccaaataaaaagtattacttctgtattttgcagggctatatccgacagtgccgcaagcacacaggaatgttcaccgttgcgcagctagccactatttttggaaacattgaagatatttacaaattccaaagaaagtttctgaaagaccttgagaaacagtacaacaaagaggaacctcacttaagtgaaataggatcttgctttcttcaaaatgtgcgtcaccctttacttcattattaataacatctgcttacataattttgaagtgcatctccacagaaaacaggagtctcttttgttttattgtttgtttgctagatgaatcttccatagaaaggagatgtttcttctatcttatatgcttatcatataaacaaaatctgtatagttaatcttgtctaaatgtcccaaattcattttttcaaaatccttttatgtagtctggaattagggggttacatttggagtaattactttttaaaaatttctaagggttatgccataagaactatggagtccttcctaataatatccaggaagtgtctattacatttcaggcactgtttccagggttttcttatattagcttgtgtattgctatgaggtagatatgattatctctcactttctagatgaggaaactaaggcccagagagtaagtaacccaagaccacataccagtaagaggcatctgtgaaggcagacccgggcatgcggctccaggacgcatggttgtgatactgtaactgcctcagaaccttcctgtgataacatgcatttatcattttttaacttatgattgactattactacttaaccgctaaaggatttcagaggaagattttagtcccagcccaaatagctagggaacagtaagagtaataataataacaatgacagcctcaccacaccttcacttcctgggtgctgggctcagtagctgtctagagtcctctggggcagatagattttaagtggctgggcataatgtttttgtgttaagttagtcagctggaggctgggccccatgtgtgacgtgggcatatctgggacattgtcacaggcctccttgtgtggcctgtgcagaaggttcctgcaggagccagcttaggacaggctggaggccaggtggtggcatgaggaaggtaagtctcacagtgaggacaggggagtactgctgccaccagggaaggggtcttggcgggcccagccagggtgacggcagagaattgggaagagaggtatgttgaaatgggcatttttgaggaaaacctgacaagactagttgtaaaccacaaagaataagcaacgattaaaactgcatacatggttttcagcgagttgaaaaaatttgtgggagggggacgttagaggccctgctccccaccttccaggatgagcgtgaggcaggctagaaagagaccagggtgctgagttccagggcagcctcatccccaaccccctcaggagcctgctgaagcaccccttctcgccggccagataacgcttgcggaaaccatggcagggcagcttgggtgccagcggatttcatgccctgtccttcttgcagtagtccatcttcctcctttctaggagtgtcccttagagagggctgggatgatgcctgtctttgtcatgtcccagaggcaccccagaagctgacgaagctgtacttttccttcccagcaagagggctttgccatctattccgagtactgcaacaaccacccgggcgcctgcctggagctcgccaacctcatgaagcagggcaagtacagacatttctttgaagcctgccgcctgctgcagcagatgattgacatcgccatcgacgggttcctgctcacaccagtgcagaagatctgcaaatacccgctgcagctggccgagctgctcaagtataccacacaggaacacgggtgaggggcatgggtaaggggcacaggtgagagcactgctgccattacccgtaggcagctcttaactccaggcagtgataggtgggcttcagtgtcagccttaacactttgggagctccatgggagaagttttcaggttgtttagaatgtgtgcaattaactattgaaatagagtggttgaagagcctccaggatatccagtcctagagctatgaagacacaagggccattcgtgagctgtgccacgagtgcatggcggcttttgttgtattgttatgttgcttacctgtattttataaacatgtctttgagtactcagtagttagtaaagacggtttctgagggaaacagaccagtgtgaatggaaagccataactctggttctctcctgtacccttgaggttgacgtacagcagctcggctcagagcaggattctttatggcagaaacattacttactagtggcttacctaaagttacttgttgttaagcagtctctatttagcaaccccttctctatttagaaggggtgagggcacacacaagcttgaactgtaaaagggtgtggattgtcaggggtgcaaacccatatggggcagctgagaagaccagggcattgggcacctgctgggccctgagccgttccctacccaccggggtgccgactctctggtcttctccctgttccctcctgctgggagcacagggcttccttccatgcttacctgaatgctgcatctcccttcgagcttccttggtgcctgactaagctcttcttgttactcacacttctgttgtttggatctcggcttctcctgaacaacaagcaacaaaatacactctctctctgtctttatttttttttatttttattttttttttttttgagacggagtctcgttctgtcgcccaggccggactgcggactgcagtggcgcaatctcggctcactgcaagctccgcttcccgggttcacgccattctcctgcctcagcctcccgagtagctgggactacaggcgcccgccaccgcgcccggctaattttttgtatttttagtagagacggggtttcaccttgttagccaggatggtctcgatctcctgacctcatgatccacccgcctcggcctcccaaagtgctgggattacaggcgtgagccaccgcgcccggcctctctctgtctttattatctgccttggttgtttctggattcttctcacgcccttgttccctagctatatgatctcttctgggggagccaaaagttaccctttgtttccttaatagccaaccatcatttcgtgcatgcacagaagcctttgtgtggttatacattaggcatgtcacccattcagcattggaatgtgcatgcccattttccatgccatgggaaaatgtcatcacagcacagcccagctgttgggtacctcaaggtagcagtgcttggctaattctgagttctcacctggccagcagggacaggatagtcatagggcaactgctatgtgccaggctccaagccaggctacccaggggcgcaggggtctaggctaaagctgactcttttagatgagaatcgaaacagggtccatgcccctgacacaaagtctttaactgcacctgcagctctggagagggtcatctcaaagggtcctaatgagaagaggaagagggaagggattgtaccaggaggaaatttctatggcaaaccacaacagttctgggtttcagcagctaaatatcttcctgcagggagtggagagtgaatcattattttgtcctctctgcctctgaactcctgtggagagacagacttaaaaaaggaaacttctggccgggcgccatggctcacgtctgtaatcccaccattttgggaggccgaaacgggtggatcacatgaggtcaggagtttgagaccagcctggccaaatggtgaaatcccatctctactaaaatgcaaaaattagctgggcatggtggcgggcacctgtaatcctagctaattgggaggctgaggcacgaaaatcgcttgaacccaggaggcggaggttgcaatgagccgagatcgcaccattgcactccagcctgggtgacagagtgagactttgtctcaaaaaaaaaaaaaaaaaaaaaaaaaaaggcgagggtgtggggagagccttcttacaattagattggaaagtaaagaataagagcagatcactgaacaatagacactagatatgggtgttagctaaagagttaggactaaaggaattagaaaaaggagttcattgaaatagataaaagaagagagagctatatatttttttctttttctgatggagaaatcagaaaagttcagtggaaaaaaaaaaacagggaagtcaagagagccacaaaattgaagaaaaaaaattatagttgtaaataccttctacagattttcaaagacacttttaagaaaatgtcctgatggcatgatgaggagtcagagccaaagacaattaataagaaaattaagaagcaaagacttcttgaaagacgtgggcaggcagcttagtacattccgagatgggaaagctgggtccagaagtccacacctcactcttcagtagttgattttcttcctttaagggcatttttcaccaagagcatttgcagattttggttttttcaaaataaaaattagttgacatgacagaaagtccatttccttgtcttaagtaaaacaaagcaaaaattcttttaaaaaaaccattacaatttagttttgtccagaaaaacttattttgcgaccctttcttcattgctggaggcctctttgggggctctgtgcccattattttggcagtccctggtgtcattcttgctcctgctctctgcgccacttctgggtgtgaatgggcgtctctgaagacagcagggtctgcttggtgggcagtgtctggggacttcacaggagctgggatgaattgtgtttggtaaatagacaatagaatctgctttcaaggctttcccatggctgcgcaggaggattctaattcattccagctgtgatggagtggccctgtctgtgctgtaagttgccacgggaaagcggaaaatatagctcattagctggatggttggtctccgtggccccgcattattaacgctgagcaaaacctgaatgggaagcttgcagatactggacatgctctgtgctagcctgtgtgtagattaaaactgtagtttctgcttttccggtgcctacagttttagcgggcttgggagcggggccctcctggggagaacattttagcttgacgtgactgtggtggacggaaagcaccagaaaggaagatctgttggtgaggcgaatgccatactggcatttccgtaactcaccacttcaggtgcctgtcctctcctgtcctttcccgaacagcataaaagatgaagactcagagcaaatagtcactgttgaaaatggttagtgatttttaaagtactttatgtagcaagagtggttatatgagaatcagagccataataaagactgttctttctgtattaatgaaagtcacccattgtcaccgtgactaaaacttacttatttgtggcatttactgtcattcattgtaatttctgggaaatgagtgaaaacatttttattccaaagaattctgaattgcactgggtcagctcccttaatctatggcagactgtagtctattcacaagggaacaagaaaaagggaaacagtggctatgacgtaaatgtcactttgtctagagcattcgtatacgaagaagcgccccagtggattattttgccagtcctcatttgtaaggtgcatgttatgtgattaaaattaacctcccatcttgcagtgattacagcaacataaaggcagcatatgaggccatgaagaatgtggcctgtctgatcaacgagcgcaagcgcaagctggagagcatcgacaagatagctcgctggcaggtgtctatcgtgggctgggaggtaagtggaaagcaccccgcatgatcccatgccactcgcccctcccgcacctttgatctggtgcagatgcactttaatatcctgtggtcaatatcttatattcttggctttaatggtacatataccattaatggtaaatgtatttcgaggcatactgttgaatttaacagtcgactactttataccccactcccataagaaataaaatctgaagagtatctgcagttaatttattgctgagcctctctctctcctcgtagagggagtaccgtgggaacagtagagggcatttcagttgcagccacataacatagtagtagaagtatgggggactctggagtccctgcccacatgtgaatcctgtatgatctggccaagattaatttttttatcttataaattggggaggaaaatattacctacctcataggctaccgtgagcattttataaaacagtacaggccaggcacagtggctcacacctgtaatcccagcactttgggaggccaaagtgtgagaatcgcttgagcccaggagtttgagactagcctgggcaacatggcaagaccccatctctacaaaaagtaaaaaaaatcagccaggcatggtggcatacacatgtattcctggctactcgggaggctgagttgaaaggatcacttgagcctaggaggttgaggctgcagtgagccgtgatcgtgcccctgcactctagtctgggtgacagagcaagactccgtctcaaaaaaaaaaggaaagaccacaaatacaatgcctgtaataatggtccaacaaattctcactctctctctctctctctctctctctgtattcataaaaacagtgacaatagcacctgtatgtgtttaccacatgtctgaatggcactgatctgagccatttgtacatatatgaactcatttaatcctctacaccatcctatgaagtaagcactattattatacccatttaacagatgggaaaactgaagcacagaaaggttaaataacttgcccaagaccacacagctcaaaagtagcagagctggattcaaacccaagcaggcaccctggcttcaaagtccgtgctggtgatcactgtgctctaccgccattaaattaagaacaacaagcagatgccattcagattgtttttagaccaagctacattgattttacatctattaattggtcagaactcactctcccagaggactgagaaagtttggagcaagaagttaggtttttaactgaaataggctataggtggtgaaaattggagagaaacacatacatttcaagggccttatagacttctggagtttgggcaggatctctgagaacactgagtccaactcttttatttcatcagtgaagaatctagggcacggaattgctctgagcaagtaaatagaagaactattttggagtcaggctcttttgcctccaaaaaatattgtgtgtgactgggattaagggagaatcaaatcttatttaacaaaggccattgtcataccaaataccataaagtaacattggattagattcaacctaaatataataaaagtgtgtttttctttttgattttggacgctgacatttaggggataatttgtcagaagttaatttcttgctgacaatttatcgtctggccttttgtttctatgaccctgaacaagttgcaattccagggagctgccatatactcaacgcaaataatgtcaggtccataatcacgatactgtgtcccctgcatgaatgctttctcccatgtaagcctgcgtgctctcactcttggaggctccgtttgggtcagctgctgtttcagatcttgactgggttccattaattcagcatgcctcttaccagaggcttcaggctaggaagacccctcagctaacacagaggcactgtcacatttttctagtaagcaggaaaaaaaaaagaaaaggaagaaatttcaggcaccaggagaccaataaatccaggtttattacaaataacctttgaggccctgcccacctgtgaatggggacaggtggtaggcagcctcaggtacctagaaagtctgagaaagattctgtgttaggagtctcttccatatcctaacacctgaaggaatccaaattgggagtttgtttttgttgttgttgttgtttgtttgtttgttgttgttgttgtttagagagaagggtcttgctctgcccctcaggctggagtgtactggcgtgatcaccattcactacagcctcaaactcctgggctcaggggatcctcccgcttcagcctcctaagtagctaggactacaggtgtgtgccaccatgcctggctaatttttaaaattttatgtggagatggggtcttgctgtgttgcccaggctggtctcaaactcttggcctcaacgatcctcccaccttggcttcttaagtagctaggactacagctgtggtagaattggaaggtcttaagatgtgttttcatccttccagggactggatatcttagaccgaagctcagaattgattcattctggggagctgaccaaaatcactaagcaaggcaaaagccagcagcggacgttcttcctgtttgaccaccagctggtgtcctgcaagaaggacctgctgcgcagggacatgctgtactacaagggccggctggacatggatgagatggagcttgtggacctgggggatgggcgcgacaaggactgcaacctcagcgtgaaaaatgccttcaagctcgtcagtaggaccacagacgaggtttatttgttttgtgccaaaaaacaagaagacaaggcgaggtggctgcaggcctgtgcagatgaaaggaggcgggtgcaagaggacaaggagatgggtgagcagcccttggctctgcaggcacctgtgcctctgcttgctgtaatagcttcattctccactcccatgggcctgctctgcccagccttctccctcagagctgaatcccaccatggggaaaggacaagggatctgcaaaccctaaatacttctgaatgcacttacaagacagaccatgtcagatgtagttactaccggcaacatttattcagtatttaccttgtgccagacattctgtggcccatttatagagattgtctcattgaatccctatgaagtggttgctgttattatacccaatttacagatgagaaaattgaggcttatggaactggcccactcttgcactgtggccacataacatttaaatccagcactttggatgccacatgcagggtatgaagaataaataataaaaccagttcagtgtgaccccagagatggaaccccactatggtgaccatcacccaggctatcagaagtatcacgtgattctggaggcctcccctttggctgtgcctgtgcaataccttcagtgttcttcactgccacagttgatccacacccagcagcctgccctcatgcttcccatctctccctatgaaactcaggatgccgcatcgtccattgcagttaaggcgatggtacttcacacccagtgttacatttgtacttctttggtttgtcttcccagcttctgctgacctggaggtgcagtgtggcccctgagactgaagctgccatgcctggcattaatgatggcagcacccacagtctctgagcctctatttcattgcctcccaagctctttagggttttgagcacaatctgttgaatggaagtcagggagccacagtgaaggatattcatctctgcagcccaagtgagcccagccctcaaaagtcatggtccaggacggaggggagccagcatacgcccctccccatccttgcccactgccatgaggacagcaggactaaaaaccaggaggtgctttttctgtcctccccagccactggctctaagcttggctacagaatttggtctcacccacaggaggttttgtgagattctgcagtagagttggagggatttacaagttggtcaggctaaaacggaagcagggatcgacttggaaacactcaatgggtagacattggcctggacttgggccactccaagatacagagctccccacatcacaggcagccccttacaccaagtgtcagggtgtcctttacactaagaggaaatctgattcccagcaacagccatagattattggtgcagactctggggccccattggaatagggctaatcactcgtgcccagaattcatttgaagatgacagttactaaaatgcaaaatgacagagccacaaaatcttagttttagtcgtcatatgacgttgtctagcgcaggccctgaagtcatctgtaagtcagagtgtttggattcccaaagacggcactatttagtgggggcatcctatgtgctttcaacagtgtctctcaataggaaggaaaggaggggcccgatgtggtgccctttgccatgtaatgctccctgtggccagtgctcagagatgcaagtgcatgactgaggcactcctgagccagtaagtctgtgaactggcacgtgtgggataaaactggatgcattccttgcctcgaatattttggcagccctcgtacttgatgcatgtgtgtgggtagaagcttcaggtagcagatcagagagaatggacacggagggccttggaggcagggacagcccggtggccagcgtacagagcctgagcctgacgtcaggacagtctgggacagatgttgggcatgtgaaggaatcagggccaggggagcagagtgggcagaggtagagagggagcctcgggagcgagccaggcagtgcaagctagcagacacagggcctgggtcagctctgccaagctggagcgagtacctgcctacaggaggaaggcttcccgcgggagaaggcagggccccagcacccagccctggccattcagctctgtccttccttctccttccccacaccctgcgaagccaagggttgcctcatcttgtctttccagtgactcttgtttcacccagttcacacactgcacacgtacactgtcactgtgctactggactttacagtgagggaatgctcagggcacacactacacacagctggggtacagaatccgctacctgctactcacgtggtacctttgttcagggtggaactgctaacgtgcaaagctctcatagcgtatgggtgaacacgccctgggaccctttgctctgtcctctccttctggggcctcatcctttaggttataattgggatgaccctgtgggaatatttgcccgggagcgtcgggcttcacacagacattctgcattctcatgagcaccaccccatttcactctccaaactgtccgggtttgcaggacaatcacatggccaccttggcgataatccttgtgacttccccttttctgatcttcaacctgtccacgttctttgaggattaaggttctctgtctcaggttgtggtgataacctcaatgctgatatgggctgtgatacaagttttgctctgaaacatgtccacgtgttctgaatatatatcacatttatttctaaatgcaggaatggaaatttcagaaaaccagaagaaacttgccatgttaaatgctcaaaaggcaggacatggaaagtcaaaaggtaagttatggagaaggctttgtccccttaatgcttatcagtattctcctgaaaatgggagcataccccaagttgtcagcctgtgaccagcttggagcaaggagaacagtagaagttagaactcaagggcaggtccagaacaggggccaggtgaaggtggcctgtgtttggttttgaatgtgcgtcagtgtttgcttccattggaatgtgggcataggaaaccttcagaggggctgctggagggtggtggacctccttgcctgcctggggcccctctgctcccctcccccaagtgctgatggtgttagccacaaggtcacgcacatccccagtctgaggcaaaccaaggactcttgcatcttttaggcatgagaggacaaaatctcaaaccccaaactgcttgtcagctgtaggctggatatagtctagtttaagtaagaaaaagatgtaaaggttcggtacatcaggcaaggagttagacaaaaaaagacacgtgagctgatttagggcggtgattccctaatctccatgcacattagaattccctggggaagctgttcaaaaatgctgatgcccaggccgcatacccaggggctctgatgcactaagatttgtccacacaaatctggcccaacaggatgcagataatctggcccaacaggaattcagtaataaggatttttccccaaaaaatatgcactgtattcttagaaactttattcccgtcatctttctactttaaaaggcatttaccccatgaaatgtatctcttttggtattttcctgactgcaaatgcaaaaacaaggaccaacgaatcccaggactgcaatagaccactgacctttagtcagtgaagaactgattccccaaaccacacttaacactcccctgctttctccatgcaaatgcagaatttcttttccccactaagttacaaatatctttaaggcagaaaaacccatgttattaatttttttaaatctccacttctaatgtcagatgactagtaaatcaatttgttagaatacattgttttctgtccatatcttctgcgagtcactcgcccagcagccaggcttctcaagaacggaaggactgctgacgttcacaggtggctaccgggtgggacgctgtgcctgggttatctgatttcttccttcctgccacctcgggaggtagggagagccttctggcaggccaggggcagggacgggttctgagccaaggccttcctgctttcagggcccaccctcttcgtgccatgctgacttacacagttacgttttaatctaatcgctaattttaataaaccttctaaattacctctgcacagattaaaaatacctatgccggtgaagttttgattagagtgattagatattgagggcacagttctaagcactttacttctattaattcatttaattctcatagcaaccccataggtactgtaattcccgttttagggattggggaaccaaggcgtagagaaatcatatcatttccccagtaatcccagctgataaatggcacagaagaatttgggccaaggcagcatgagctccagacttccatttagagcattttattgctactcaccttgactgtcagtctggctcagattctgccacttcccgctgcacgtcctggcattcagtttctttccctgtcaagttgttgtcataataccctccttggaggctttttgggagagttcagtgagagagactgtgtcacgctccacacggagtacctgaacataacaagtgtagctactggaccttctttttggttaacgtgaattaagaattagctctctacaaaaaaatataaaaattagctgggcgtggtggcacacacctgtaggtccagctacttaggaggctgaggtgggaggatcgcttgagcctgggaggtagagattgcagtgatccaagatcacaccactgcactccagcctgggtgacagtaagaccctgtctcaaaaaaaaaaaaaaaaaaaaaaaaaaaaagaattagctgagaacttggacttggagtctcagcatttttatttttttcctttctggttaacaagcgaccctcagtccctgttccatctctctcccctcccgagtcaggctacaacaggtgccctgtggccccaccgcaccagggcctgcaccccatccaccagcgccacatcactatgcccacaagcgtcccccagcagcaggtctttggcctggcggaacccaagaggaagtcctcgctcttctggcacaccttcaacaggctcacccccttccggaaatgaaaacaggaggctgtgcttccatggagctgggtgtcaagagaagaactgtctttgtttcttgtgtgcttcaatccagggaaagtttcttggacccagtgataaaaacttccttttagggatcaatgaaggagagaaggtcttggaatcaccttcagtctttggagacccagctgcctttgtggaagggaggagacggtcatgacacaaagctttatcctacacagaaacacccgtgacccactatgagatggcccagatgtgggacccggtaccatgctctaaagcgagtgattaggcagcagctgaagccacccctgctgatgatgagcaagtgcctgctgcaggtccaaacacagcatccagggctttgcagttcctaaggagtgatgaggttagaggatcacttctgcatttgattttcaaggatgccgtcaagacggggttgacacaatgctgcacgtgtctggtcacacttagaaattgagctcttactctcttctgtaatactgggggacctacagctgccgtggggctgaccacggtgttccctggcatcgtctgtgtccacacagatgctaactggtagtgcaaatgtcatcctgcaaggttcctcttcctgcaagcaaagtggagagaaagaagatgcatctgtcaccttcatcagggtcctcagtgcagagcaacttacgcatcctcaagaatccactgcttttcaggcaaggagggagaaatcctgctgcacactggctttgtcccggagtcggattccctcctgcctgcacgccttcagtaactccgagcagaaatcacatcttgcccacatgctgtaacctaagaaactgctatgcaaggctgggtgctgtggctcatgcctgtaatcccagcactttgggaggccaaggcaggtggatcacctgaggtcaggagttcgagacaagcgtggccaatatggcaaagcccagtctctactaataatacaaaaattagctgggcatggtggcgcatgcctgtaatcccagctactgggaaggctgaggtaggagaatcttttgaatctgggaagcggaggttgcagtgagctgagatcgcaccactgcactccagcctgggagatacagcgagactgtctccaaaaacaaaaacaaaaacaaaaaacattcaaacaactgtttgcaatataaaaagctcatttactgtaatatttatgatacagtgaatatgaaaatgcactggtcagaaggcactctcaaagagccgcactgctcctgacatcgtccttagcaatgaaatcacaaagacagccaaagcagtcctgcttcttggaaatcagaagctgcctttatcacatataaagccaaacagggcataaccatgtcacgtgagcatgtcatcaggcttctgaggacttgttctttataaaaaaagaccttcacaaaatatcttggcttagagatagcagtctttattaacaaaggccacctaggctgacacctgcagataatcatctccttttctttgtctatgttgtacattttcatgatataacttttaactatgtctagagaaggcaggctctgcaagagaggtgccctttcaacccgctcagtgccctggacaggagatgctgtgttaaactgttaatggatatctatatgagaagctcatttttgtatgctatccctgcagtttttttttttctaacaggcccatgtttgagaataaacaagtctgtgatgtcagagacaaaggtgtattcttcagtctgcaggtgtgtggcacctcccttctcccctgcagccccccacatccagagccgttcctgagagtgacatcatgcatcaagaaaacataaccttggtcctcaggtgaacccttggaacattctgtgaccgcctgatgtccattctgagccaccttggcacacatgcttacaggcagcactgctaagggttcaggtgccccatggctgacagcccgagttgcttctgtggaccatcatgccgctcggcacgtcctgagacagaagttgctgcaggaaggagcttctggagaggtcctgtggcatgtgtgggggtgtgtgtgtgtatgtttccttcttgaacagacattccaactttagatgtgtttatagaactgacctttttactaacaaaatacaatgatatatgttggaaactacttaatatgcttttcctgcacaccttagcaataactgtaggggtctctgctagagttgtttgtatgtacagcaattttgaacaaattgttttaaatgtaatataagagaattagtttaaggaagtaaagagaatcatttgcttgtgttacattttcagtgaggattcagtttaagagtcattcttaggacttccatttcctaatatttattcatgggtaatgaagaaatggtttgcattttgtggccagtcctaatttattttccagctgagccctaacttccggctcccacctacctccacggacttcctaacagagacttatgaataccaggatgtgtttttgttaagtcaggttcaattcgttgcccctgtcagttttatagagtgtgagggtcactccattaaagatctctcctgggtggatcctacttggatgttcaggtgattttgaaaactgctaacatttttaaaaggctagaacatcctttgacttcttgaaaatctgcatgtctggcttgggttttattaccacatgcctgagttcttcaagaatggaaggctcaagtattctcatcttccatttgccaaacttccttcctgatttgagtcacgtgttccacttggaaagaaagggaacagagagcctcctccatggacagtgtatgaatttcattgggaatcttgctctctcccgcctctatgcctttctctctttttaaccttactttacataatattatagatgggccaagaaaagaaaagatgacataacattttgatgaatttcacctattccattcttcacgtttcagaattggtcgactttgttagaagataattgaagtagccttgggtcaaaagcaaccttttcaattgtgatcatacctaaaacatataaaaaccctgccgtagattaaaagcaattataaaatcataaaattgaatgtttgcagaatcctggagcagtagatttctttgtctttggcctgcggactagaaagagggcagcagtagtatgctggagcttccctgggataccagccacatggtttcttttcattagatctgatttttgtttcccactgtagatctgattttgtagttgaaaacatttcaccaccatcaaacactatttctgaatattgtgcctttttatacctagcctagatgaaaaccgatgccattcttattcagaaaatccccccatcctacatgactgttatctagacataaagcaaagtgcatttaattcaaaatttggttcacaatataagtattttgtaaaagccagctgaaccagcattttatcaggtggaaatctctgcaagccaaattgctgatactccttcatgcagatcaacttggtgtcccagtcagaatagaacagcataattacctggagttagggggagtatttctgcactattacttgtcagggagagaagaaacttagaattgtccctcaaaggagtgtcaagaagtatgaataaatgtcctttcaccagctcacaggccagaaatggaggacccaagtcaactaggtgaaactactagcagacccagctttcccataataacctaatatgcaaattgttctattaaagtctcattgttttcaggatgcaatgaaagtggatttcaaaaggctttggaaaaataagtggaacatgactgatcttgaaaaaaaaagcaaaagcttaaatatttgatacaagtttacttagctacaacatactttacattgttgcctttagttatctcacaggcactgacattttatatttagaaaatacttttaatctttctaatctttttttgtaaatattagtgtccattctgtatgactcgctaacctactttgcaaggctttgggcaacattttagctcattaacttcaagatgatgtgtcatctgtataggtcaaagaatgggacttctgaactgaggaatttgctgttgacagccaaagtatagtgtacaagattgatgtaacttgatatgtatttttgttgaagttttttgtaaaaaaaaattatttacaatgttatttgaatgatttttttaaatgctgtgaatctatatttgttgttttgtatattaaaattcatttgccaaactcgttctgatgatgcatttgagtagcagcctttaaaaggaggaagtggagagctgggtgcgggggcttctgggatttgtagctcctctgctgccctgatgtccctagacttctcagtggcaacaactcatccattcaggagctccatgtaaccactgggtaggcgtgggagaaggggggctccgagggcaacctcggagggcaccctggcttgagaaacgtcagtggttggagtaagagggatgcggaagggagcagtggggcggggccgcttttgctagggatcatggagaggagacagaacaacagactgtgccctctgactgcccctgaaggctaggccctgccacaggagctgtgctagtggccctgctcactcgccctttgcgggtgggtagattagaatttccttctccaacagctcagaagagctaagtcaacagcccattgtttgctgtggctgtaatcagaaaaggattcctatgaaggctgccaagtggctactgcccactttttgtttactcttaatatccacctgcttcccaaagtgatctgctcctcccaaccttgggctgcactggggaagggcggtcgctagggtggggagggggcgagccccagaacccatagggcagagcatagtggctccatgtataggagacagtgaaagagatgggggtggcattttcttccaggagagttgtggggagatgaccgttaggtcataagcgcgcccctactctgcactggcgagaccagcaaagctggagtgaacccagctgaacctgggccgcagcagccccggaggctggaggcgctgcagtcgggaaacaccaggaggatggagcccttttccctgtaagcaggaggccaggatcctgattcctgagccggcttcccacggaccccaggccccggcagggtcctggcgggaggaagaacccacggagtgagtggggtgtcagcaaagcggggccgcagggcaggttctggaagcctctccgcgtggctgggctggagtgtgcagacgtgggagagcccggaatggggagcgcgtggccggtggaggcccgaggctgtgcttccgtcgctggctctgaggcagaggtccaggccggcaggctgcccaggtggtcctgtctcagagctctccggggcgcagaggcgcgggaagcggggaagggccgggcagcgagacgggtgtccccagcaggaggtcggggacccgtcgcgcgttccgtcggggccgcctgcggtgcaggggtcagagaccagccacgcgagcaagagggagcccggccagaactgctgagagcccccagcggagctgggactcaggggctccttgcgtttagccaccaagagtgggggcaggctgcggggtgccggggagaagccagatctcactcattttacaccgactaattagatcccgccgcccacctgggaccacggcattgtcatgtccgctgcactgacggggaaattgaggcacgggggcgagtaaggcgggagagggagtcggcgccgccgagctggggcgagccccgcacccacccgtacactcggcctctgcccctgctctgtgcgtgggctcctgctctgtgcgtggcctcgccgccgagctggggtgagccccgcacccacccgtacacccggcctctgctcctgctctttgcgtggcctcctgctctgtgcgtggcctctgctcctgctgcgtgcactgcggcatctcgggaaaccgggctgggctcctctgtcctctggaagctactgtaagttttagataaatgttactactagacacgaggaaagtgagtccatgattactggcattgaacaaatggttgcaccgcgttctccgtggtaggtggagtgtgtgattgtgagaggggaatggacactgaatccttacctacacaaatgcctaaactcgtaaggcattacgacacacccatctgaaaatctaattaagcggtaggaattctaatggtccgggatccaaatgagacccagccacttaacagttagcagccttcagttttgtcctgttgcccgtaattaccccaaggtcagggagaagcactgaagcaaaggcatgaacatcactttgaaaaagaaaggagttaatgggtgcagcacaccaacatggctcatgtatacatatgtaacaaacctgcacgttgtgcacatgtacactagaacttaaagtattatatatatatatatatatatatatgaaagaaacctgcctggggcactccttccttcagactccccttgaaagtattccctcatttcattcaaaaggatttaacttttctaaactaagtggtgctggtagaatatgctacctgatttacgtgttgctgtaattcttgaagctcttccaagacatcttggccttcctctgttccctccccttcctgctattttgcagacatatccactggggaattgtatggcaggaaggctgattttatttagctggcccttgattcttggtttg

SEQ ID NO: 487 - DNA, 2688 bp, Homo sapiens
atggtggggggtgggagtctggggctggacgtgtgtctgccgagcacctggcacatggccagtgcagtttcttcagatggaggtactgagccctctgccttagtggatgacaacggtagtgaggaggacttcagctatgaagacctctgccaggccagccctcggtacctgcagcccggcggggagcagctggccatcaatgagctgatcagtgatggcaacgtggtctgcgcagaagccctgtgggaccatgtgaccatggatgaccaggaactgggcttcaaagccggggatgtcatccaggttctggaagcctccaacaaggactggtggtggggccgcagtgaagataaggaagcctggttccccgcgagcttcgtcagattgcgagtgaatcaggaagagctgtcggaaaactccagcagcacccccagtgaggagcaggacgaggaggccagccagagccgccacagacactgtgagaacaagcagcagatgcggaccaacgtcatccgggagatcatggacaccgagcgggtgtacatcaaacacctcagggacatctgtgagggctatatccgacagtgccgcaagcacacaggaatgttcaccgttgcgcagctagccactatttttggaaacattgaagatatttacaaattccaaagaaagtttctgaaagaccttgagaaacagtacaacaaagaggaacctcacttaagtgaaataggatcttgctttcttcaaaatcaagagggctttgccatctattccgagtactgcaacaaccacccgggcgcctgcctggagctcgccaacctcatgaagcagggcaagtacagacatttctttgaagcctgccgcctgctgcagcagatgattgacatcgccatcgacgggttcctgctcacaccagtgcagaagatctgcaaatacccgctgcagctggccgagctgctcaagtataccacacaggaacacggtgattacagcaacataaaggcagcatatgaggccatgaagaatgtggcctgtctgatcaacgagcgcaagcgcaagctggagagcatcgacaagatagctcgctggcaggtgtctatcgtgggctgggagggactggatatcttagaccgaagctcagaattgattcattctggggagctgaccaaaatcactaagcaaggcaaaagccagcagcggacgttcttcctgtttgaccaccagctggtgtcctgcaagaaggacctgctgcgcagggacatgctgtactacaagggccggctggacatggatgagatggagcttgtggacctgggggatgggcgcgacaaggactgcaacctcagcgtgaaaaatgccttcaagctcgtcagtaggaccacagacgaggtttatttgttttgtgccaaaaaacaagaagacaaggcgaggtggctgcaggcctgtgcagatgaaaggaggcgggtgcaagaggacaaggagatgggaatggaaatttcagaaaaccagaagaaacttgccatgttaaatgctcaaaaggcaggacatggaaagtcaaaaggctacaacaggtgccctgtggccccaccgcaccagggcctgcaccccatccaccagcgccacatcactatgcccacaagcgtcccccagcagcaggtctttggcctggcggaacccaagaggaagtcctcgctcttctggcacaccttcaacaggctcacccccttccggaaatgaaaacaggaggctgtgcttccatggagctgggtgtcaagagaagaactgtctttgtttcttgtgtgcttcaatccagggaaagtttcttggacccagtgataaaaacttccttttagggatcaatgaaggagagaaggtcttggaatcaccttcagtctttggagacccagctgcctttgtggaagggaggagacggtcatgacacaaagctttatcctacacagaaacacccgtgacccactatgagatggcccagatgtgggacccggtaccatgctctaaagcgagtgattaggcagcagctgaagccacccctgctgatgatgagcaagtgcctgctgcaggtccaaacacagcatccagggctttgcagttcctaaggagtgatgaggttagaggatcacttctgcatttgattttcaaggatgccgtcaagacggggttgacacaatgctgcacgtgtctggtcacacttagaaattgagctcttactctcttctgtaatactgggggacctacagctgccgtggggctgaccacggtgttccctggcatcgtctgtgtccacacagatgctaactggtagtgcaaatgtcatcctgcaaggttcctcttcctgcaagcaaagtggagagaaagaagatgcatctgtcaccttcatcagggtcctcagtgcagagcaacttacgcatcctcaagaatccactgcttttcaggcaaggagggagaaatcctgctgcacactggctttgtcccggagtcggattccctcctgcctgcacgccttcagtaactccgagcagaaatcacatcttgcccacatgctgtaacctaagaaactgctatgcaaggctgggtgctgtggctcatgcctgtaatcccagcactttgggaggccaaggcaggtggatcacctgaggtcaggagttcgagacaagcgtggccaatatg

SEQ ID NO: 488 - protein, 574 aa, Homo sapiens
MVGGGSLGLDVCLPSTWHMASAVSSDGGTEPSALVDDNGSEEDFSYEDLCQDRYLQPGGEQLAINELISDGNVVCAEALWDHVTMDDQELGFKAGDVIQVLENKDWWWGRSEDKEAWFPASFVRLRVNQEELSENSSSTPSEEQDEEASQSRHRHCENKQQMRTNVIREIMDTERVYIKHLRDICEGYIRQCRKHTGMFTVAQLATIFGNIEDIYKFQRKFLKDLEKQYNKEEPHLSEIGSCFLQNQEGFAIYSEYCNNHPGACLELANLMKQGKYRHFFEACRLLQQMIDIAIDGFLLTPVQKICKYPLQLAELLKYTTQEHGDYSNIKAAYEAMKNVACLINERKRKLESIDKIARWQVSIVGWEGLDILDRSSELIHSGELTKITKQGKSQQRTFFLFDHQLVSCKKDLLRRDMLYYKGRLDMDEMELVDLGDGRDKDCNLSVKNAFKLVSRTTDEVYLFCAKKQEDKARWLQACADERRRVQEDKEMGMEISENQKKLAMLNAQKAGHGKSKGYNRCPVAPPHQGLHPIHQRHITMPTSVPQQQVFGLAEPKRKSSLFWHTFNRLTPFRK

SEQ ID NO: 489 - DNA, 63897 bp, Mus musculus
  misc_feature (1)...(63897): n = A,T,C or G
caactaatccatacttgatgtgtgtgtctctgctggtttcaagcctttagagttttaacttggaacctttgatttttctctttgatttttttttttagatgtaggaaattttaaaaaatgaaaccaaaaaaattgaaatcaagtgccctgcctcaaagtaacagtcactcacattcttcacatccatagtaaactgccattcgtgttttggctctttgtgtgtgtgtgtgtgtgtgtgtgtgtgtgtgtgtttgtgtgtatatgtgtgtgtgtgcccacaatgaacacttttttaaagcatgctacaggctggagagatggctccatgattaagagcacattttgtttttccaggagacctgagttccattcctagtactcacatggggctcagggcagcctatagcttcagttctgggtaaccctaaagcctctggcctctgtggcacccgcattcatgtgtgcatactcctttctcctctgtctacatgcacatgattaaaaactaaaattgaatctttaaaaagcatgacacgagctggataaatgattcagcagttaggagggcttgctgctctcccagagttgcagagtttggttctgggaggctcacaactgaccacatgtaaccacggctccagaggatttggtgtcctcttctgcacagacacacacagacagggacacacacagtgacagagagagacagagacaaacagagacagagagagacagagagacagagacagatagaggcagagacagacagagacagagagataatcagagacagagagaaacagagacagagagacagagacagatagaggcagagacagagacagagagataatcagagacagagagaaacagagacagagaggagaattttctcaacaccgctttgaggcatgacctgagattcaggctgatgccgagataatggagattcttctttgatggcacttttctaacttctaaataaattccaaagctgcttctcactgactcttccagaaattctcttctgcatcaaggctgacgatctagtttgagcctagccaaaggcctacaagaggaaggcacctcccttctggatgacagtgtggagcttggcgcctacatccctcccacctggggttgctatacgttattccatcatgttccttcctctgtggcaggaatctgctgctgctgctgctgctgctgctgctgctgtggacagataaccttcccctcctgctggtcattccaggtgtcccggcctccatgctgtggtctcctcccgtctccctgtacttctccagcacaacttccctcccttcagggtcataactaaccacagtcgtccatctggccagtaggacccattgtgctgacttgttaccaagctgactccccacagaatccatccaggagaggaggccagaaccccagtggtattctcatttccccacctaccagtgaggcttaacatatactttattgattttgcacaaatgtccaagtccctcaacatccctttagagtcgtttttcctttctccactagtttaaaatgccaatattttattttagttattttacttaacttttgttagtgtaagcctggatcattccattcagttattcaatctggttatttctaagttagtctgtgacacatcattttaactgtgacttcatcacctatggccggccatatgttttgcgaagcgtggtggcaattttgtttgttttctgtgggtaggaaaactgaaacccagggttaaaatgatttgctcacagcctgcctcacccattccccaggcagaaagggtctttacatagggccgtaccttcttctgtctgctcctattcccccagttcctgatacccctcatgcattattgtgtgctaagtgatggccaagctttattctccagctttgccattggaattggaaaagctatgttcatagtgtctccaatcagaagacccactaggtgctcggagacccactaggcacttgggatcactgggtggatgaccatcttgtctcagcctcaggagaactaggtttctaagtggcttctgctttcctcttctagacactgatggctcagcctgtgtgtgctatccactctgagttctagaagacccaaagccaggagtgtccccgcagcaagcagagaagttctccaggaggtcttggcgcattggtcttctcttccatattacttaatcttttcactcttatttccccttttaactggttccctcaactccgtccttttgggaaatgtgttctttggtgtgctatgcaggatattttgttaatgcacaaagcaacgaggtgacccatgcacgagaaatgaaggtgaaatagcctagcaggtatggaaagctcaagagcccaaacaattaaccatgaggtaccatttgctgccagggcatcctggattctgcccttaatggggaagcagcttctcctttcctagggaaaatctactagtgccaattcctaaagccaccatgcttgcccagtccagcccagcccagtccctgatctagcctgttcctttatgtgctgcgtgtccttgtggagtggccctgccttagtatctactcctgctttggaggaaacctcctaggatctgagagtgctgtgactgcaaacatctcaccagggtgggctctgcagccagggggtcccctggggtctcaggagggctagctgaactttacaaggctgctgacctttaagctactaagaaagcatagtttgcggcaagctgctcagcctcaggattggatgctcccagcactgctgctctaaaaccggtcattagtgggagtgtggaatggaggtctggaaagggctttccaagaagcaaatgttggagagaagagaggactggactgcagatgggaaagcctagtattttgtctcgtgcaactgctccctggcctttaagaaaaagtcccttgcttaaccctgcagaataggagcagtgagaccaggatacgatgatgccctcagtccctcgacaattgtgaacaagttcctcagtttgactattggaggctactacaggaacagtggcaggaaagacatcgccataccttctcgtgggtcttaccctttattctagtgtgtgaagacaggcactggcgtcagataaaccaatgagtaaagtctctttacaggtccctctaggggctgacaaatggagtccagaaaaaaaaacagtgatcccaggagaggggaaggagagcgtgagaactggtcacaggaggcgactgtctagacctccagagccctgacctggggactagccatggagatgggcagaggaggaactgcacacagcctgctggagagggactcatgggatctgctgcctagggcagggagtgcaggggactctattcttcagatgccgtggttgtttgccctttaggaaatagctagtcctcccaagtgaggttgtgatggaatctggagaagtatgtaaccaggaaaattgcctgggaagatttaaggtaaggtgggagcaccagaaacagattctgggacctctactattcagctgaagtttcaactttgtcccagagatgggtctctgtatgagaacagacagttcccctgccaaggaagagccttggcttggcgactgttgacagttggaagggagcaggtcagtagacctctgctagaaaacagtgttagcagagcctgcagccacaggccagaaggggcccaggggagaatcatttctcacatacattgaggggtcaccatgcgagggacctggaacccttagaagataaatgttaacatcacctacattttaagacaaggaaaatatgcttcaggctcttagccactgggaaactcataaggactcatgtgtaaggacttgtgatatttaaaggaagaagtatcaaacatttgagggccagctacttacagacccattgtctcaagaaccccattgttgtctcaattctaagacggggaaactgaggttcaggcagttgggggacactgggacctctgctttacactgcctggcactgaggcctgctgcctctctgcagaattcagccacttcctgtgtttaacaaacacctttccagagactccatcctggcattctctttcactccacgggacctgaggcttgggaagtattgaaaattaactcagttggtcaaacatctaagaaacgaaacggggatgagatgatgtcagcttgggagattcccaccccttgtttactcacagaaacaatgatttcacaatgaccacagatgaatataggtcctggggagctctggagtacagtcaggaggctgcgtgtcagaggcagaacacagggaacacgttgggtgcattgtcctaactccagggacagtctaactcagtgacaagaggtttctccttggccgtgactttcttccctgggtgagaatgaagtgctgggatccattgatgttcctagcacctttgctgtgttggtggccatggtccttcacagcttttgcctctgaaagccaatgctaaacccaagctgagagagagggctgcttggaacctacccgcctgtgcttccttagagctaaagctctcgctgtctgtcccttctgggactttccagaacttgcttatgaatgccagcgtcatagctcgggtgcctgtctagtggccctattgccaccagtgcccacctaccaaacctggagttgcccacttccctgagaacacatgccctggatgcagcatctttgtacattaggaacctggcatttcccacaccccacttagccaatacccctaagctgactcacaggcaacgctttttttctaccaaagacagtctaccagttgggaagaagtacctgccccttcaaatctgcagataccaacacaaagctacggcaaatacacctacacacattcacacactagagctctcgcacacacgcacatacacacacacacacacacacacacacacactcaaaagcacatgcatgcatgcccacatgcatgtgcctgtacataaaacatgtacaccacaggacacaataaacttccaattaaacaaatttggatcttctggttgcctatcaaataattcaaaataatgttttttgttttttgttttttttaaagaagctcggccaaaagatatacatagctcaacagtattaggggggaaaatgtatttagataaaattaggagttcaacagagagatgctatagaacaaacagaagaattctgcaactgaagtacagcaggagtgaagtgaaatgtctcgttacaactgtccctagcagacttcatgctggagaatcagcaaatatttggagccacgcagtcaggggaggaaaacaacacagaactctcagaggaactgcatcaagcaggcgcgtacacacacattgtcatagtcccagaaggtgaggaagaggggaatgcacaaagaaatgatggccaagagctttctttatttcttattttgtttttttgttttgttttgtttgtttgtttgtttttgtttttttttcgagacagggtttctctgtatagtcttggctgtcctggaactcactttgtagaccaggctggcctcaaactcagagatccacctgcctctgcctcccaagtgctgggattaaaggtgtgcaccaccactgcccggctggccaagagctagcttgcttgcttgcttgctttctttttttttttttttttcgagacagggtttctctgtataactctggctgtcctggaactcactttgtagaccaggctggccttgaactcagaaatccgcctgcctctgcctcccaagtgctgggattaaaggcatgtgccaccacgccgggctccaagagctttctaaaacttgggagacaataggtatccagatgaaggtcaaaggaccaatccaaagaagactgccgcaagactcattatcatcaaactgtcaaaaagctggaagcaacgagaactctgagaggaatgaaggcagccacataccaggggaccccattacacagtaagcagaagcctcgcagtgtaggcggccagagatgagatagtcccagaaccatcctgaatgcgagcagttcctgtcccacagcagagcacactgcaggaaagattctcttaaccttccctccactccctgttcccaacacccacactgtttctgccggcccctactagcttgcattctttttcatataaagtgattttatgccagtcctccatccttcaactgtaggcacaggcctggctcctggctttccgatttcagtttgttaatccacagaaatcctctttactgcttgttatttttttatagtactgggaatcaaacccaggggctgtgcatgctaggaaaattctttaaccactgagctatatccccagcctatttgtttgtttattgtttttgttttttaaaagatttatttactaatttaatgtatgtgagtacactgtcactgtcttcagacacaccagaagagggcatcggatcccattacagatggttgtgagccaccatgtggttgctgggaattgaactcaggacctctggaagagcagtcagtgctcttaaccactgagccatctctccagccctgtttattgtttatttgttataattttcatttctttgtagagcatacctatctgctgactcttattgacatgaagtgtaatactctacatatttgagaatatcttcctttaattccatgaatgtatcgatagtaactgctgtgaactcaaagcccttgaggagtttgcattattttctggtcacttttttatttttattttattttttgtatacaatagagtttatccagggcatggggaagctggccatgaccacacagagagaggagaagggggaagagaaaaggggtcactttgtttttgttgttgtgtttttttttttttttcttttcctcatatctgtaacttttgatgaaactgggcattgcttctggttttgtttgatttccctgaaagttactggtgttttgttttaggaatctacttggaataagtttataaaactagccccctgcgtggtgcatagccgctattatctctgcacagtgtagtatcagcatttctcttaatttttaagacttattttgtattacttcaaatttttattcgtggtgtgtgtgtgtgtgtgtgtgtgtgtccaggcacctgtggaaacctgaggtcttggaacccctggggtgcagttatgggcaattgtgagctaccagacatggggactggaaaccaaactcaggtcctctgcaggagcagggagcacttccagtccctgagccatctctctagttcctttactttactttttagttgtgatctcccaagggtctagtctctttctgcattttaagacaatcctttgaacagggtcataatcagacaccttgcacaagaagccctccacactccgctgcccgagctgggcgtggctggagaagcaagggactgtgcagcaagccctcccatctccctttgagctcacttttggctgtactctcttgcattccccctccccaccccagctttggtcatacttgtttcagcaattcattgggtgtgtaaagagattttattgtcttggctctaccttgcctgaaggaccttccagttctggctgtttcttttcaccttggatcaaaactataatcttaagccagtaaacctgtagttttcccaacttcttgtctacaaccaaatacataacctttaacccataaactgcaggttcatgtgtccacacccaaaaccaaacctgctttctcttcctagtacagtggctggttttcattggcctgtggaccaagcctaccacaggtaccagaaaacctatgatttttccttattccaaatagcatcctgtgtgccgggcattacaataatcctggcataataaaattcttaatgaccgagcatttcccatgatctgaaagttgttctttgtatttgtttcgttgacaattttgtctgatatacttgttactgttaaaggggactatgtaatgtctcataccaccacctttgaggtgaatcttggcttggactatccgaacatttttcaacttgaccattctattactcacatcttttgattttaattatagatgagttgttatcagaaggttggtgtagagtcatggaaagagagccctgagatttgcataagtcacctcagatgcacaaaaataaatggggaaaatgacagagagaggcagtcaggctgagcacagaaccccaggagtcagagcaaaggtctggtctcagtgctgtcctgacaagacctgctgaggctccctaactttataaactgtctgacaaaggatactgtctaacccttcaccatctctcccctgggtcttctccccaacagctttctcgggggccctgtgactttgtgagggttaaaatggctgaaattagctttcacttctgctcagacatctgaagccaacagcaacatcatttctctgttcttttctgagtggttgctggaatctatctgttcgtgtgtgtgcatgtgcgtgtgcgtgtgtgcatccaacatctgtggtaaacagaagggtgagtttttctcagactataccaaggccaaagccataagcaaattggaatcactctcctctcagcaaactctccccatccctcctattctgctctgggaagatgagggagtggcagaggaagctggttccatgtcatcccttcgtgttctcccagcctcaggctcaagtgcacaggttcaagtccaaacattctctgttcaaggtctgagaagatagttcagttggccaattgctttcattacaagcagaagaagccaagtctggtcctcagaacctgctataaaataagataaaataaaataaatgctggtatgcaattatgattccagcctgtagaaagcagagacaagaggattcctgggactgaggagccagccatcttatcctgcttagaaagttgaaagccagtgagagaccttgccaaaaacaaaaaaccaacaacagcaaaatcccgataggtagtaacttctgagatggtcctttgtttcccacacacgtgtgcctatttcttgcagctgaacacattagctgtctactctatcctaaatactgtgataggaacatttatacatgttcctatgaaaccttaggggacaagcaacagcccatagaaccaagagctccatgccccactgcaaagagcttctgatagctctttcctacaaggacttgcagtgaacactctcttagccctaaagtcccagaaaggatgctccatatgggtacagatcatgagctgtggtgtagaaactggcagaccgatgatctactcgatcaaggctcctagacattaaagagaagggagagtctgcccttgagacacctggatgagcaaggtgatcggtggtccatgatgtcttctgggccagcaggtcctctcaacaaccttcctggtcccattaacccctgactgacatcggaaaggatataatcaaccatggtgccacccttcctgtcacctcactgtctcttctctgagttttcactgacaggtaaagtgatcagttgaaaaaaacctctgagatcagattcacacattgatacaacactatcaaacatggagggatttgtgtgtactgagcatcaattctatacagtccagtcacatctgttctgccactgaatgctcacaccatcctgtgaccccactaatattagcatcatttaaaagcaaagcaaagccaatggactgagagaaccccgccctagttcccacaggtggcccagacggaaccctctgaaaaatacttcctggagatagttggaggtgtgttgaccctaacaaaccaaccaaggggaaacaccagccgtgtggtgaaccaaaacccatgagaaaactttggggtggcagaggggcatcatgaccagcctggctgaaggtcaggtgcccatgaaacttcctcagaaacacctccggggctgaggagccagaagtctccagaagacttgactggagggcagagctcccactgagctgcttcttagggctgttcatggcggtctgatcacaacagggggcacacacacctctgtgtgctgttggcaggaagccacaagccactgaagctgactgagatgagaagaatccatctggggatgggattggcttttcttaactgggtccagagcttctggttgccgctagaaagttcttcaaccacacagaccctgggatctgcacagctatgttgagaagctactgaagccctgcaaggtaggcctttcagctggctcctgggcagctctacccagtgtgaacggtgctctgaggcctgtgagatgggtgaatgggcaggaacattgctatggctgctactcatagaattcacatgctctgtcctacagctatgaataaggcatcctactgtttattcctgagaggtctttgaatttataaaagttcacccacctagggtagattgtgtggtgtaactccaaggtgggaagggcagtgaaggtccaccagaagacatgggatgtgggagaagatagccgggaacatacagaccagctatggggctagaggcaagttccccagcctgttagaaaggaaagtaactggagccactgtgtagagtccaatgaggtgatatgcaccacctggctcaagatcagtgtgtctggtgattactctcgattctctggtttttaatgaaattatttggatttttgggtattatggtgatggaactaacaacctttttggccaagatatgttttgttagtaaaggtagcccaaggaaagaatagttgttaacacgttttgaaaggatgtttaaaagttgcttactagctgggcatggtggcacacgcctttaatcccagcacttgggaggcagaggcgggtggatttctgagttcgaggccagcctggtctacaaagtgagttccaggacagccagggctacagagaaaccctgtcttgaaaaaccaaaaaaaaaaaaaaaaaaaaaaaaaaaaaaaagttgctttgcttacttatacttgggctagggagatagctcagtgaagtgcttggctcgaaagcataaagacatgggtttgatcctctagcacacaggtgaaaaccctcagtcctggggaggtagggtaggagcattcctgggtgcattggccagctagtctccttactccatgatctctactccagtgagagatctaaaacaaacaaacacacaaacaaccttaaaaccccaaggtggctccctcctgaggagaaacacccatgcacatgtgcacatgaacacgcacatgcaggcaatgtttacaatttggcagcttctccgttcactttgtaattggtcattgatttcatccttactggcccacaccaccaataacacagtgttgctaatgatctggaactgtggggcattctcttgccatgtctgcaggaggggggctagtccccctgaccttgacagggacctgagcctccagtatgagaggcagaggcagtagctgtatagtagataacaagacagaccctaggttaggcaagttaccaagatcaacttcaccgaggacaggacatgttgctgctgtgaacttctgccaccatgcacctcattcctcaaactcgcaacaccgcccaaccagaccgaatgaccatatcggtccaaactgaggggtgttctacaatgtgtaaatccttgagactgtcaggatcacagaaaacaaacacaggtgataaagttacaggccactgttacaatgttcctggtgccactgtgccagtattagtgtattagttctggtgtctgctgtttttctacaattctagaattgcttcaaaataaaaagttcaaaaaaaaaattgtactcatcttgcctcagagcgagagtggtcccaggataagtattcctgaggaaacttctctttgaacctttcggaacacaggaggccttcgccgccctctctcttcggctatctgtctattctagaatcacactgtgtttcccgctcctcactggattttcgtctgtctgtctgtctgtctgtctgtctggtttttgttggatgtacattttttgagtcccccctcatgttaggagctgtggggttaggccagtctgacctgctctgcggtattcacggtccaatgtggactcagcctcaaaaaggagacaggaggcaaagaaagaggcagcggggcacctagacctgcacagagtgcctctcatccaaatggagccagacatcctttggggtccactctccctcaggatcccatggctagcctgacagggcagatggacttccctcgaaagccataactctgccagatcatcgatgcctcagaagctggagaggaagaaaacagactgtgcagaaagatgacacatagatccgaatcacagcgctgcgatgattatcaaacagaacagcgggactacaagctagcctgaggatgctttccaccagtttatgtttcgctgtgttatcttaggctggagccctttcctactttctcatggagaatccctttccccagagtcttagaaccatcgcttacagggctccaagccattttgtattcccacaaacaccagcatatgctgagctgtgccttgcctctaccaaccaagcccccttagactggagctcccctgcgacaggggcaggctttgctcatccggctgggtcctagcatggtccccggctcatgaaaggtgctgtgcaaaaccacttttccttttctctatttctctcctaccttcctcctctctcccctctattctcctcctttctgctctttctctcctctttcttctcgcccccctttctccctccccttcccttgcctcccctcccctccccttcaccgctacagctagggattggacctaaggtctcatacttagtaggaaaattttgtgcactgagctagcccagccccttggttttattttatactgagacagagtttcactgggtgttcaggttctccttttccttgctctgtagcccagacagacgagagacttgtccatcctcagcctcctgagtgactggaatcccaggcctgtgacaccaggctcgcaaaccattcttgcacgaaaggagcaagcaagaaaaccaaggtgcatgggaaggatagggcatgaggaagaaagttacaggaggaagggctgagctctaaacgtcactgctaaccgtgctgatctccatgagggtctccgtggcctgcgctgtgggctctgaagcagtacagacaggggaagtggcactgcgaatttttgacattctacttcccttgaggtggtgtggtacagaggtctaaacgggaacatggcttagaacctgacagctgggaaaaagtgagccagtggcctgtttgtgctctgcttcctgctatgtcaaacagtagccacagctccctccaagcagagatctcggtgccaaacaaccacaagatggagtacaggctttactgagcatcagtctcctccaaggtgacagtggggctcctagcccccagccccccccccccccaccaaaagagtgctatttccacaatcctgcagcaagaagttcctgggaggccttgtcatccccaccttgcttggcctctgtacacctgacacctgggatcctgccacggacaaatcagagaaaacatgacacatctggtctacacaataaatacagggaatatgtaagcccacaaccccacagtggtatctacaagggctttagatgttctgggcttcacaggttagatcacttctgacgtttaagatcaggctcctgttgtatgtattggagctgtcaagtgctctgaacctgtagtttggtctcttgagctggtgtcatctatggtacagtgtgtacactcttgcataaagagcccttgggttttcagaggcttcctctgggcagcaaggtctgacctgatctgcttaattcctgtgggtggagtgcagttccgcctcttgctcctgtgtcagagggaaactgtccctatctctgtcccatacagatcatgttgtagggaggcactctctacagaggtctttgtttgccatgccagcaggaggcaggaggctgagcaggcatctagcacagcatgggtctgtactgttaatttctgggatggacagagacacttgctctctcatgcccaggcctggcaatccctttcatatgtacaggcttggaatggggacagggacgggacaaaggagataggcaaaagtggagaagggatggctgacaagatgattggagctgaaggatggataggagaaagttttaaaagaagaaagcagctgggcataacagggcacatgtttaatcccagtgttcaggaggcagagaaaggcagatcttgtgagctcaaggttagtcgggtctaaatagtgaattaaagtcagccaaggacatatggcaagactctctcaaaagagatatagatagatagatttatagacaattgacagatgatagatagataatagatagatagatcgtagatagattgatagaggacagaatgtctgatgatcctgcctggcaccagctctgcccctgggatccatcctcgatctgggtcatctagatggtccactatgaggtgttgagatacaaatgggtgctgatgaaaactgttgagtgcatggcctgctactgtcattgagaagggcagatgtagtcaccctggctttggacaagggcatgacctcactgcaaacgggagtttaagaggaaatcagtgctctaaagcaggcatgttcagcctgtggccagctatgagtgcaaccccaacacaaaatcatacacgtaattaaagcattatgaggtgaggtttacgatttgtttgtttggttactatttatgtttttgtaactccattacacagttctagagcatgaactctgtagatgacaaagtcgtgttccaatgtcagacgtttggcaagggtttagggtaggagactatgaagataaaaggtcagctggccccactggagtgcaaggttcaggttagagactactgaattcttgcaagttgagcactttctagaagctgacctgggagtggggtaatttctaaagtctgtgttgatatatacatatatatatcatcaccatcatcatcagggtgctgctgatatggacaggacgagatggtgacctaggtagggttaagactggaggaagagccagaagctaagagagagctggaggtggactgtgccctgcctggctcattagtctctgagacttcacttctagaacggagctctggcctgtagccttggctgggcaacttcctctttctgagcttgtttcccatagtgcttttgggggaggggagctaagctacctctcaaaccacttgtcagaccttaatggctctgtaggtacagcaagcactttggtcaaacggtgaaggctggttaggcaccagaattccagaattccagaatgccctggtctcaactggtccccaaacaaccctgtgctggtggtcggaacctacctaggggtccagagctgggagggagcaccgctgagatgcactcagggttgcagccttaggttccagcatgagcctgcaccttagcacaacagcaaggcaagggggtggggcagggtgtgtgtatgcatgctctcgtgtgtgcgcacatgcggtaatgggagttggggggtatgtgtgggtcatcatagagttgagggctgagaacaggctgctccatggtctatacacagagattgtgaggttaggagctaggatgggatgagctcagtgctatgctcatgtgagacctcaagctgtgacctatgacctctggctgagggcgtttctatccccaggagactctggcgccagcttgcctggggacaggatcctgctgagtctgcttctatgccctgtgggctattcctgtggtcaccttccctatttcctctaggctgctcgccgctcaagctcctggctcgatctttcctgctttagtttctccatatcaccctgccacctttggggttaagtttcccctacatttcctctctctagagccccttcggctctcagctctgaaacagtctctcagagagcgagacactgtgctgggcccgagaagcacagacatgagagtagttatgaagtcaggcttgcatgtcaatcattcattccgacaggagtccaaatgataggactgtggcaatgtccccaaggtccttcagaatgcagaaaaggaaggcaggtcacttgtgagtccaaaggcaaatgaacactggggtcagagagcaggagggggccccctaggcttctgctcacttcctctagcagcaggaagggctggccatgagagaaaagctcttgggagcccaactagaggtcagcaggcctctgagagcagacttgtcggcagatctcggagcctctgtatgttggagctgtctccttccctgagattttgctgtaggaacctatccagtcctctctcagtagctttagtgggagtagctgacttcacgctctcatgaggataccacgaggaccgcagatgccaggcgaaagctgagccaggccagggtcttggtagccaaggggctgtaatgattctcagcactcatcagtcaccgcagacaagccatttccatctgactccaaatgccagtcggcttgcgagcgatgtgatatgaacatcagagtctctgatggcatgagacaacaagacatgtctattccataacccccatgaatttcagagtggagccccacccccacctcgtttataggagcctctctcttcgaagacataaactaggaggggtctgaggggaccaggacaaacactggaagtgctgatggtgtcttctttgctcttcctaacgctaggcttggggtttgtggtctgagtctggaggggttctgctagctcagccctggcgctacttacccccaaaacccagtcacaagggaagccacaggaggagcaggctgctgagaccagggcgggagagccgctgggagggtaggctaatttaacacagatgtatcatttgtctcctgacttcaaatctgaaaaaattatgtaaccccaaaggtaatgctgaaaacagacataacctctgattcagctggctttgcttatgttggtcctaaaatctgctcctgttggtttaccctggacatagtttatcactgatgcacgagagacatcgctgtgactctgctccccccccccttctctttctgtcataacgtaagcatcttcctgtgagtctatggcacagtggtcattttcgaggctgcataaatactggacctctagtttgctttgatttttttttttaaagaccattacacagagagctgtggttcaaaaacgaaatagcacacaggcaacgttaatctgagctgcatcatgtaaccgaaggctgtccttttccaatccctccaaggaatggcaattaattgggaacacaaaatgcttatttggggagagaacggggttggcaccgagttgcattgtaagcggtgacgacggtggctgagagtttcatcctctgtcatctggctccctgacaaccttatttgctggccagtgctgtgatgtggtctttggccggagaacagactttcctgcctgggaaatgaagtgactcataaggaaacagcccctagagctttgggctagtttgttcttaatcagaagtctgtgaattgttgaaggctttgccaggaaaagggtccctgaaagtgggtgccaaatttagcatagaaatttgagttttaaaaaatatctctttctctctgtgtgtctgtccctgtcagtctctgtctctgtctgtctctgtctctctctttgtctgtctctgtctctctgcctctgtctctctctttctctcccatctctgtgttgtgtttaggggggggaggacaaatgccatgtgtgtgtccttggaggccagaagagggcatcaggctccctggagttacagaaaattgtgggctgacatattgatgcagggagcagaactctcaagttctctgtaagagcagcaagtgctcttaaccactgagccatctttccaggccataaatttctattaaagaaaaggtttttaatatgttaattttaatagtaacaaaagtaaactctcttagtatacttcaaaaataaaaatcagtcaccttttaaaactggcatgtttatggtaagtgtatttttttttcccctggggacattattttcaatttcatcacagttgtaaggagactgtgaatccagaaatattttttttggaaaaagagtctcaagtagctcagactggcctcaaacttgctatgaggctaaagatgatcttgacctcttcctggtccttccatctctacctccagagtgctgggattacaggcatgtgcccgaatacccaatttctgaggtgctgggaatgtaacccagggctctgtgcatgctacataaacattctgccaactgaactacatccacagccccgcatgtatgcagccccatatgtaggcagccctgtatggctggttcttagttaaagagaacatgttggcatttttttagactaaatggattccaccagcttcatgcctccctcctgagagtcagaaggactcactagtgcctgtggttgctgttagctctttccactgagcgagccctgtgcatctgcccaaaatgttatcggctaagagtgaaggggcaaagataaaccttttgaaattcaagagagcaaacatagacactcagccaccccagggaatatgtcagcctgttatagcctgtttgtctcctgatgccagcatcggttctttccttttcaaatagctgtttttattaatgacagactctcctgccccacccttggtggctgagtgatgtcttaaatgtatctggtctccttccttggtaaccttgtcttggatctccttaaagtgtgtgtgtctgaggcaccaaacatggacacactcagtttcccatctccccagaagtctgggctacattccccagttgctactactcattgaaggagaaaggcttcttaaggtatggcaagctgacgtcaaagtgagctggttatatttgcatcttggctgtctgtgatgtactgtagtgatgtagagcaccactgaatattgggtcaatgtgtcagccccaagtaatggccaatgaccccagccagagtgcagacagactctgacttgagataaacgtctttgtattagggaggtgaaggagtgagcattttttatgctttgggttttccggaattgaccaattgattgactgggtcactcatccattcaaaaagaaatcctgggctctgtgggccctgtgtgaaggaggatgtggtcagcaaagcagcctggtgcctggcctcaaccagattcagggtccaatgcaatgggagagtctgccttggagagacttcagctcattgccctgcctttagtgagaaaaatattggggatttttctgagtcacagggagtttaacatcatgttacattgaacaagtggaaggctctggtgagaatcacactttctctctttctggtacaagggccatttcatttcagcatcttggacaacagcataaggaacacatctgtttataaatgagtggggtctgggaaagctcttgggttctctgtccctcgtcacctgatcatgtgccaggtacggctgagtcaagtggtcattccagctcactgaaacacacaactcaagtcagagccaagacccgtccttgaaataaatgtgaggagcccagtagtcgatccatgaaagaccatccatatccctctatagctgtacaatcacaactgaagaatggtgaacacagagacagaggcctgaggtcctggaggtcaccttggaaagatggcaggctgtgtttatcccctcccacttcccatctacctgaaggaccttgggcacacttggctgatctgtccagtctgttttcttggttgtaaaaatgaggcagttgggggtagaggatgccttagggcagagaggagtctgggtacagtggagacttagtgccataggtggataatttgggaagggctggatgtgggacatgagaaggagcagagagaccagagggaaccctgtagttgtcttagtgagatgaagcagctcagataaagtaaaatatcagggatggagaccacgagacttatccagttatgacaccatgttgatgattttacaatagaaattagttgtacatggacgtgaggaggaagactgagtggctgtctaggacggcatagctttggggaaggtctgggtccagcagggtgggaagtgggtcaaaagcttatttctggccattttccttctgagccatcttttagaagtcttagagttgaggagacaactgttctagtcagtaatgtgcttgctgaacaagtgtgaggatctgagtttgatcctcagaacccatgttttaaaatccaagcgtgatgctgcatgcttgtcatggcagcgacagggggacagagacagacaagtccctatggcctgccagtcagccaagctgaatcagtgagcctcaggccagtgagaaatcctgtctcacaaaacaaagtggacattcctgagaattgacactctgggtggacctctggcctccacagacatgcacgcatgtgcacccgcacacacatgaaacacacacacacacacacacacacacacacacacacacacacacacacacacacgaagtcccagcatcaatagtttgcataacagtgccagctgctctgagttctatagccctttctctggtcctttccctgtcatgagtgttgtggcttgtcggcctcctcacataccctgatagttcagaccctatgtaatctttcaaaaatgattttccgttctcacgcataaccatgagcagcctccaggatgtcagggaagagatgaccacctagaccataacaaaaagggaccatacttctgaagactacataccattcctagccaaacttgggtcttcaggacacagccaagcagctgtctgggagaccctgccagccttagtcctgcaatgagggcttttggccctattgcatagagatggtcctgttacccaaaccccaattagttggacttgggtcaagggtcccctgtcagagaaaggagggactctaggaaaccaaaaagcacatttcccataatatcaagagcgtgtgctttctgaagcagctcagggcttcaggagtcatcagaggatgatttaggttgggcttggccctatggccttgccactgcatggaggaatgaagcccttgggttcccacagcaggtgtagaaactggagctgggtgaagggcacacttagacaacaaacttaatgaatcaggcatagaatgcaccccctaccccaggtcctatgtgagctagtgatctaatcacccagccttcagtctcaccatgggcactagttgcctttatccacaaggcacagactcttaagctcgggttcctgaggggaccaggagttggctccatggtccattggacttggcttgtgtatgagctcatgctgcctaggtggacacttgctttcctgagtttattcaatacggttggggtttcagatgcctggtagagatgggactcttcactctgaacatagattctaatcttcagaaggggtgaggtggcccttcccactgcagagtctgcccctccctcaaaggtcatcactagggtggatgttggtagcatctcactgtttccatccgtgccccccatatctgctgacaacacctgtgttccagccacagcctcttgcttctcctcctgccaaggacccctgccttcggctctcacttccagtctcttctccacacagcagctgcagtgatctttgtaaaaggtatgtcggctcttcaaagcacgcagtgggccatcctggtgtcattgatgaaatctccagcttctcctgggcttatgccctgtttcctctgctgcccatgcatctctgccctccagtgtgctacctttgcttttgggcgagcccacacttgggctttacctcttgctctcgccctgccccacaacacttccccgccattcagacccaagtatgttgactttcacctgaccctggaagaggttttatctgaacagtccagcccctctggtatggttgactgactttctccacagcactcacctctgctgggaattctgctcagtgattggcttgttcgctactgtcttctcatggctctcatcccatggcattctgaacgctagctctctgcagtgctcgtactcgcctgcatcccagctctggaaagcatttgtggagggatgatgtgatcctcatggggaagaaccaagccgtctctctctgggattgccgtggatggtagaggccatgctgcctcacaggaggctgaagagacttgtcacagcctttctggcaagcaacttggtggcttgggtcagggatcttgaaacagtttccagaaattagtccaaactgattttccttccaagagcctagataagcctgaagaaagtgcagggagatccagtaactaactcagatgaaggtaagcgagcacacgcaaatgcttacacatgtatgcacatgcatagtaaggagagttgtgaaagtgtgcccaggtctgcatgataagaaagaagcttacaataaaattttgagtgataaaagacaaaacaaagtcttataggctaagtgccagtcagtgttcccacagatgctgtgtcagactcagcttctagctagacttctgtgagatgctgtgagatgctgaccatcctcgccttcactttacctggcagggaaggagactcaagagacaaggacaccagcaaaggagctatactttgcaaaccgcaatgtcaggacacaggccagtactctccttccaccaactctgcttaatctgtgttccatttagaaaaaaaaagcacatttctccaaagaggaataagtaaaattcaaataatcaagatattaaaacaatggagagaggctttcctgtataatttcctgtgttaatgtccatctttgtaataagtgcatactatttttatatgaaattttgagttgtacaagaaatgaactatcaagttaagtgtggggaggtcttgtctgtaattccagcactttgaaaactgaggcaggaggatcgtgagtttgagattaatatattctacatggtaagggcctgcctcaaaatgagagagagggagagattgtatataagttcaccttattgatttagaagagaaatatttccttttatttattactagtgtctatgtgcacacgtctgtatgcacacatgcgcgcacgaacacacacacacagatccactccacaatgaaaagagaagctcactaatgtgtgctgtcaacaagtcaaaaaggaaatgactggggactgtcctgagggagcctatggaagacataagacaggctctagcatgtcctgcatggtgttcttgtgactcagagaaaggctgggccaaggagatagctcaagtcaagacacttgctctcaagcctgactaccagggtttaattcctggaccccacagagtggaaggactgaatggatactcacagattgtcctttggcctccacacacatcctgtggtatgtgtgtgcatgcacgcaacacacacacacacacacacacaaatgaatataatttaaaacttaccacttcttcaaaaataacatatgatcataaatacaatgctaataaaattaatacaagatttttctcaaaattattcttaaattatatttgaaaaatcaattagaaatagtaaggaataaagtcctggcaataaggagttccatggtttctgtgcagtgaggaactgcatggtttctgtgcaggtgtagattctacgtgtggttctgtgcaaagaacagccatgaggcatccaggaacagacttgagaacatatgataggatttcggttaggggaaagatggggcatttaaaacttccattatataatatttgactttctgattcagccgtcattgatggctaaatctttcgtcaatgtagatttgatattaaggcacagctgtgagggaagagaacggcttcgcccttcaacagaaacatcaagtgtcacggcaccgttctcttgaatgtttttctggtgatcgccagtgcttgtctgatgtctaacatgcttatgtatgtgtgctgtgtggtggatgtgatgtgatgtgatgtgatgtgatgtgatgtgatgtgatgtgtgtctgtgtgtctatgtatatgtgtgtgtctgtgagtgttactgtgtgcgtttgtgtgtgtgtgtctctgtgtgtgtctgtccatatgcatccttttgctatctcacttttctgcagcttttactggggcctctttgacatttgatcttttttaatttttttctttattttttttattcttgagttcttattatccaccaagctttaggaacttcttgtaaagtttttgctggaatattgatcgaaaacccatttgacttttggaggctatggagggaaggttcacctctgaactatagtcctcttaattagcgatcaatgactcagactctctcctaaaaacacctttaaagtctcttttaacaaattcatatacaggtctgcatcacctttttttggtgtatttctaggttaagtattatttgggttggtattggagatgggaagacatttctttctttcttttttttttgtttttgtttttgtttttgttttgtttttcgagcctctgcctcccgagtgctgggattaaaggcgtgcaccaccacacccagctgggaagacatttctaagtggccacccaataggaaaaggacaacacagcgggaagggtcaatatgattcctagcatgctaaaagtcatcaggcaaaaacaaattaacgcaaaagtccccccattgccacccttccctgagtacaataaacgcgtagagctacctctgggtgagaacggacctctcagcttctgctggcggatcgctcagggatggtgctgggatccatggtgccactgccctgtatgcccacagagggatcgtgctgggatccatggtgccactgccctgtatgcccacagagggatcatgctgggatccatggtgccactgccctgtatgcccacacagggatcatgctgggatccatggtgccattgccctgtatgcccacagagggatcatgctgggatccatggtgccactgccctgtatgcccacagagggatcatgcagggatccatggtgccactgccctatatgcccacagaggcaatcagcacacagaggcttcttgttcttggggaagctgctggctgtgccctatgggcgctgttcagtgtcaagatcaagaagcagagacccttaggagaaggtgaaaaataaaacaagtcacggagctgaatagggttttcggtttgtttgcttttgtttttgtttttttaaaaaaatatttatttattttatttctatgagtacactgtcactctcttcagacaaaccagaagagggcatttggttgtgagccaccgtgtggctcctgggaattgaactcagacctctggaagagcagtcagtgctcttaattgctgagctatctctccagcccctgaataggcttttcatttggttgattttgattttggtttttttaattttttttaatttttttagaaccaggaacctctaccttacaacaaacaaacctccaaattatacaattttaaaaacaaaagcaaatcacaaagtctatagttgcatagactatagagtcatttttgtgacagtctcgaacacaaagcaaaagactaatactgctgtgacaacagggacatgccaatgatgcaggaaaccatgcatggtagaacatccaccagctttaggataacggtcactcctgtggagaagcagaggacaagataatgatcgagcgaggttgtgtcctttgtatgaataacacaaagaggacagaggacgggtcagggaagaaaaccgagcaaaatgaagtatcagtgtccattatagtcgtgcagctgcatcgttgctgtgatttttgttttcacatgtttaaattttctgcagcccgtgaggtggtgcagcaggtaaaggtgctcacagcgcaaacctggcagtctgaactcaggacccacatggagggaggaaagaaccaacccctcggcgttgtctccaggtctctgtgtgcctgcttacacacacacaccatgccacacatggtagtagcaaatacaatgaaaaagccctgaaacgtaccactgatagtgagcaagtttcaacacttacacatttctgtataaaggactggtggacagacagtaaactgagtagatagatcaacgaccctctgtgcatagcgtaccataaaccaaggaaagatgcaaagctaaattgagaaaatgtttacaacataggatagaatgctgtatatatcaaatatatgtgtcttttatatatatatatatatatatatatatatatatatatatatatatatacatgtatataaaaacctctggtgtattataaggaagccaaatcgtaacattagaaactgtggttaataatataagtcatttataaatcataaaaaaataaattaaaactgtcttatttatcactttttatttaacaggtaggcaaagatggctttttttctttttctttttctttttctttttctttttctttttctttttctttttctttttccattggcaaggaaatgaaaaatagtgttttcttcagttctgagaacgtaaatcaatcttactatcacagaccagaagcttaaaaaaccatgtgcctatatttgatattgaattctacttataaaatcatagctttaaaaatatcacacaagggcaagtgagatgataaatgggtgaagggggcttgtgtccaaatgggatggtatgagtttgatccctgggacccacatggtaaaaggagagaaccaactcctaccagttgtcctctgacctgcacacacagaccatggtgtgtgggaaacacacgcacacatcacctatctatccatccatccatccatccaaccgtctgtaagtataattccaattcttttaaatgcacgaactgctcagtattttacaagtttgttcataataaatttatttataatcaccaaaatttgaaagtaacttatttgaccaatagtggttatataaattaatggtaaatatgtagagtagcagttagaaaactcccatcaaaattatgcttacttgcttataaattaaattttacttaattatttaataaatataaataaattatatttacttataaatgtaattcatggtgtagtgttcatcaagttattaaacaagataaacagtctggatattttgtttgtgggtatatgtgacagccctgtttaggctagtggtaactatttataatcattttccattgctgtagctatttttatttactgtgctctcagttttagcttattggttttttggtggagacaaggtctcatgtagctcaggttggaccttaaactcctatgcctctatgcccctgcaattctgcctgcaggagtttaaccttaaccaaaattagtctaaggatttagccagaagacctcaagccaagccttttatacacatgtctggggtgcaaaaagtgttcgaagtaaactggtatgtaagagtaaattcatgtagcagaggaagagtttgaacctctgaccttcttgacttcatccccccaccctgcccctccccccccccacacacacacagctgcagcatcacaagcctgtgtgctgaaggtggaacccaggctttgtgtacactaggttagaacttccaacagagccacagcctcggcctgctgctggggttttaggggattttcctttttgaatgtgtgtaatctccaaattattcactgtctacctatggcccagcttagcaaaaagaaaaagaaaaaaaagtgaaatagaaaggtaaacagacttagaaatggatagaagctgtgaggggccacctggtgacttattggaggatgctcgatgcttatgaccctgtgattccacttgcaggaatttaaccttgacaaattagcggacaggtttattcagaattaagacctggacgtttacacacacatctagggtgcataacgctttggaagtaaaactagtatgtagtaaaagggacaggcaatactaagctcaaatgatagaggcttgataggcagacaagcagtaaaggagacaaagcagataccagcaggaaaagacaaccgtgatgtgctctttcaaaagcaggtcgaaaaaacaggatgtagataatgatcctttttttttttcttttttaaactaaaatagtcttggaaaattacacaccagcgttaacaatggctgcctctgaatgatggtgttggggataatttttatctcccatgttattttctgaatttcctgtggtaaaaacaaatcactgcgtgagagagaaaggacattgatttgattcgtaataggtttcattccgcacgagtggatggagctggccaggggcagcgtgtcaccttcctcctgtcccgctgcccttctcagatgggttcacgaccacataccctgctttgaacatttgagtgattgcctggttttctttgttttgcttctttttgcaagaggtatttaggaaggttttagcagccctggcagaggtaggcactcttctaatgttagcagtttgattcgatccatagatttccacagagttcctttacatcttcagatatgtacagacgcccctttcggtccttttacctatcttgattgtgtaatgaaaccacccgggaatttcctctgctttacagtaatgtattccggatgtgtttccttcctagttgccatctctcttactacacagctaactttcacccatgcctttattacttagctacaggttgcaattctataggctatccctgaatatgttttgttctggatagccccaaaggatgtcagctgaaaactaaaaaattgcctttcagccattccttggggctccctcccagaagcaaacaacggtcaataagtttttttcttttgtttatttgtttgttgtttgttttgactttttgagggtttttctgggtagccctggctatcctagaactcaccaggttagcctgaaactcagagatcctcctgcctctgcctcctgagtgctgctgggattgaaggcaaaaaaaagctcccccgtggcccccaagccactaaaccatgtacctgcttttgctacaattaaagcttcagtgagtctgggggctggggagatcacttagtcactaaagtgctcggtgtacaagcgtaaggacttgagttcgatcccccaagccccgagctgtgtaaaaaaagccaggtatggtggcaaatgctcttaatcatagcactgggaagacaaacaggtacctggggcttgctggccagtcagcctagcctgattggtgagtgtacccaggatacccaaagtgaatagctcttgaggaatgacagctaaggtaaccctctggcctctatattcatacacatgaactcacagagaataaacaaatcagcatggactccatcatttcactaaccataaaggcccggaaggcctgagccctgctgcctctttccgtgcctgccatcacccaagccctctcctcccccttccctccccagctcttccgttttcatcggtttgcttttctactaagtgactgattttatggtttaaagtaacacatttaaacgctgacgctttcagtccacttggtctccactttgagctgtacatcctgtgttttgctatgctgctattataagtttattatcatatttatactataacttaccacactattacatgcaatatatataaagcactgtcttataacactcatatcctgttctgtgctcttcttagcttcactgtgcctcatcagcgaagttactactaaaataaattaactaaagagcaaccattatgataatacgactaggtaatgtttttatcctttcaagtagaatcattagacacacacaaaggctttatggtacagtgtcagtgacannnnnnnnnnnnnnnnnnnngtcctggtcctgagcaccacactcccagacttccttgctacatcctttgcagcttttttccccttgtgaacgcatgtgtacaagaagagctacccctggctttttggtgcgatgtggaatgtcttcatggagacaaatgagcatgcttaattgtactacagttatgccttcagtgacaagtaaagtcacttggtcaggcatgtgagcttgcgtgtgtgtaatcccaggacttagaaggctgaggtagaaggattgatagctaggctagtctgcaatactgagtgagactttgtctgaataaataaataaataaataaataaataaataaataaataaacaattaaaacaagactgtaacgatgaatacactgtgcaacctcccccacataaacacttctatcaccccaaaagtttcccttaggactttcccattcagtccctctcaccatccctccgtgccattcactgaccttccacacccagcacgtcatatgtgtgtgtgtgtgtgtgtgtgtgtgtgagagagagagagagagagacagagagagacagagagagagagacagagagagagacagagagagagacagacagagagagagagacagagacagagagagacagagagagagacagagagagagacagacagagagagagagagacagagagagagagagacagagagagagagagagacagagacagacagacagacagagagacagagagagagagacagagagagagacagagacagagagagagagacagagagagagagacagagagagagagacagagagagagagacagagagagagacagagagagagagacagagagagagagacagagagagagagagagggcaagttttctcatgtatccagccttgtctcatagcacaatgctcttaagactcagctgtgttgctggaggggtcacctgctcatcacatcctatttttcaatctgtttacagttaatggacatttttttgtttgtgttgaaagctggcttgtaacgctgctatgactgtacatggccaagggtctctgtattcactgtctttcatttctctttggtaactggaagtccgacaccaaacttcatccttcatagatggtgctgtcagtgttccatctgaaaagacatacccagtccggtgtggtcgtgcatgcctgtaatccaagcactagggagatggaggctcaacagtcgggagttctaggtctgatttagtctcatgagatcctgtctcatgaagaagataaacagataaataggtaatttattaccagtgagaggtaaacataaaagaatgacatgtattcatgaagatgtcataatgaaactccctattttatacagtaaaatttttaataaaaaaaaaaaaatacttgctttaaaaaagacattaccaagcctgaagagcggcaggcttagtgggtaaaggtgctcacagatgatctgagttctatccctgggacctacattatggaaagagagcattgactccagggttgtcctctgacctttgcacagatgccatgtgtgcaaatctatgtgcacacatgcatgcccaaacacacacacacacaaattcacacacactcagagacacatgcatgcgtatccatacacacatgcacacttatacatacagatgtatacatgcaaataggtatatatacacatagctatatgctcaatacacatacacacctacaggcaacacacacaatacatgtaattaaaaaaaatttaaagtcatagccaaacccaaggccacctgatttctcccatgttgtcttctagaagttttacagttttgagttttataagtatagtttcatgatcatgattcacttcatgatctggcttgagttgtttttgtgggagttgtttttgtcaagatgcgatgtgtttttcctttgacatgtggtacccaatgatcccacacatctgttaaagagattaacctatggcctagtgacttgccttggtcatttgtcaatgagtggtagaccatagttacaaaaatgcacttctgggctctttatggtattcttatgctcgttctttcatactgccccttcctgtcttgagagtaaggtacacattccggtaggatgagtctcaactttgctcttttcctgtagaacagtattggctcttctgagcatgtctctccgtaaacacttgagaatcaccttgttaagtcacaaaacaactggctgcctgggctccttgttgcatttcatctgtgctcatgaacccacagtaggcgattgcgtcttcatggtcctgaaccctaatagagctccatttctttagatctgctatcagggatgtatagtttccttcacatgctttcagtacacttttcattagatctatactcaaatatagatattttggtgttaatgtagagagagctttttaaaatttcagccccaattgctccttgcaagtgcataaaaacatatgtatgagttagattcaggaggatgtttcagaattttacacatttatatatttatatttattgacatttatttagtgtgtatgcatgtgtatgtgtgcaagtgcacacacattgcacacacactcagaggggggtcagaggacagcttccgtgttctgaggactgaatcagtttgtcagacttgatggtaagggcttcacccactgagccatctctccagatccttacatcctttggttattctttgggatctctttatgcaaagaaccaagctatccatgagtaaagatattctctattccctttcaaccttatgctgcttgctctcctctcttcctttattgttaggactgctaaaacgatgttggatcagggtggggcgagtagacatccttctgcctcaagattagttttttgcgttgatttcgttttctatttatattttagatcacgagttccaactccatccatactatccacatctatcttattttttcagccatttattttcagttttcaagactgttcttttcatgcttatattggagaaaggtaagcagccgagaaggaatgagataactgcacaggaaagtatcctgcgaactggaaagtgccacagaggtacacgctggtccagagtaattgtttcccctatcaataaactatgcaggaaacatagcaccatacaagaaatatttgtatggaggacagaaacagggcatttcacttatggacaagaggataattggcattgtttacggcaaactcaaagaaagaactgtgggatgactggtccctattacaatgcatactctggaagcaaaggcaaacaaaaccatctaggtgatgtagtgcatgccgtccgatcacattctaaaacacagatcctggaccccacctcacctgttgaagaactgttaggatgggactcggggtcagctgcttactgcacaaaaccaggcttcagaatcctttgccacacaaagaacaggctccattaagggggaatgcactccagatttaacgacacagtgaacaattaaaagttacaagagagctgggtgaggtagcgcacagctttaatcccagcactcgggaggcagaggcaggcggatctctgagttcaaggccagcctggtttgcagcagtgtgagttccaggacatccagggctacacagagaaattctgtctcaaaaaaaaaaaattacaagaaactgaacactgaagagtacattacaaacccggagtcattaaagcaagacatgaagttctatgttgacactagagcaggtcattaacatgtttccatggtcactaatggggagtttaaaaatatacatttccatgagatctccctccaaaaagacttttggttcacctgaaggaattttatttgtgtgtgtaaaacccagtgtgtgtagggcttctccaaggcttcagggtgacacatagttgatgcaccataaaagggtatgccttgtactctgagcagcctcacaagaaggtcaccttccctgctgaggttctgctcggaaccctcaaactatttatcatcagaaaatcttctctaccagatttaccgcattagggtgtgagagcatttccatagcaggaaagatctggttttataaaactgaaatagccacaggagtgcttcctcctactcactgtgcctcagccaagccacacatgcccaggggtcgtcacttgctcagctacatgtttcaaagccacttcttcctaacaagcccattgctcgtgcagggaaaatagacaactccagagctaagtaggatcagacatggtgtcttagggttactattgtatgatgagacaccatgaccaaagcagcttgggaggaaggcgttgacttacacctggagacaggagctgatgcagaggccatggaggagagttatttattagcttgttcctcatggtttgctcagcccacctccgtgtagaacccaggaccacagcccacaggtggtactacacacaatggtgtggaccctccacccaccaatcactgactgcaaaaatgccctacacacttgcctacagcctgatcttaggaaaatattttcatagttgaagttccctcctcttaaataactttagcttgtgtcacgttagcacaaaagtagccagtacacatggtgaatccttggatgggagatggcttgggactatcagaagtgatcacctctctaaaaaatatttgtttgtttgtttgcttgcttgtgccctgtctgtgcaccacaggtgagggtctcggataccctagagttataggttgctatgagaggctatatagttgctggaaatcaaaccagagtgctctggaagagcagccagtgctttcaacagctgagtcatagctccaactccaaatgaccaatctttaaaatatatttcacacaacttggactgtattcccttaaataattatgatacacactatacaggttaatggaaaaccctcattttctgaacacctttccttcatcaaatgtccttaggaaaatacttgcctatggttagattgattgaccgtctttctggggtgacttttcttctctcgggccccacttaacaagtgtgaaatgcatgatgaaatcatatttatagcttttctatctgtcaaggaaaaaaatccgattaaagttggcaagaacattttgatggatgtgtgggacagaccacctgaactttgacccactttagcatcactcctttggtgtgcctcctatacagcacacatcaccttaaataacatctgtaccaggagaaaatgcacctgaatcaaatggagcctgtggcttttggtccatgaacaaggaagcaaagtccaaaatatagaaaattctataggatttgtagtttacaaatcaaggaacatggaacttgtcagagttggggcaggggaatagtaatcatatgttaagtatgattgtgttggaatcccaagggcaaatctagcaagaagccagcatgagataagtatctgatgattattgatgaacttctgctgtgtaagatataacactttgttcctagagctggaatgtttaagaccaagtgaacaaaagattatagagttctgagagccatggctggggctgcttcaagttcaggtgtggatggaatgatacagagttgcaactgtgttgaaggctgggcttgctagtccctgactacacggtggtagaaagatgtctgatgtccttaactgccatctgcagaaggggactagtaacacttacttctcatggtactgaagaaactgtaaccattggttcttctggtatctagcctgacagcacagtgcctattagatgtttaggtgagctaggcactgttctaagatgtgctagtaatgagtaacactaattatattaatacaatcaatataatactaatttataacaccctggggacagaaataatcactacttcaattaacacactaaaatcctaagcaactcactgaagggcaaacaattatatcctgtactcttcctccctccctccctccctccctccctccctccctccctccttccctccctcccttccttccttccttcctttcttccttcttccctatgctgtgtggtccccaaaacagtgttctgtgggtggagtatcaggatacgtgcaaacagcacctaagccttgctactccaaagcatgaatcagagtcagacagacctgaagccatatactataccccagcaatgacttaatcgatgatacctgctttcaaccaggggtcccctgtttctagattaacaagcatggctttctaggttagtagtgccaggttaggtacacaaatgctcactgctctgctgggtccaaggatctccctggccattgtcttttagcccactaccaaaccttcaggttcgatataccaaagctcatcccccaaagacaagacagacaaatccaataaacctcagaaccaccttggaaatgataaagtcccctgaataggaaggaccatgaatcccacaggttgctcaccagttcctccgcacccagaaacaggctctcacctgtgttaatccaaaatataaaagaaacaaaagcagaacaaaatgtttatttagtgtcccatttgttccttgattcttccttgtcttcccattgtgggggcctcttggcaatgtttgttaattatgtgcaggttgttggcctttgactttaaacctaaatatctgctctctatgtatcaacttgcgcaaacatctgtgcactgagcctaggtgctcaccctggagctcagcagggtcaggacaactattctgcgcagggagcagtgttcacacaattgtctccatattcgctattttacacaagtagacatagtcaattgttgctggaaagcgtaattaaaatatatttgtgaccagctgaaaatggactgtggagacgagccaaatagacaaggtagaattgaaatttttcagagctctaagaccctatccaagatgggaagtcaattatttagctttctcaaccatattcgagggcacctttctctgagggttttgtttatgatgctaagaatggacccatcccatcccatcaaccaggagacaaactcagggaaatgaaatgatttgcccatggttgcaaagccagtaggcaggttgctctgagctctgatcactgaacccctgaccaccatggctggaacaacggggagaaagaagaggcttagaaagcttggtaggcaggtgacatcccatgtaggggaaaaggcagcgatccagacttgaggcttgtcctgccaaggatcacctgttttctgtgtgagctggccccagtgtcagagctgctgtctaccaccttccatgccacctgaaagcctccttggctctcttgcttcagatgcaaggactatcacaaccaagccatcgatgatatcacaaacatcaaaactggaggtgccgagcgctcttcaaccatgacacacacagcaggtgtcaataagggccttcaactctgattttaactgttgccttcaccacatcccctgtttggctgaggttggtttcaggctttgagtacctccccaggggcagacagggacctctcagctcttgtgagaatctgcatggaggtcaaatttatttctaatcaacaaatatctcacatcctcctttgggtaacccacaaaatgtacacacacatgtaaattcaaacgcccgcgtgcatgcacgcaaaggcagatttgtgctctcctcccatcctttcctggaagggaggccaatgtctactggatgaagccacgccccatggtataccaaggttctatgtgctccctcttctctggtggacttctgcactccctcacttcagccaccctgagactccagggttagccaaacctagtcacagggaatgttgtcacacagccttctgggtgactagggtgtagccagtcttcattgagaacttatgcattccctaaaaccctggaaagtcggttgttcatggactgtaaggagtggggtcatttcccataggagtcagacttcctgtcagggtctttaaatactcaagtgtgctgggtaagtagctgggtaagttttcccaggaagttcacatttgggggctgactagatggaaaatgagtgtggtcatctggacaggcgaaaaagagctcaagtccagagaaggttctcgaacctgctgctcactgacttatcattgagtctgggagatggggaggtcaggacatgcttgagacccaactacgtggtgtccatccgagaactatccttgtcccagctcctaagtaccactggggctaagctttgcttctgtacaagggtatgcacttactcttgaagtgctcatggaatataggcagtaaggaaacatgtatttattttgttgtctggatttgggtctttcccacatcttctaaaattcttaaccaaagaacaaacctgatcatagagtctatcagtttgtcctctgcatatagcattcatttaactctgactttaaagcatcttactagacatgctcacacaaaatctcgccattgacagaggagcctgtgggaccagggaggaagaggaacttcccagtgacatagtggcccactgacaacataacactaaaacccagaccaccagacatggggtcaggctcctgtccctgaaaactgagacctatgccaggtgatgtctgcgtcctaaacacagtcattttccctctctgggtcgctgagaaaaagatggatgccagcatagctctttcagcctcttctctcatgctctgatatgggaagctgcactgtcacatatttctaaccagaagggggttgggtgcagggacccagggtcttgaggtctcttgtcattgtttgctgtctgcttgcatacaggatggggctgctgagcagcaagaggcaggtcagtgagaagggcaagggctggagccccgtgaagatccgcacccaggacaaggctcccccacccctgccacccctggtgagtgatcagccccttccgggacagggtctaagtcacagggtgctccctgaagcggctgctttgggctcatatgtctccatgacggtttcgttccattccctgcctggtcacaaatctattagttcggggcaattggagtcatgcctggacccatgtcctgccctgtctgtcactgtgggcatcaccaagatcctaacagaggcctgatgggagccaagactgctggttccctttcctagacgaaccctggcctctcttctagctgtatcaaagcatcctagctgtatcaaagcatcatacagtactctgcacacgatgagatgtttattgagtggatgaatgaacgagaagatgggcaaattcaaacttagaccaagttattttcccaaagtgacacactaacaaacagaagcctagagcttaattttttaaaagccgtgggatgcatccgtactttagaaagatggaaattccatactatttcacttgccggagataattagagttacctctcctgagctcctgccccaaggccctttcttcatccatttggctcatggttctgggttacagcccatcatggatggccatgacacagtagcaagagcttattgtatctgccttcaccacagtaacacaatactgtgacccaggcaactcagagaggaaaggttacttgggcttcagttccagagggataacagttggtgagatttaaccacactgatgcagctcattatttctttgttttgccatggatcttaagggctactgtcatgatgaaaaaacacttcatgtgtgactattactataccaggcgtatcttcatgttatggcctggcacacatgtgcaggagtcttcccatgggatagacaccctgtggatatttattgagttttagggaaacacaattttccaatatctttctttgccaatgaatgcccgtccacaacttcttctttaatggtagagccaggattttgactgaggtgacagagctttttccctttgaagctaggcatggacatacatggtcagggcaaggatggcaggtggcctggggtgacagaggtactccaaggagctgatatagtgtatacagaatgtatctaagtatccctgtatgtggctaccctccttcctcagagtaggtacccacaggcaatctagtctcctggctctccagtgtcctctagttctacccttgctatagactgctcactaactcagtgtgtttctgcccaaggttgtcttcaaccaccttgccccaccatctcctaaccaggacccagatgaaggtaagaaaagagcatgagagcacctgtctagggacatcatgtgttagaaccagagcagttgtggtgggccctgtatggctggaaagcagtgggggatgctgggagcttagaaggagaataagaaaggagttacaggagcatgtctggcacccaaggcctggcttggagactctagatcccaaactccaagggcagcaggactgctctgtccttccctctcaccatgtggaggatggacaccttcttgactccctctttccatagcccctggaaaccttccagccatctgtaccatctccttcattccatactccacagtgttctgatgggactatggtggtcccatgatgaatgagcctcctcttgggccgggactcaggcttttgagggcttcctggatgggatttgtttggagctggctaccaaatcatcccatatcacccatccatacaaatcattccttcattcactcacagacaatgtggagcaagagcactcaaaccactgtatcccaaagattgggtaagatgtcacagtgggtaatacacctctcctgtcccttgagagctaagcctgtcacctttatgagaaaagtgctagaacttgtcggtgttgtcatctgggagcccttacccagctaaggacaccatctttcccatcagataggtaacccttcactttctagcagggggtatccaatctttaaaatggaggctcaggggagggaaataactgactgcatttggcacaagggtttaagtctcaacactgtgagggactccgccattcatgctgagcctcctcccaccaagggaaggtcccagcctcagaccatgccactcatccatgacaatgttaggtcatctgtgagctacaagtctccaagagattctgccaggtattagggacccctggtgtcaaacaatgatcatctgaaaagtgtccagcatgctcctgcaccttctactgcctcaccggcttgtcaacatccttccaggggagtctcagagccaagaaggccaggtgctgaaagccagaggtgcccctgggaagctctggtaccaatgccatagagagggcggggctggagtggtcacatgacctttgggatagaggctgggaaatgatgctgaggggatacttcagaggcaagttggattcaggatcagctactggctcttagacttgggcctacagccctctaagggctggcaatggctgcctccatgtagctgctcccccaccctcaatctttgtctaggccttagttctgaaaggaagatgagccaggcaatgagggtcggcctattcctagagtggctgtgggtctggtgtcacttcctgagaatcccctcttcattgctgagagtatagcctcatgtggcttcctctcactaacgctcttaggacctggaagatggtttcccccagacctctacttcagttgtggaccccagtggtagccatctcttccttgttctttccagaggagcgttttgtggtggctctgtttgactatgccgctgtgaatgacagggaccttcaggtgctgaagggtgagaagctccaggtcttgaggaggtaaatttctagcatcctgtccccagtcatcaaggacctccccccattgtctacttccctagttcacccaccccatccctggggcacccctaaatggccttctctcttgccatttccctctcctgagttccggggttctcttaggcatgggtcattgtccttccctccaagtctttctggtaaggtggtttccacgtctggccttctggctgctgttaaaatctaacgagacacctccctggatcccacatagccactccactttggcttactctctgtgttctttctcagaacaccctccagtctgcttatgttctcccttcttccttcctccacccttcaggcccacaccatgcaacaccaaggtctgactttattcttaaaggtctgcagtgggtttgaattgaacgtgtaagtgagtgccctgatcttagattctacacagctttccagttcctcccttgtcaagccccctcctgggtttgttttcttagccaggtccaactcattcataacttttggacctgccccatccattgagacaggggccacttagtaaagggcatggtgatcaggttgtcaggctatacaagcaaatctacccttcctctgcactatgaccccttctgcctgtcacatggcccagtggatgggccactcccacggcacctccttatcaccaggctgtctgtctgtctctctctgtgttactgtctcttaccagattgggatctgttgtagggtgctgagagctgctcagtgtgtcttgtgtgagcctctgacatatttctgtctccccttcttcctctagcactggagactggtggttggccaggtcactcgtcacaggaagagaaggttatgtgcccagcaactttgtggccccagtagagactctggaagtagaaaagtaggtgaatagacttcgtcaagccagaggcggcagggctgctctcactgctctgggtacggcagggccagaaagtgagcttagtagtggctgttggtgagaggccaggaatggaaagttctggctctcttctaacactctgaatgatgccaagggagtctgtcttccctctgaaagaagagctactgattcctagcttctctagatgagactgcccacagtgtctggttccctccagaatccatagcaaagctctatgtcctgtgaccattccccaccactgccagagacaggctcagtcctcgaggcatcttcaactttctcatcaccagctctcacacaccagcaagctccaccgggggcattcccctactccttcacatagtgcagagacatgagtatgccccacctcatggtggtgacgttacctgcttccttacccttcccacgcaccatgggttttcccccagaaacatgttgtatcagttatttctttcatcactatttaaaatttatatagtttaaggaaggcttcattttggatcacggttagagagagtacatgatagcatgaaaggaaagatacaccctgctcacgatgttcatgatggtaggaatgtacagccaggcacctctcacagatcagtggaccaggaagcagcttgagcttcaccagggcagctgagctggcttgtcacctccagtgccactcccatggcttccaactagacctcatatctcgaaggttccacagcctcccacaagaacaccactagccagggaccacatcttcaaacatatacaaccctgcaaggagcattttatatctgtccacagcatgtgttgaaaagccccatgctaaagagaggtgaatcggaaggaatccaggcccagaaagtccctggcagtgacatcattggctcagacagcaaggaaactgaaaactcatgccaggagaagggtggtggaggatcaggagctatctcacagactagcagtgatgaaggttacctaactcatgttcttgcttcatcacattcatccaaaatgtgaacctagaagttgatgggatgaagtggggttgcagggactgaggggccatctgactgaacaggatgtgagggacatctcaggatcgacttaggggtatcaccaactctgaggctcacccactcttgctattttccagatggttcttcaggaccatcagccggaaggatgctgagaggcagttgctggctccgatgaacaaggccggctcctttctcatcagagagagtgagagcaataaaggttggttcaggagcctcgctggccccacttgccatgtgtgcacggtcctaggaagccctcagtgaggccttgatctggagtgccagggatacctgttccatggcttctgtcccatgtccctgcctgggagctgctttgaggctgtccacaccaggtattctcctggtcccaagactgacactactggatagcaggggtcgtggaaacacccaaatgctacagtggccacaaactggccacaaactagtgaactgaggcagatggggctgagaaaggaaagataccagatagccatcagtcccccagcacattttggaatcaaagagtcaagattggagaatctttaaaaagcatctcagtcagcaagtggcaggtcacaggaaagagcaagggctgtggcaacctcaaggtgcgatggacaggaaggcagcctcttggtgcacttttgcaagtagactgtgagagacagattagcaagaaagacacaagaggaaaaaggtcttaagatgcggactgctatgcctgcagagcatctgaaacaatgtgcaacagtatcaaggtcctcatacagaaaggtgtgcaggcctgacccctcgtggtggagagtgggactgctcctcaaacacgtgttcataggaagggtagggtgcctccttctcagtgcccctaagcctactgtagctaactcttctcctaatcttcatgcaatggccccatttcacaactaatttgaaaatgggagattctgtggcagccacagggctggacagaggcattttataaaggctcaggaagaagtttcttagcgggaaactcttcctctgtgccttgccacctgcttccttgtctatacaaaaatgtcaacacaaactgtaaagcacagtgtgactttggaaagacctctggtgagcatcttgcttccaggaaggacatttgcactggaggccctgagtctcccaaatcctgagtccctccaatcaaagatatttaagctccaagtccgctggagacctctcatttctgagtattctaggcatccccaagagaggacctatagatagctgagaaacggtcctgtctgctccagagttcctgattccctggcagtctagggacttggagggaagtctgggtcagacagccaatagggaacagggttaagacaaaaggaagggaatttatgctgagatggctgaggactgagtccagaatatggggaaccttcttcacatctcacaagtgccaactatggtcctgggtttgcattactgtgtctcactttgcatgtatctgttaaccctgtaggtgccttttccctgtccgtgaaagatatcaccacccagggggaggtggtcaagcactataagatccgatcactggacaatggaggctattacatctccccccggatcacctttcccaccctccaggccctggtgcagcactattcaagtaagaggcattgggaatccctggggtctctaccacatggccctaaactgtatgagtcaactggagggggggggttgtcctccaaaccagacttaaggatttgccaacttgcagcttaatgatttcaagatcagaggcctaatgcttggggtggggctattcggaatgtcgcaaagacctacagtctcagagagtgcagatcccagacatcaagtcccgcctgccaccgcaggagtgaggagacaagagacacagttctaggacagtgtggttcttaaggcacatctgctctagggaccaccaggaccctcttttcttccctgaaacagagaaaggggatggtttgtgtcagaagttgactctgccctgtgtgaacctggccccgaagaacctttgggcccaagatgaatgggaaatccccaggcagtctctcaagttggtccggaaacttgggtctgggcagtttggcgaagtctggatgggtgagttgtggcatccccaattccctctctctcctctctgctctgagcctggccatgggagggaggcagttccatacaggcacacacccctttcctgagaggcctatgaggcatagaggcagagctatatatgtctacacagatgagtttataaagcccagatgccaagggattcacatcattatcttgtcttccctgtagtggaagggactggaatccagctctcccgatttgtaagccagtccctcttccattctcagacagatgttgtctttgtggctgacttctgtgaacttgaccatttcactaggtccttttaactccagctctccagacacaagccatacatcagatattgggagtcaggagccaggagctccagggtctttgcaaacagaagtcacatttactggtgtgtgactgtggggtcctgaccccagtggccgtgccattctgtcatagctgctgcctgctgctgcttacttaaagcacccagatagggtgtaacataaggccctttgtcttgttctgctctggtccatgtctcaaatttccattctgatgcctcctggaacctcacacctttatccggagctgcagatctggtcctcaccaaggctcagcacccataggaagagcaagccccggccattgtcttacacactttagtgggtgtcatcccacaccccagactgcatgaaccccaacacatcctgaggctctgttgcggggttctcagagacaaactggcatcttatacaagatatgaactcccatcatgcccgcaggaactgcacgttccagcttgaaccttgggtccagatagagtgaggcttgaatctgtggtcaagggcattcttcaacatctgaatggctccttcactctcccgccctttcaggttattacaaaaataacatgaaggtggccatcaagaccctgaaggagggaaccatgtcaccggaagctttcctgggcgaggccaacgtgatgaaaaccctgcagcatgagaggctggttcgtctctacgctgtggtcaccagagagcccatttacatcgtcactgaatacatggccagaggtggggtcctctctctctctatgggacagagcttacagggcagaaacaagagtggagcatgctggcggatttgcctggccccaggggctcctataggggatctgtaagctttgttttacgagagggaggactgagaaagaaggtagaatggattttagagagctgtgttctcagctcaggggaatctcagccttccagagaccccccagttttgcttctgagttgtattttccactcttggagcaagccctgtgtttctggaacctcatttttgcttctggaatacacacatcatgctttgatccccagtatgattggcagagccttgcaaactaggaagagctgtagactgggcatccaaaggtggatctaataatcccagttccacctcttcccagtgacgggaacttttgcaaacctgtgaacatttcacagtgggggttgataaggcgaatgggcctgggcggcctctgcagtgcctccacagggagcagttggccaggcaccagacctggctccgacctaagggacctcaccctccatggccctgacatcacctttcctcctgtaggtcctcaatgttaccatgctaattgtaatagttgttaccaagaggggcggcatcaccggctatgctggtaacctgcctcctggctgcagttttcaagagcacctcccaggccgtgagctctgtggaagagccactttcattacttgccccagctctctcttctggtgttttcttgttaatgtttggtggggagggtgggagagggagtctgtctaggaggggagtagactaaggaagacacctgggaacgtcatgctggaaaagaacactagccttaggcccagagctggtctatcccagctctgctgactcaggagaccccagatgtgcccctgaatttatctgagaactaacttttaaaagtctgggagctagtgtttccctgaagcctgaggcacctcagctgtaggcagatcaccacccctacctcctcacatagacacagaccacgcaatcagagccaggctccatccagtcactttgcagttgctgtctttcttctcctaggatgcttgctggattttctgaagaccgatgaaggtagcaggttgtcccttccaaggctgattgacatgtcagcccaggttggtgagctctgaagcagagcgggagcctgaagggggggggcgccccactctgtgctttgtgactgtactgaattccctggtaggaggctgtgctcaactgtgaagggcagaaagcctgaagtagcgacctctaaatatataaacccctagagaacagatgagagactttactcactgatgtcctctgccctgatagcatggtagatgctgaagcttcatcacccacccttgacccttagccagcaagatgatggtgataaaaatcccacctcctttcctctagagacacatccctcccactcacctcaatgagaggctcccttggctgcaagggagtctgggaaatgtagttccaattctgggccgccatgatggagtagggtagttctatttattaggaaggtagagatggcagtggatgttggaaagctggagaataggaaagaattctgttttgaatgtaggcaggtatgctttgctctgacttccttctccaatgctctcatcctgtcctaagaccccctaaatcttggtattggcctggaactgacctcagcctgatgaggcatgagccacacagaatacaaggcacaaaactttctaggaccaccttctacacacacacacacacacacacacacacacacacacacacacacacacacacacatcactgtcctggattattggcctttggttccctctgaatccatccatgtgtagacctccccagcctctgctagaagagtgcagaattgagattgggcagtatctttatccccggggggattttagctgagggttctaactggcaggaagacacatctgggggccctgagtatgactgttgaaactggaactctcagcaagaaagctgtggtctgtggccagcctgcgagacacactgtcaacacacagagagctataaaggggagccttcccacccacactttaacccacttgcccactttaacttccgaccctgtcccacattatctgcagctgctatcagcccaggaactgaggtcacagtgtctttttccactggggtagcagagatctgttgatgcagctgttaggatggacacagaaacttaaccctggcgactggctttgagtcaggcattggatggacagaagctggtccgcctctgcagccacaagaatggtggtcctatacagtgcagactgccttggattcttcctgtctgcacatttccaaccagagtcccaggaccagcccttgtcggaggccacgtctaccaagacttttctggacaagagggaggggttgttggctctgctcttgagcagtttgctgctcatcaatggatgaacaagcctcattaatgtctttgggtacaaagcaccagggagaagatctagagagagtcctggctcccctttggctttgtagcatcttttctacagacgcagattcgcgtcttctatgtttgtgtaggttttgtttttttttccctaaagctgattcgtacgtgttagctaacagtgtgagcattgccagggctccctagatagaagctgtttagttagccctggctttccaacccgcagagtcccacactagcaaatgcatattgactgagtggtttcgcaaggggataaatgaggagactcatgcataaagcagggccctgtggaaacagatgcaggactggggcctggtgtgcagctcaataggagagaagttgatagtatatgtacctaagttcctgggcaagtaggatccatctagaagctggcatcctgcaagagcaagtgagagctgaagtcaccttttccatccatcagtgagtgactgaagacttaatggcctggtacaggtgcttgggacagacaaggctcctcttcagtgagagtctgctcctctggagcacctggggcaggggcaggggcaggggcaggggcaggggcaggggcagggcctcagctacagtcaccttattcaacactgaccctaaccttgggtcccagagatggcttctcgtgctctgggtaataactatgacctctcagggaagtgacccagcccattggacattggtgattccaaggcatggttggctcctctgagagaagtgtccactgagggagtagccctgcccttccgtgctatgccctgttcgtcctttctcctccctgtctcattagaggctatctacaaccccagccttctttgctattcccagtccacagaaccttggagacaattgtctgaaaaagggggacaggcctggggatgtcagcctagcttctctgctgccctgagtctgggttggtctcatgggaaggggtggataccttctctctcccctgggcagggcatgtgaagctggccttatgagctggtaggctccatccttgctgcccttcaccatgtgacctgtcccctcaggttgcagaggggatggcttacatagagcgcatgaattccatccaccgtgacctgcgggcagccaacatcctggtgtctgagacgttgtgctgcaaaatcgctgacttcggcttggccaggatcattgacagtgaatacactgcccaagagggtgagcagagtgtgtgagtgtacacacactcgcgcgcgcacgcacacacacacacacacacacacacacacacacacgaaagcctttgaacgtctcaactctctggagcccccttgaatgtctccttgctgttggagatgactagggagacccatggtccttgtgtttggtcctttcccacccagctcagcacttcctttccctagatgggagggggtggcagagaagcaactcaagccccttgggagtcttcattcagaatggccttggaatgctcagctatctcctccccatcctggagactccagtgcatataaatctagaaggatggaggagaagacctgcactttcttccccttgtttcaccctctgatccccagactaagttgagaaaatcctcctgtggaaggagggtgtcagggagcacaggttggaaaacacagctctaactaaagcatgagcatccaacccttgcacccgaagggttgcatggatgctcttctcttactgtgagtgaggaaaattgactttgcaggaggactctggtacattgatcaagcaagcagtactggtttagtgcattaatcagtggattcaggaggagagccacatcttaggggccgataaccccctcaggggacttccaactggctccccagacagtgaaaccatcaggggggaggtggccaatgccacctcagcctgaggttggctctcagtgccaaccaaggctgtagccatcacggtctgaactgagatgggccttgctatccctccacacagtggccctcagaggtgtctgtctgagtgtcaggtttgccttttgcaggaaagcacggactgaagcccgcccataccacggtccctgccgctggacaaggccgagtgagataggaaaggatgcttccatcccagatggacatgcacagggctggggacatagctcagtcagcagactgcctctctggcatgaagcccgtggtttcatattcagtggagtataaatggggcatgctggtgcatggctgtgatcccagcacagtggaaggtgatggcaggaggattaggagttcaaggttacccctggctacgtacgctctagttggaggccagtctgggatatacacaagactctgtctccaaaaaatcaaaatcaaacaaaacagtaagtcagatggaagcatatatgggtggtactggttttgttgttggttttgtttttgcttttttggtttgatttggtttggtttttggttttcaaagacaggctcctctatgtagcccttgctgtccttgaacttactctgtggaccaggttggccttgaactcagagatccaaatgcctctgcctcctaaatgctgggatcaaaggtgtgcaccacaccacccagggacatcaacactgtttttaagaactcctaggatagtagcaagtgactgtgtcttcctatatcctcatgtatccagtgtacacatcctgcaggccctccagtgggaacgggcagataggggcaggactctgtgggttgggggtagatggttggctgtccctggagctactgcactttcctggcaggggccaagttccccatcaagtggaccgccccggaggccatccacttcggggtgtttaccatcaaggctgatgtgtggtccttcggagtcttgctgatggagattgtcacctatgggcgcgttccctacccaggtaggcattgtccctgtccttcctaccatcctcctgggacatcctgatggtgactcgccaggctcactgactgtgggtatgtcacactggtgagagcagggtcctgtcacagggactgaagcccagccctgcattgtgggcttcctctccttctgcacactgctcagggccacaggaagagggagagggggaggaggaggagggggaggggagggagagggggacgtaatggatagggagagggagagggagagggagagggagagggagatggagattagggtggaattagatggcgtaagagacaggtgtaatggctcaagcttgtgattccagcccttgggaggctgagacagacagatctcaagttcaaggccagtctggcctatacaagaagacctgtgtgaaaagccaaagtagtactacgatcctggcacctatgtgaccttccagggttacactagccatagtgtatcagagcccactctttcccttctagtgccggtcagggcctagtctagtgccctcagggccagtgactgcactcctggagcaccaccagccctgaagctccctgtctgccctcctgtaggaatgagcaaccctgaggtcatccgtagcctggagcacggctaccgaatgccatgcccggagacatgtccaccggagttgtacaatgatatcatcactgagtgctggcggggccggccagaggagcggcctacctttgagttcctgcagtcggtgttggaggacttctacacagccacggagggccaatatgagctgcagccctagcaaccaatggtctcttcagggctcccagcctgagcctccttctggactctgactttgggttaatatgttcacacttagctcttcttccaggtaggttgcagaatcagggaagaatggtgtgcctgcttctcaagtgagggagccaggagacaaagatggcttcatggtgaggcatgagctctcaaggcacaacctcggtccacctttcactggctgtgtgcctttggccaagttactttgctgctctgtgtcgtctcttccttgaatgtaaaatgagcaaggattgtgttagaacttacctccagttgtgttcagaccccgatagtcccgaaatcagtctgaccagttagcgatggacaggatgtcaggctgtcataacccagagtgcaatcagagctcccatttctctcaccttttcagtctcatcagcaagtgcctccctgtctgctgcttcagaactatgggtcaatcctccaggtcccctggctgtgtgccccctacccatccctgcatgcacactttgggacttttctataataaagtcatgagaattgtacctttcccctggtctttaccagtgacatgaacagatgtggcacacgagatgtgtgtaggaggtggggagcaccttgccccaaccctaccccattcctcagcaaaggacactgggtgtgactgacactgtctttcctggccagcaggtggcgatctcaccccacaaacctgtatctgggactccatggacgcaagcaccttgagttccaagtttccctagaacatggacagaaagccatgagatggggcggtgatctccccaagtgtggaggctctctcgcctgtttttctgtctcccattcatcctgttttgtttatataggtggggtggggggataagtttatagaaaaataagtagaaagggtccagtctccataaaccctcaacccttttagatgtcagcaccttgcaatagtgagcccacttgctcctccagaggggctgggatcaacacacttcacacttgggttcacaccctacctatactccgtgttccaccaaagcacaagatgatggatccatcaagcccaaattatacagaatagtcctcctggcctcagaatcccccagtgtctcccctcatgccaaggttacaggcacccacgctcatgatggcattttacatgagcactgaggattcagatacaagtcctcatgtgcgccgggcaagcattccccctaagccctatccacaacccgtggctttgtatttcaatgttcccagctggcactgatgactgcccaaggatccggattttggcagctgagctgagtgagctactgagggatattatttctcaggaaaactggctctgtgtgacttccccatggctctccccaggtctgctgtagaggtgacatcaaaggctgacttactcctctcagggaggagggcctttctccttccaggtgatgctggaacccacaaggggtcgcaatttgcccgcactgactgaaggaagttccctatgttcacaaatttattcaggacaaagatccttccatatcccaatccgaaggtcacgtaggagagtgggtgagggatatgtaaagaaaaagagggaagcagagaaaataggaatgataggggaagtggctgtggagtgtccgtgttctcccaacacagtggtggccgtgtgagccactggcaaggggactacgtatgaaacatctgattatatgatgattgccccttgcccagagcttgtgaaggatacagactgagcctggggaccctaggaccattcttacctgagacaggcatttgttttcctagaacctgggtacatcacctacaaaatgggtgagagtgggtttctgggatcaggtaaaccctgagttcaggacaaagcacttcctcccacaggctatgtggtacaacaattcacacctctgggcctcagtttccccatttgggaaatgggcccacagcaggtgtgtcttgttctgagccttcatctcaaagtgataaagagacagagagacagtgcaggaggcagcccaggaaacaggagagacacacagacctcccacctggtcattggcataacccacaaccaacttgagtcagagttgaacatcattaaagaaaggttgacactccccccccccccacacactgtttagaatattcaaactatgcaaatgggacctttataaacagtcattgttgagtatggagtgccagtttatgcaaccatgggaagcactcatgctacagatgaagactctgaggcccagaaaggcgaagtgaacttaccatgcagctggtaagaggcatccatctttggagaaagactctgatgatgtcagggttgggaagctcaccgtgtgctggggtgggagaggaggaggtaggcctcctctggtctcacacagtccttgctgatttgtcggtcttccacggctgccttgtaaaggatatcgggaggaatcacagtcccgctccaaaatgctttctggaaacctcttgtctattccagcatgagcttggacctctcccaagtgggaaacggaggtcaaaggaggtgttttcctggggacctggggtgggtggcgtgggggacactccttggcctcagcttcttgatgacagatggtggcatgctctggggtcttcagaaagccggaatgtgatgagatagacatgaatgaactctccattcagaccggctgctcactgagaagtcctggtccctaggcagccactaggtgcttctctgaggagcaagagcacaggatggtgtctttaaagcagccacgcctacaaaaagagctgcatttgacagcacggcactacccagtttgtagggccttcccgtgctgagtctggccttggatgtctttacttatctagacagcagacaggaagagacacccagactatagtagttcactactgtacccctaggaaacgggatggggacctttacccccaacaccagccgggtgcccagcactgtagaaagaagccctggggggcagaggacaacattcatatgagaaatgggcaacaggggcatcaagcaaaccacaggccagcaagtggactgagggatcataaaaaaatgacaggaaggaaccaagaaagggagaggcaggccctgctgctggatggggtcccagctgtccctgtcttgaagaagtcactatcccgtgattcatagagtcacatctctgcctgatatcccttgagagtatccaggacactctgcccagttaaacttgagggtgcgtaagccatatagctgtcatggacagcagagactttattacctcctgaggtcacacttaaccctgagaagaaacatccaggaataagacagggcctctcacaaggggaccatctctcttcattccatgaagcaagaatactgtgctcccagacaagaatgctgggacattccccaggccatcagtgccacctgtgtgtcactgtgcctaggcttcagacatgttccccacaggcacttccatggggtggggtggggggcgtaggctgtagtcctgttctcactttgtcagtggacaagccaagaatctcaaggtgggcttcctgacagtccttcttgctgggaccctgacaggtgggcgaagtctttccctgactctgccgtgcctttcccagctagtatgtccccggagaagtggaaccagataacacagaaaactgtagcctggtcagagggtggcctcagaattcccagggcctgacctcagcccttgtctaccttgccacacgtgggtcaagtcatggaggatctagctgtgaaggagccaacccttggctctgccttagctgggctggggaactctggtcaattgcttttcttctccatctcacggggatggagatgtgtaatgttctgaaatctttaggcacaaggttctacatgcagctggatgtcaatacacacacattcccttcgcttggacacacttgataatggaaagttaggctcaccttccctggagtcacgggggtgagggtggggtggaggcctaacttgtcagattttagctccccaaccctcccaatgtgttctccctcctgtccagcttgcaccttggcctgtggacccaccaggtctgtgtaggctacacaagctgatggaggctgacaggagccagtctcagggctgggggaagattcctgaggactgatgaggtggaaggaacgctgcccagcagctgacagggataagggaggtaggagggcgaagagaatacactatctcagactgctgccttcgagaagggccagggtaccatctagggccatctctgttggagcccttgccagctccaaggtcagtctgctcttgtggttaaaattagcctcctgatcattgccccggactgtgagtggccttttcccatgaacctccaggacttggtatgtcaagacccagctcggctttgtgccctctgttctccagagagcaggagactgactacctatgagattgttctggaggtgatgatggcagggcgcaggtgtgtgcaggcatgtatgcaggctgcgtgtgtgcatgtgccagccaacccaggagacccaggcagggagtgatggtacaatcctgttagcttattagtatcactcctccattacactacgtctcactcaactcccagattcccgggtgacagctgatggtgtttctcaggatatttctggccccagtgctgcacagtagccccacccccacccctactcccacatgccaggcggtgtttgcatgtgtctgagtaagtaagccaggaagagcagaaggcatctttgactaggctctgccctctggtaagttaggcagtgtctatttctcactacgaccccagcccatggcgcaggaaaggctccactgtgtttgcactatacaactgaatggcggaggagccagtgttttactctttgcccacggtccatagataaggactcattaaatccgaataacccagggaccagggaagcagggttcagtacaggctggagtgcaaggaaaactaagacagagaagaatctcaatattcaccaatccaggccggacatgcccaggctccagcctgcttgccatgtggccttctgcaaggcagacccaagtttagcttccctgtggtaaatgcgttctctaacagaagccagaggggtgtgatgaagcctctgaagtcctcggtaccacagcatgcagccctgtaaggtggctgctagggttttacagattgagttggagtggggggccgtggctatgaattaaacagcctgaagcagataccctgcctgtgagtcctgctggcgactctgagtgacctctgatcaaagttaaggtaagtgtcagcagggaagaaaatatttgcagtgcctgtataacaaaggattaccgcaaagaaaacccaagggtggggtgggggcttcctgttcctaaacaccctggagacaaggggtagataagagtagagcagtgtcgggagagcccctcacagcctggaaacagagacagtgctcggtgcacaacgcaaaggaaacgcaaaataagcacaggtgcatcaggtcctgtcacgggacagcaaggtggcatgcgtgccaggacaatacctacagaagatgcagggacccactggtgtcataaggtgatgtgtgtgctctgtgcatgcttgtcacacatgcacacactcatgtgcacacacatagacacatgtgcatgcacattcatgcacacacacatgcagtcaagtgcacacgtgtgcacacacaaagacacatgcatgcacaaagacacattcatgcacacacacacacacacgcacgcactcaagtgcacacatgtgcacacacacatgtacacacacagacacacgcatgcacacagacacatgcatgaacattcatgcacgtgtgtgcacacacactcaagtgcacagtgcacacacacatgtgcacacacagacacatgtgcaagcacacagacacatgcatgcacattcatgcatacacacacacacacctgtggggttatttcttgcacatctggaaagctacccttcagcaaagcatacactttctccgaagacagacaaaggcctgtcttcagaacctcgacattcaggcatgtaaaggcttcagggatgttaactgactgctttttgatgagtgggctcttcaataggtcaggacaggaagatatgagccagaaacacagggtgggaagcagaaaccatacctggactgagtccatgcacaactgtatctgttagacgcatacttttgtaagcaagcaatggaggatcacatggtacccacccaagacaatctcctgacctctggagaggggtgggggtgggggctgcctgggctgccctgggagcgaaggtgctgttagctcttctctggatacactaatgagtttgaaggaagaaaaggccaggcctgtgggtcgtggcggctgatctgtacagtcttgcctagtggcaagaaatggacgatgtgacccccacagggttgggtcccaccctggagctcagtaccaggccttatgcaccagctgggctccaccccactccagtccatttctgctgcatttgccctgtattatctgtgttatcagttctctgttgtgtcactcgtccaataagggggaagcaggtgggggttccagggagctcgtccaccagccccaggcagtgcgtagtggctgaggccagcgtggggagggtactgtttgaaggcacccaccaaacccagcacagctcaaagacagctgtcatgttgtcccttccctctcctttcctacgctccaggcattgaatgtggccctactgtgcaccaagtactgactgaagtagtatcatctttatagagtcctatcaggtcaattccagagtgctccttcacagatgaagacatgctcagagatagcaagggactgagtcaccagaaaacacatggcagagtagggacctagggtactattactgtgtatccatgggcagacaaggacttctgttcaggtcccagtggaccacagcagtgtcagccctggtctcctcttgtgcctctcaccccaccagcgactcactctgtctctctgtccttggaagttaggctcaaggaggagaatgtcaacaaggcattgacaagcctgccgactgtaagtgggaatctactgagttgaggcggtgagaggaatggagagattgcttgatgggatggattgatgccctagcagggccccctggtacccaggctcctctgaactaagccaggctacttgccagtctcactgtccctccagcaagacaagtgcagtaaaagtccccccttgggaataaggaaagtggcaggtgtttctagcttgctcatgggaatgcaggaattcttgtacccagaacccagatgagctcacagggtcaggaatcggccatcactagccttcatcatcaccatcactaccaccaccgttatctccaccaccaccaccatcatcatcatcgtcaccatcatcaccatcatcacagttattgacaccacttccatcactattatctccactgtgcccagcaccatcaccttcatcatcaccaccaccatcatcatcaccaccaccatctcctccatcaccatcatcatcatcgtccctttcaacatcttcttgtcgttgatgacaactattccctgcacctctgcttgctccctccctttaaaacagaagggactgtataatgtctttcacatctcttccaactatgtaattatgacaaaccaaagtggagttttttagacactgttcttggggaaagagcattttccaagctggtgcaaaagcgtcagctagagaaggttttcagtctgggatgaggatttacaaagcctccggagacctgccagaggtgtttaggagctgcctactctttaaaaaccagccctggagaggctgctagcctttctccagacacgtttctcctagaaggccttacttttaagatcttcagtttaacagcacaaaggctagggtgtgggctcagggtccacccgcccccaatcccaagagctagcacagcttccagaaggacgaccctgtcaggtggccactcagagatgtgctcaggcatctaggatttggacaaaatcctgggtgaaaacctgaggagttcagacagcacgattctgtctttacagaggtcaccagaatctcggagatttagttttatcctcacttggttttggaatcacaattccctctgggttctgctgccatttctgagaggcagatggtgttctacagctaagcacagacccttagaccctcagtgcgggaggactccatggtcccttggtcatttctgtagacatttaagctgggatttctagggtcatccaaatgtgttgcatattggtgtttagtttttagtttagtttagtttagtttagtttagtttagtcctcctacctcctgagtcagggtgaggactacctcttagaaagcccctactctatgtaccctagctgtgggggacaatgatggaagcctaggaaagccaatttggggaaatctatcaccatcttcattccccaggcaccagtggtgatagctatatattacctggatctgtcccccagaaccactgattatgcagggaccctatgcagtacccaagaagagacatagggtagggtgggtatgctactgaggaggggtatggcacctggatgggttacagggagtcaaagggcagatgtgtcctgggagagacaagtaggtcatggaggggacagggtatgcatggcacaaggaatggtctaagggagggatgtgtgggttatacattatcacagagggctggaactggagccaaggacagtcacccccttaacccagagttccctactaacaaacctgaccgtgcttatgaagcctttagtcgtaaactccagacagcctggtagaagagaccgagaagatgggtggagagaggtcacgagccatacagctctggccatcaggcacctgctggggctcctcaggacgagggttggggaaagaggctggaacgaactgtcagagtccagccatgctcttcccatcagctctgcatcagctgagcatagtccttctccacctcactccagacttgccagcagccactggctgagggcctgtctgaagctggagacctcacccgtgtttctctaatccatacccccttgagagggctcagaagaggtcagtggggtgcagaggacaccgagatgcaggcagtgggcatattccaccagaccagcgtggcttctgatgtctgggtttgtatctttttctctccagctcaggtggtaaggcgggctgacagactaggccccttgctcccccggtacctctgccaaaggctgagtcagttgggtgcggggcactgagggcactgtgatgtgagagttccagttgggattttccatagggttctcttaggttcatatgatgcttttgggtattggactagaccctatggaattgccatggttactgaccaaaaggactacaggacttgggggtgtgactcagtggcagagtcaatgtgactcagtgatcatgtacgaggccctgagcttggtccccagctctgaccttgctattaaatgaatatatcaacattaaatttaccttgattgagtcaaagagcccagaagcctgtgataaatagacccttctctacagtctgagacatcctcgactcaaaggccagacgtgtgtgctgtggcaggggctgcgggagatgacctttgccatcttagtgacgctgtgactttctctctgaagttctgttgcggctgtgactaaccctcatgaaggctgtgtctatagctgctgctgccctcctggggcttgtggagcagctgtgttccttggtgaggattcaggtgtcgagcgctctgtccaccaactccaaggttgctctcatttctctctgaaagtttctgtgtgagacaaggactcttggtcccagacttgggtacaaagccctaacagaaattcctatgggctatgcgggggctgtggagggaggtatgggctccaagagtagagagactgactggaaaacctgcttctgtcacatgacttcagactgtgctgggcttcagtctccttagctgcccaatgtggagcctaatagtgactcctccaggggaatggggtcgggt

SEQ ID NO: 490 - DNA, 2094 bp, Mus musculus
cagcctggctgaaggtcaggtgcccatgaaacttcctcagaaacacctccggggctgaggagccagaagtctccagaagacttgactggagggcagagctcccactgagctgcttcttagggctgttcatggcggtctgatcacaacagggggcacacacacctctgtgtgctgttggcaggaagccacaagccactgaagctgactgagatgagaagaatccatctggggatgggattggcttttcttaactgggtccagagcttctggttgccgctagaaagttcttcaaccacacagaccctgggatctgcacagctatgttgagaagctactgaagccctgcaaggatggggctgctgagcagcaagaggcaggtcagtgagaagggcaagggctggagccccgtgaagatccgcacccaggacaaggctcccccacccctgccacccctggttgtcttcaaccaccttgccccaccatctcctaaccaggacccagatgaagaggagcgttttgtggtggctctgtttgactatgccgctgtgaatgacagggaccttcaggtgctgaagggtgagaagctccaggtcttgaggagcactggagactggtggttggccaggtcactcgtcacaggaagagaaggttatgtgcccagcaactttgtggccccagtagagactctggaagtagaaaaatggttcttcaggaccatcagccggaaggatgctgagaggcagttgctggctccgatgaacaaggccggctcctttctcatcagagagagtgagagcaataaaggtgccttttccctgtccgtgaaagatatcaccacccagggggaggtggtcaagcactataagatccgatcactggacaatggaggctattacatctccccccggatcacctttcccaccctccaggccctggtgcagcactattcaaagaaaggggatggtttgtgtcagaagttgactctgccctgtgtgaacctggccccgaagaacctttgggcccaagatgaatgggaaatccccaggcagtctctcaagttggtccggaaacttgggtctgggcagtttggcgaagtctggatgggttattacaaaaataacatgaaggtggccatcaagaccctgaaggagggaaccatgtcaccggaagctttcctgggcgaggccaacgtgatgaaaaccctgcagcatgagaggctggttcgtctctacgctgtggtcaccagagagcccatttacatcgtcactgaatacatggccagaggatgcttgctggattttctgaagaccgatgaaggtagcaggttgtcccttccaaggctgattgacatgtcagcccaggttgcagaggggatggcttacatagagcgcatgaattccatccaccgtgacctgcgggcagccaacatcctggtgtctgagacgttgtgctgcaaaatcgctgacttcggcttggccaggatcattgacagtgaatacactgcccaagagggggccaagttccccatcaagtggaccgccccggaggccatccacttcggggtgtttaccatcaaggctgatgtgtggtccttcggagtcttgctgatggagattgtcacctatgggcgcgttccctacccaggaatgagcaaccctgaggtcatccgtagcctggagcacggctaccgaatgccatgcccggagacatgtccaccggagttgtacaatgatatcatcactgagtgctggcggggccggccagaggagcggcctacctttgagttcctgcagtcggtgttggaggacttctacacagccacggagggccaatatgagctgcagccctagcaaccaatggtctcttcagggctcccagcctgagcctccttctggactctgactttgggttaatatgttcacacttagctcttcttccaggtaggttgcagaatcagggaagaatggtgtgcctgcttctcaagtgagggagccaggagacaaagatggcttcatggtgaggcatgagctctcaaggcacaacctcggtccacctttcactggctgtgtgcctttggccaagttactttgctgc

SEQ ID NO: 491 - protein, 499 aa, Mus musculus
SPARMGLLSSKRQVSEKGKGWSPVKIRTQDKAPPPLPPLVVFNHLAPPSPNQDPDEEERFVVFDYAAVNDRDLQVLKGEKLQVLRSTGDWWLARSLVTGREGYVPSNFVAPVETLEVEKWFFRTISRKDAERQLLAPMNKAGSFLIRESESNKGAFSLSVKDITTQGEVVKHYKIRSLDNGGYYISPRITFPTLQALVQHYSKKGDGLCQKLTLPCVNLAPKNLWAQDEWEIPRQSLKLVRKLGSGQFGEVWMGYYKNNMKVAIKTLKEGTMSPEAFLGEANVMKTLQHERLVRLYAVVTREPIYIVTEYMRCLLDFLKTDEGSRLSLPRLIDMSAQVAEGMAYIERMNSIHRDLRAANILVSETLCCKIADFGLARIIDSEYTAQEGAKFPIKWTAPEAIHFGVFTIKADVWSFGVLLMEIVTYGRVPYPGMSNPEVIRSLEHGYRMPCPETCPPELYNDIITECWRGRPEERPTFEFLQSVLEDFYTATEGQYELQP

SEQ ID NO: 492 - DNA, 90401 bp, Homo sapiens
  misc_feature (1)...(90401): n = A,T,C or G
ggacaaaaacaccaaccaaacaaaacactgaggcaaaactaaaaacaacagcatccacagtcttctacagattgcccccaaactattttgtctactgtctcagagagtaggcagtcggcttaaagtactcagcctatggctgtccatggaactctataccagtctgctcaggctgccataacaaaatgccacaagactgggtggcttaaacaatagaagtttattgtcttacagttctggaggctggaagtccaagatcaaagtgcctgctggtttggtttcttctgagtcctctctccttgacttgcagacagctgtctttccccccgtgttctcacactgtctctcctctgttcatacacatccctggtgtctctatatgcttcctcatcttataaggacaccagtcaggttggacacaggccctcctgaaataactcattttaatgtaatcacccctttagggctctatcccgaagtatagtcattctgaggtgctagggtcagagctccaacatatgaattttagggaaacacaatgcccttcataacaaactctatccacagaatttcgagatgtgcagaatacagactttaggaggactttagaaataactgagtttccagcctgggcaacatgacgagaccctgtctctatgaaaagtttttaaaaagaagccaggcaaagtgacatgcaactgtagccccagctacttgtgagggtaaggtgacagggtcacttgagcctgggaggtcgaggccgtgatgagctatgatcataccactgcactccaggctgggcaacagagtgagaacgaaagaaagaaagaaggaaggaaggaaggaaggaaaggaaggaaggaaggaaggagagggagggagggagggagggaaggagggagggagagggagggagggaaggaagggagaaagaaagacagagggagagggaggaagacaagggaagggaagggaagggaaatcactgagtccctctgagtccctcctttacctcagttcagaataaaggagccttgtttccctcctgactgtcattcatttcatgtgttcagtcaccatggctacagtgacgacggtaaatgtcttgtatgtcagaaacaattctaaatgctttgtatacttcagcttgtagaatcctcacaaagagataggtattactactatccccattttaaggctaggaaactaaccacggctaggttgggcaacttttccaattcttggagctgttgaatgtctgtggcagcgttcgagtccagggagtcttgctctagaatccaaggtgttaaccattaagctttttcagagacacatgaggacacacatgtaaagacccacactattcatgcatcttgcctttaatttaaaagaaaaggcaatgaacattttctgactgccttttgagggccagccactttacagcctgctctcagaagaactctaggaactcttgtaatctcagtttttgagaaaactgaggctcagtggtgaattgacacagctggaatctcacagctggtaagtttatgaaactaaaatttcaactttgagatgcgtgatggtaaagtgctcatcctgttggactcagttgcttccaaggctgaaaaaagttccttctgaacactccacaccagtggttttggggggtttatttttgtttttttgccctgtgaggcttgatggctgagtggtagtgaaaatcaacttagttggtcaaaaccaactttggaaaatgaaatagagatgaagtggtatcagcaaaaaggcagactaggcagtcccacccctgttcacccataacaactatgatttaacaactacccatgtatgaaaatggctctgagagaactccaaagtataattagaaagctgcaacaccccagtggattgcaataacagaggacagccacggagaaaactgctggaagcatttcatttgcatcaccccaatcccaagctggcacagctcggatgccaagaggtacacccttggtcacaacttcctccaatgggaaaaaaggatagcaggaccctggaaacctttacaactgaggacactaacagcccttactgctgttgcttgctgcaacaggcacctgcagcctttgccactgaataccacagagtcttcgccaatgctcatcctagctgacagagctgcccaaagtccatagcactgtgccctccagagccagagccatcactgctcctttcctgggacctgagtcaccactatgcctcccccagggctggagtcaccaccatgtgcattcttgcaccccatcgcattgtatatgtacccatcaatcagacccatcactaatggtggccatgtgcccactggccagacctagcatcaccatgtgcacccagaaatggcacctctgcatgccttagaatcagcatccctggaccttgtgccaaacccagcactgctcacgccctttccagccagtgtccttgtgcccacccataggtaaaggccttttcctaccaaagctggtttgtaaagtctggaagaggtggctactcctttatgtgaaggcacaaggcaagggtaaaaggtgcaccaaaaaatcaaggaaacatgacagcaacaaattaacacaataaatatctagtgaataaccccctcaaaattgagatctatgaatttcctgacaaagaattcaaaatatcattttaaagaagctcagtgagttacaagaaaacagagttcctgaactcaggaaaagagtacatgaacaaaaggagatgttcaggagatagaaataattaaaaaaaaaaaaaaaaaaagaaccaagcagaaattctggagttgcaggataccatcaatgaaatgaaaaatgcagtagagagcttcaacagcagacttgcacagaagaatcagttaactcgaagacaagtaatttgaaattacagtcagaggcatgaaaaagaatttaaaaaaataaagaaatcctatgagatttatggtatagcatcaagtgaaacaaatacacattctgtaagttccagaagacgagagagagaagtgaaaacttaccctcacttctaattcctgaaatttctggagattctgtgatgaaaatagaatcttctcttttctttgttgatagctagttttatcaagcccatatttggtttcactgattatctctttttttatttgtcttctatttcattgatttctgctctaattcattaatttccttttacttacattgtgtttcacttgttcttctttttcagtgattgtagaccaaccttgtattttttctagtattaatatttatagctataaatttccctctaattttttagctgctgccataaaattttatgtgctatactttcattttgactcaggtcaatgtgtttcttaatttttcatttaatttcttctttggggttatttagaagtgtgtcatttaatttacaccaaacaaatttacaccaaataaatttaacaaaattatttctgttattgatttctaatttaattccattatggttggagaagatactttgtttaattttactccttttatagtcattgagactttctttaagaccctatggcttacatagggtctatcctggtgatgttttatgtaagcttgaaaataatggatattctgggtggattgctaatatatgtcagtttaatcaagttgtttgataatgttgttcagatcttttttatcctttctgactttctctccacttgttctatcaattactggaagaaaattatcaaaatcttcaactatcattggtatattgtgtattgaactttttagttcagtcagattttgcctcacgtgttttaggactttttaaaaaggtacatgaacataattttgacagctctgcctattgcttgctcttttcttattatgaagtcacccttttttcccagtaatatgtgttatcttaaattctattttgcctgatattaatataggcaccccagttgtaatgtatttattgttcacatggtatgtagtttttttggatccttttacttttaatctgtttgtctttgaatttaaagtttattttttgtagccagcatagaattgggtcttgctttcttttcagtctaacagtctttgcattttgattggagtgtttaattcttttaaatttaataaaattttttatgtttggatttagatttagaattttgttattttttctacttgtcatgtcttttttgttcctctattattctttgactagttttattattttatttttaatttatctttgagacagggtctcactctgtcactcaggctggagtgcagtggcacaatcatggctcactgcaacctctacctcccaggctcgaatgatctttccatctcagacacctgagtagctaggaccgcagctactcccgattaatttttgtattttttgtagagacagggttttgccgtgttgcccaggctggtcttgcactcctggctcaagcaatcctcctacattagcctcccaaagtgctgggattacatgcgtaagccaccatgcttggccaactacttttatattaaaatatttttagtacaccatttaaattcttctgtttatttttttaactctgtttctttaaatcttttttccttagtagttgctgcagggattacaatatgcatcttcaatttatcataatctactttaaattcataccgatttactttttttggtgaaaaataaaaactgcacaattatagcttcatttcttaccctccctcctctgtgctgttattgtcatgtatattctatttgtacatatgccatactgtgttataaacccacagttataaaaccacagtatggcattataatttctgatttaaataattgtgtgtgtgttttaaaataagacaagaaaaagtaatgtatacatatacattttatatttttattatattatatattttcactttacctacatgcttaccattcccagtgctcttcttttctttctgtgaactggtttactatctgatattaatttctttcattttaaaggactgcctttaacttttcttgtagtgtaagtccaacagaactaaattccctgttttgtttatctggaaaaatatttatttcacctcaatttttgaagggtagttttatcagatagtaaatttgtaggtgaaagttcttgttcttgtttttgttgttctttcagcactttaaacatgtcattccaccaccttccagtcaccgttatttctgatgagaagtcaaccaccaatcatgttgtctttaatgtgatgtatctctgtttctctctctttctcttagtgcttgcaatgttatctcctttatttggcttttggcattttgactatgacatctaggtgtgattctctttaagtttttttttgttttgtttttgtttttgttttttaccttgggtttattcagtttcttgactctgtaagttaatggtatttactcacatggagacttttcaactttttaaaaaaataattgttctgtgcctctttctctttcctctccttttgggactcctattacatttgtgtttgaacactttatattgtctggcaggtctctaaggctctgtttacttaacttttcgttctctgttctttggattgcataacttctgctctatcttcaaatgtacagcttctttcttctgccgtctcagatccgctcttgaacccatgtagtgaatttttgtaattttcagctgtagaaatcccatgtgattccttttttataattttcatctatctatccaaagtatctattggttcactgttaacaaaattttctttaattctttgaacatttttccttaattccttgagcatagctataacaacttctttgaagttgtgtcttaatctactgtctgtgttggtttttctggtcacactttcctgtttcattgtatgtctagtaatttctggttgaaaactagacattgcagtgattctagattccattcactttcctaaaagttgttggttttctgttttagtaacttttctggacttaaattgcagaattaatctcctccatggtgtgcagccactgatactacagtgcagtttttattataatatttttctttgtttttcagtctggctccctaaaggtgtcctctattcttctattatatgatgatgagacaattatttagacagaagttatgctcaggtaccttgaacaactaagcctcccatcttctgctgccagagctgtgtgtggccgaagaaacacattcacatgtacaagtcctcacggaaggtgggagggtgagacaggggtgagggttgaaaaagtacctatttgttccgataggtactttttgtggcaaaaccctgtctctacaaaaaatacaaaacactagctgggtgtggtggcatgtgcctgtggtcccagctacttggaggctgagatgagaggatcacttgagcccaggaagtcaaggctgtaatgagctgtgactacattatggcactccagcttgggggacagagtgagaccctgtctcaaagaaggaaaaaaaaaactacctattgggtacaatgtttaccatttaggtgatgggcacactaaaaacccagacttcgccactatgcaatatatgcattgtaagaaacatgcacttgtaccccttaaatacataaaaacaaataaattttaaactaaacaaaaaaatttttgcacatcgtcaggtctcccttggctctcactttttgctgcctttttgggtttcttccctagtcagagatgtgcagggagtttattgtcccagccctctcatggcttgcttacttccaagttctcatcacaattctggctgatctcctgtctaccatgaaaagaagctataatctcaagccagtaaagctgcagatttttattttctccctagaactgattccatgaactttaacccataaaactgcagattctcatctcccccatcccagaccaaatctaccaacttctgctggtatagctactagttttctttttatctatttatttatttaatttatgtttgaggtggagtctcgctctgtcacccaggctggattgcagtggtgcgatctcagctcactgcaacctctgcctcccgggttcaagcgattcctgtgcctcagcctccctagtagctaggactacaggtacccaccaccacaccgaaataatttttgtatttttagtagagatggggtttcaccatgttgtccaggctggtctcgaactcctgacctcaagtgatctgccccgccctcagcctcccaaagtgttgtgattgcaggcttaagccaccgctccctgcctagctactggttttcagtgacagccctcaaaccaagtccaccattcccattaggtaacctgtgcttttcctcactcaggccaggggctggggagcttcaggcaagatgtccgtagactcatggccattctgatgcaggccatttttaagattaaacacttatcagatcattgtctgcttttggtttttctagtacccagaaacaaacattttctagtacccagaaattgttgtttttgacaattttgtctagttttatacttgttttcttcaaaaagaaattggccaacttcttagacccttctgaggtgaatcttggactggattggttttatgtttcttccacttactttattgcctacagcttttgattttgatcagagatgtactgatattaggaggctggtgaaggcacatggaaggagagctgaattttgcataagtcacctcaaatgtacaaaaataaatggcagaaccagtgatgctgaacgctgaactgggcgtttcagagctagggtctagtctcagtcccgccttgagaaaaccgctttgaggttttctaacaaaaggctccccagcctcccctaacaagtgtcactgttcccatcttctccccggggtcctttccccacctctcttccgcctttctcatgggcccgtgactgtgagggtgaaaatggctgaaattaactttcacttctgctcagacatctggaacccatgagcaaagtcatttccttgttttctttctgagtggctgctggaatcgtgtgtgtgtgtgtgtgtgtgtgtgtgtgtgtgtgtgtgtctggtattgttattttccaacctctgtctgttggggtgggcataaaggtgatgtcttatcacagatcacataagggccagcacacctccctgcaaactctcacatcccctcccactctaaccttgggtagacagaccatgtattttctttgtaggatgctgggtttcctgctctccactacattctctataccctcaagtccaagtatataaaagttgtccaaacgtcagctatttaggccctattgaaaaaatgttagaggcggttcaggcagcgtcacaacatcctggttcagtaaaagactcagcctagggatctgtctctgagagtctgtaggagtcttagtcacgaatcatgttcaaagccttctccttggcagcttcccccagtgacccctgatagaattattgcctccgcctctggtctagcactgtgccccgttgaggcctctgtggctacatctactacgctccactgcagtgatctgcttatcaggccccttctccaagctccttaggctgagactctcagaggaggatggagtgtagctgcgttggtatccccagcctccagcaggtgcttagcacagagcaggtgttcagaaaaacagtgctgcattaattgaattgaaataggaagactaagttacctcatctcaaatcagtcactttttaaatcagaagctcgcagagtttggaactcatgtttcatgtttggatccatgtagtaggtatcaggaagtgaatgtaagagtaaattaacaggagctgccatggactgagcaggcccagggttctggacattgttgtgagccctctgctaccacgtggagaagatcagctttgggacttaaagcaattagccacattcacatcagcttccaggtatttggagtttattatgtgctaaatactgtaatagatactttttatgcatgaatccatttattctcacaaaaccccttggggaagtgaaacagattatttccatagtgtcttaaaaccccagaactctgcgttgctgcgtctattgacatgaacacctgtcaaacctgcaactcatagctcagtattgtctcagtccaatccaaggaaatgaactccttgagaaagctgacattctggaccatggggtagaagctaccctgtctgcctcccacacccactctcaaggatccaagactatgaagggagaagagagagcccaccgagtgacttcctcttataagccaatatcaagacactagtggaaaggaaccagctgaccagtggctcactgtgtctggctggaccagcaagactctgacgtcatcacagaagccttcttggtcccattggtcctttgactgctgtgtacaggatgccacccaccactccagacaccactcaccactctagatgttgggatccttctcccgttacctccattattcttgttctctactcctctgagttttcatagccaagcaaatttccaccattgaagaggctctgagatccaagtcaactaactactggctagggtactgtaaaacacatgggaaattagcttttaccaaacaccaattctatgcccaccattcatacccattctaccatttaatgctgatagtatcctgtgagctagctattattagcatcatttaaagacaaagcaaaaccagtgaggctgaaagaacggctgccctggtgcacacagatggcacatggcagagcccaagccctctccatgagatctgcagcgtttgtccacacggcagggcaaattaccttgtagagtcagcatggaggtttgctaactctgccggacttggtgcagaaaaaataccagccgtgctgttaaaccaaaaccccaggagaaaactttctggtgacagaagggcattgtgacccacgttgcccagggccagggacagggcagctgctcatggtccttcctcacgagttttcctggagcagagggatacccccaaacccagggagcccacaggagcttcagaagggctcggctggagggcggggcccctgttgcacttgctcactggggactggggaggctctgatcgcagaccgggggtgctgccacctctgtctgctgccggcagaaagccacaagccatgaaaactgattgagatgagaagaattcatctgggactggcttttgctttaggatggtgttggaagttgctcgttgtcgctaggagcctgctccactgtaagggtgtcgggatctgaagagctatggtgaaacaccactgaagcattgccaaggtgaggccctgcgtcttccgggttctttatcgtcttcctttaaattgtgcaaatggtgctgtaaggcctgtagtggggcaagcaagcaaggacattgctgtgggtgccacagacggaggaagaggcatgaatggatcgctgcctcagctatgaatagattgctccatggtttgtgcatttccagttttgagaatttttaatttataaaaggtcatccatccagggtagattctgctttttggaaaaggcagtgaatgtgccacagaggagagaagggacgtgggatgtagagagggggttgagcgggcacacacaggccactgctgcgctcccggcgagtcactcggcctcttgataggaggtgatattgactgtgcagagctgacagaggttagtggtcacaggcggggagcatctggctcaaggcaaatgactgttgctttcgttttatttgtttgtttctgaatgaagttgttccatttttcaggcattcaggaatggggtaactgaatagatgtaatgatgatcttcttgtttaagagatctatttcaccaggaaacaccaactgtgaaaaggaaagcatagttgatcacatattttgaaaggatttgtgtaaattgtaaggttttgacaacgtttccatttatctggtaatgcgggtggatgaagttcaccctcatccacccacattaccaaggaactaaggaattgtgcgtttgcagtaacagagaagaaattgctgtgatatgtgcatatcctcctccctcgggagagtgggacttaattcccctcaccttgagtgaggtttggactaagagtatggaaagggagaaatagtagctctgtagaggagaaacctgcagatgccagcttcaccaagggaccaagcttagcatcaccgggaataagctgggctgctattgtgaactgccacgacagtgcggttcttcccgccaactcataaccccagtcaaatcatgagaaaacatcagacaaatccaaactggggaagattccacaacatatttcaccttcaaaaatgtcaaggtcatgaaaaacaaagaaagacaggcaaagcgtcacagatcagaggagacatgatggtcaggacacccaaacccagaattcgcatcctgtattggatcctaaagcaacaccgcaaaggtcattagtggaaaaataggtgaaattttaacaagacctggggtctcgctaatattgtggtaacaattactccttagttctggcaaatgtaccatggttacgtaaggtgttcacattagaagaacctggtgaaggaaatatggaaattctctgtgctatcccttgtaatttttctccaaatctaaaattactgcaaaataaagagttaaaaaaaattagactcattcttcctcagagcaggagtagccaaatcctgagcattcttgggaaaactggcgttcatggcctggtgatcacaccttctctttgaacattctggaatatagcaggccttttgaatttttgaccatccatcattctctctcccaacccctacctgattccagaatagctctgtatttgcctctcttcatagtatttctcatggatgattatattgttgttgttggtgtccaatgggttttgtgggggttgtttttcgtttatgttttttgtttttcagagatggggtcttgctctgttgcccaggctggagtgcagtggcaagagatcatcgctcactgcagcactgacctcctgggctcaagcgatcctcccaactcagcctcctgagtagctgggaccacaggtacgccactgtatctggctaattttttaatcttattttttgaagagatggggtctcgctttgttgcctgggctgatctccaacccctggcttcaagccatcctcccactttggcctcccacagtgctgggattgcaggcatgagtcactgtgactggcccagcatgcatttttgagcctttgctctgtggcaggggctgcaggatggaatacaccctcatctgcccagcgaagctcactgcactggtgcaggctcctggcaccccaagcacaggcccagctacccagacctgactcctctccaggaaggaagcagaaagccaggaatggagagaatgaggacccaggcccctgggggagtacagaattccagccaggaatctgccgtcctctgggctcaaccaccccacagaatctggtcagccaagtggctgtgagctgggctcgacagcccttcctcgagagtaaactgtggcctctaggatgtagagaggggactcaaagggccagatcccatttgagtgaggattctgaccttgtgagcccacctgcagcctggggtctgcagccttggggactggccaccggtggccagcatcctggcttgcagggttcacgtgtatagagaggtaacagcaagacagagaaacctggcccctcttgcaggcccagcagagcaggtgagccctactcaaaggtgatgctgcgcctgattagagaaaagcttccaaagcaggtgaggaggaagaaaaaatgatgaagccgcaggaagacagcacgtagatggaaatctcaacatactgagatggaaatcaatcacaaaactcttacaggaaaatcacagctaaaagttggtgattacatgtgggcctgcagtgcctttcctgtcacatctgctaccccactgccagcctgctgctaccccacagcagccctcccatttgtggaatgttccctggcgtgctcctgcttgcctgaatcccttccccaccttcccacctaggcaacttgcatttgctctgacgtccagggcaggtgcgaatgtctcctcccagtcacagtgcccaagcccatttgtgtgtccccagcaaccaccagcacacacccagggctctggtttgcaggcctgccaggttctctggaccaaagctcctgaggacaaggacatgccctacatgtgcctccaggtcccagcacccagcgcagtgcctggcccaccaggggtatctggtaaagtggttcttgagttaaagacacaagggcaaaaccttaaatgaaaatcaaggttaagacatgaggatgaaagcttgaaagaggaaaagcaaagataattgaatgatcatccctaatcgtggtgcaccccagtgccatcagcatgctggggttttgacaggacccttggaagaaagagaagaggcatctgaggcctctggcacattccacttcctgtaagacagtgtggtatagatgaaagcattggggcttcctgccagccaggtcagtctggctctgcacctgccagctgggagtgtgaagtgggagcagttgcacccactctcaagcacagacatgagaactgaacagaaccacggaatgggggtccagagcccaagacatagacgaggctcctccttgtccactgtggggcttgtgcaaccccttcatcaaagcgctggtgctttccacattgtaatcaaggaagttttctcacgttccttctcatcacaactagctgctggcctttttgcacactttggcacctaggatgctgaacctggaccagtgggaggcaaacaagacacacctgggatgcaaaatgtaaggaggctcccatgctcaggtcgttcaagtgcaggaaaagtttgtgtatgtgtgaaacgcacaatgccatgtggtgtctataagggcatttgaggttctgtgcttaatggatgaagtgggttctgagcattgagtctgtggattcctgatgagtttcctggtgctctgagctccgtgaacttgtaaacaagcttttgtgtaggtgggtacttacagtttttgtcagattcccaaaggggtctgtgaaccccaaaatatttggaatcatacagtcaaatatctaggaagaatactttaattttctctctcagcgtgttgtggatatgaggaagtggaaaggacttggacatagaagtcagacaaagcagccacatctgagtggtctcgtcctgcagtgtagtggttagacggctggccttgtcaaccagagggctccagtgcaaggttcagccctggcaatgtgagcaagtcactgtgtgccttcctgagatgataatagtttgaccccactgtatacgagcagccttacctgtctcgggtaggttaattatatcctctcagtcttatttcttcattcattgataatagcacatcacaggattaacagaattaaattacaaagccctaatttttaggtgagttgaagctgaggagcacacaacttttcttacagggtgcactcaattctcaatgtcagaaccaccagggggtccttgtacttcaaaaagacacatcttacatgacaacttctttgatttacttttatgcccaatattcattttgaaacctcacaaaggagagcatggtgttgttgtttctcaaaagagaaagtaaatttagtaagattgagagccatgaacctagacacagtcacagggcacataagatttcggtcaatcacagactacatatatgatggtggtctcataagatgaagacactgtattttgcctgtacctgttctatgtttagagacacaaatattcaccactgtgttactactgcctgcagtatttagtacagtcgcaggctgtgtaggtgtgtagcctagaagcaaccggctatgccacagagcctaggggtggagtaggctctaccatctaagttttgtatacgatgttcgcagaacaacaaaatcacctaatgacacatttttcagaacagatccctgtagtgaagcaatacgtaactatattttgggaacttcccctgtatccagatagtcagtccaagagctgtgtgtttggatctcacagtgcttgagatcctgagagaatctcatttcctgagtcagatgtgggcattctttcttggcatgggtacactgccgtggcttgtgctgaaggctgcataagaaacagaggttggaaactcacagtggaatttattgctgagatgacgttaagctgttcgcattccacccaggacctccacaggagaagcccagagaggatgactctcagactccagatccaggaaatccatgcctctctggagcaatggatgtcttacagacactgtgactcttcaaactgattattttcttctttgtgcttggactccaggacacttagaacccaatttgcatctaaccactagcagtttggtgacagcatgtcacagtttgtatttctgtgcaccagctttatacacatttttttttctgccctaacttaccctttggtctaatttctttatctgtttttctatcctgttgtattgtatgtatttttataagcggtctcaaatcttttctggaaacactaggaaatgaatatataaacaaatacaagcaggacagcatttctgaaagagcctgatatacagtgagggtgctcactaaggattagttccctatctgtgtacaaaacagaaaaattcactgagggagccaacctgcagtcaaatgtccagctgtgagtctattacagttatagaaatagcttatttttacacatattccaccttagattgatttggggggtgtttgtttttgttgttgttgtttgagacaaggtctcactctgttgcccaggctggagtgcaatggtttgatctcagctcactacatcctccgcctcccgggttcaagcaactctcccacctcagcctcccgagtagctaggactacaggtgtgcaccaccacgccctgctaatttttgtatttttttgatagagacagggtttcatcatgttggccaggctggtctcaaactctggacctcaagtgatctgcctgccttggcctcccaaagtgttgggattacaagcataaaccactgcacctggcctgtttttttgttttgttttattttgtttttgtttgtttgagatagggtctcgctctgcctcccaggctggagtgcagtggtgtaatcatggctcactgcagcctccacttccccagctcaggcaatcctcccacctcagcctcccaagtagttgggaccacaggtgtgcaccaccacgcctggctaattttggtttttgtagagatgggtttttaccatgttgtctaggctggtctcaacctcctgagctcaagcaatctgcctgcctcagcctcccaaagtgctgggattacaggcatgagtgaccatgcctggctctaccttttatgttaaagtttatataaattatttcattttaagattcttttattcctgccatttctgtggtgcaattggatttttacataaagttaaataatactttttattttggccaggcgtggtggctcacacctgtaatcccagcactttgggaggccaaggtgggaggattgcttgaggtcaggggttcgagaccagcctggccaacatggtgaaaccccatctctaccaaaaatacaaaaattagctgggcatggtggcaggcacctgtaatcccagctactcagaaggctgaggcaggagaattgcttgaacccaggagatctcagcagtgagctgagactgccgctgcactccagcttggacgacagagtgaaaaaaattaaaaattaaatgatacttttaattttatttactattttatttgaataaataaaaggatcctttaaaaagtattacacacgaaaatagggtcaaaagtcatagcccattttcttgattttatttggtgctttatgggaaaggctaaactctctctctttttttttttttaacacattagcatggaaaggaatcatttctactttgtggtgtctgtctgtctgtctatctgatgggctctctggcacctgccagcacactgggggaagtgtgaggtcaagataggcatcttgtagatgaagagcatggcgtgctggtaaacgtttaacaaccagctttccaggaaacaaatgtattgtatacatacataagtttatagtaacatgtactgatataaaggatgcatagcacttaatttacaaataataacaaaatatgcaatagtctctgtcctaaataccgcagaggtgattgagtctcatagaaagctctcgtgactttgcactgtcatatccgtagccaagcattggttgcagcagatgagcaagtgtggtgttggcacaaacactgaaatgttcattcatgttaaggagcagatcaaagtgaaacaacaaagagttggggcaggctgcagccttagtgccatgagcggcttctttgttgaactggataatagtttttcaatattcagaaaagtttcctcaatgttttgtgctactcacagtgttctagctacagacaagatgctcttttaagcatagaaaatccatgaaacaaatcactgccgacctgtagcatttgcctgttcctgttgtataaatactcccaccagggccaatttcaagttgccaacatgacttgcgtgaacatgggttcgagatgcgcagcagcacagcacgatagagtacttccgccttatagacacagtcagttaaagaacctcaaagcatagctattattaagatgcagtaaaaataatcaggaagtgatgaggtttaagtatttataacctttgttttaatagaatccatttagttgtatcttgtataattcaactttaattttttatcattttaattttatatagtttttttttctttttctttcttttttatttttctttgagaaggagtcttactctgttgcccaggctgcagtgcagtggcacgatctctggtcactgcaacttccacctcctgggtttaagggattctcctgcctcatcctcccaattagctgggattacaggcacccgccaccatgcctggctaatttttgtattttaagtagagttagccaggctggtcttgaactcctgacctcaagtgatctgcccacttcggcctcccaaactgctgggattacagacatgagccaccacgcccggcccgtatagtttttataccttaatcttgcataatgatttgaataattcagctcacaaaattcctgagaatttaacaaccggctctagcataccggcacaagctggcccccagtgcatcactgacggggaggccgagtgtcttgaggccacactgcagatcagggtcctgcctgcagccaagtggggacaagtggagaataacttgcctcctgggctctcctgagtcccgagcctgacagcggaggcccaggtgggtgaccctgctttgtgctcggtggcaggggaaggggggtgggcctgtgggcctggatggagaacctgtccccatggctgtcatgtccctacaccagctgctgccagccactgtggggttcgcaagtccccactcgcaaaacggctactgttttccacaaccatgggatacaaggatgtccccttgggctccttctcatctctactctctgctggcctctttgcacagattgatacctgggatgctgagccaggaccagagggaggtaaagacacacctggggtgcaaaactgaaggaggccctgatgcttgaggttgttcaagtgcagagaatgtttgtgtatgtgtgaagcacacaaccacacgtagcatctaaaaggacatttgatgttctgcacttaatagattaagctggttctgaccttctagcccctgggcttctgatgagtctcctggtagcctgtcagctcctgatcttggatgggagcttgtgtgtaggtgggcactcttctgcaaagtgcgtttatggcttttatctggtttcctctgatcagaaagatctgggggtgctggcacacccagacgactagtaactcccaaagggagaggtgcagctttgtcacctgcccctgtgtcaggtgggacgtgagatgctctatttttttctgctccatcctgtgcccaagccttatacagggtgacccttttcagagaggcctttgccaccaggtcagtgtgagcatgtggctgggtgatttcctgccgtggaccagggatctgtgtgctgtctgaagtaagcaagggtgctctttcttggcaaggtctgagggctgagacttgcaaggagacacctgctctcttggtcaccagactggaggttcctatgtgcaggtgtggaggatggaagaggtcactctgtcctctttcttgcctgggcctcacctctgctgaggctgctggctgccctgggctcgcagtgaaaggggccatcttccaccctcccctgctggtcaagtgcatctttccaggttccggcactccacgttgccacccagacaagtgtcctgtgggaactagcaagtgggaatcaaaactacccccagagaggctcctggccgggagatgaagggatctaccctggggctaaagtctccccagcctttcttggagcttaggtcctggctttagaaagatcccattcacatccaggcacagtggcacacacctgtaatctcagtactttgggaggccgaggcaggcggatcacttgaggtcaggagtttgagactggtctggccaacatggcgaaactgtctctactcaaaatgcaaaaattagctgggtgtggtggtgtgcgactgtaatcccagctactcaggaggctgaggtaggagaattgcttgaacccaaggaggcaaaggttgcagtgagctgagatcgcaccattgcactccagcttgagcaacagagcgagattccatctcaaaataaagaaaggaagggaggaaggaaggaaggaaggaagaaagaaaagaaaagaaaagaaaagaaaagaaaaaaaaaagaaaagatcccattcacctgcacaaaagccacacccctttgtggccaaggaaagggccacagaagaagaagtaggcccttcagaagggggagaagtaggcgccttcagaagctggttatccgtgtgtaatgccatcacagggacgtgcgtttaagatcttttatcagtcttcgtagctaaatacttttagttaattgcaggcgggaggggctactagctcaggctacatggagcatgtgctcaaaaactgtctccaatatggtgacttgctgtttgaggacggtctaagcgactgaggagtgtgccccctgtccccacccttgagatgaggcctgataagggtgctggcatatttagtgttgggcaccctggtgctctccagcatgtggtgtttggcctaagtggcccatgtggactttgtttcaaggattttacgacaagaaacaccaaaatgaggacatctctgtggccatgtttcaggcaagggggtaatggatacagagcatatgtacacacaaacacacatgcacagagacacgtacagacacatacatgcacacagacacatagatacagacacatacacataagaatacacacagaaacacacagacacccacacatatacacacatgcacagacatgtagaaatacctagacacagaggaacacacaaagatacacaggcacacatacaggtacatctacatgcttatcaaaaacaacagcaaaaccacctaccatgacaaatactattgcagcaaaactgaacaaataaattctgtgccataaagtttcctaaacctcatctattttgtagaaatctagtcacttgagtatcatccttcacaaagttctttctattctttctactgtacaaagttttctgttgtcaaatagcaagagatctctgttttctacttggaatgggcctggagaagggagacagcacccgctccctccaccccttgtccctgagcacagcatggtgacctgccaagccagagggtgacctggacactcataactcaatgcagggccaactgtagcctctggccggtgtccctgagtgagggcaaagttgtaataacacttgttctctcctttctccaatttgctcccaagctccattgctttcgttcaggccctcccccttctagactgggcagttccgcatccttggagctcatttctctgtcttcagaatctgatgctccaattcatcccatgtgtggctgccaaggtctttctaaaactcaaatgtggccctatcaccgcacagggtaaagccaccataaactcctctgtgtttgagaacaagggccaagtctcccattgaggcctccagggagtggacagtctgggtctcctttcttctccaagcacgctgggcccatctgtcctgtccctgaggactccctggcacacatgacacttcagagcttttgccaactccactccctgcctgaaatgcccatctccttcagagagcttctatgtatccttggaggtccagtcctaatgtccctgcctccgataagacctctccccatcttcctctcgccctgctcctgtccccgccaggcatgacaaatctcttcccacagtgggcccaacagggaggcagatggtagaacaggttttgggccaggtgccaggtgcacgtggctcttcatcctggttccccaccgcacacctggagagctgagtgcttttcctgaggtcacgcagaaggttaccagcctggctctggagctgtctctttgccacatcgtggggtgtctttaaggtgaccttgaatgtgcttgaagctgttttatgtcctatttgcagacctaggggaggacaatgccagggctttttgccttcccaaggtcacagcctgaagacactcagaaagatgtagttggctcatttatcattttttagaaaaaaagaaaacaacagaatgtgctgaatccttgtaactgttggccatggcactagtttcatggaaggtggaagggcaggttaggcttcttatgagggcgttcctggcctctggaggggtgtgggtgggctcaggtgaatgactgacagactggatttacgtatgttgagtgtgaatctcagtccacagcttggtgtgcaaaaacagaaaagctatctggtaatagctacatctctgttggggagaggaaactgacctctcaattcagggtcttcatacctttctccagggtggggtctaagttctgggagcctcatgagtctcaggaattctggggtggcctatttggtctttgtcatcagtccatgcagggggctgctagaatgtcatgtcagcctctgaccctggccaagccccctctcagagattccaggccacatcccaggttgagggatgcatcctcccactctggggccccccaggtgggactctcagggaggccacttgagacgcggttgcccaaactgactcaacaagatctctcagtcacgggctgaaagatctgcatcacgggctgaaagcaggaaagttcttttgtctctctttctgctttcctgtgacaatgggtgcagaaccatcgtgaatggttcaggtgcgggtagggaaaataacaaataggaggaagaacaatctcagaaaggcaggtagcctgtcccatctgctgacagagcagtgtgtaagcatcactgagcttgtgacattgatgttttttccaacatgcagtataaatgtacactgtgattttacaaggccaggagccaagtaacaacacccttggcagaggaagagtgaagtggggaaggaaactgaagcgggctagggaggaaggacagcttgacaactagttagaattggaaggacgatggactaggattgtaaaagaataaggcagaatgtcctaccttcccaccttggcaaaccctgcccctgggagtggtcctggatttgcagtggccctggcctggaccaccatgtagatgtcactaatggatcctcccaggggacgggcctgtcatggccctcaagaaaggcagggatgaccaccccaactgcaggggaagacaccacccaccctgagggcttttgggagcttttaaaagaaggcaagtcacgctttaaaagaactttgaagagacaggagcttagtggacccagtggagataaaaggtccaggtaaggagtggccaagcacttggaatttagaagaggcgaatcagaaagtcccaatggaccagcttgggggtttgggggttactgggtccatgtcaacatacagctcagtgggtgccaaagatcagccaggcctagggtgcagatgacagtgaggcaggatggtgacctggattaggactggagggggaacctgaggccaggagagcagggaagagattgctaaagacagtcaccccatggcaagctagttttctccccgagccagcatttctacacgtgagcactggccttgctgtctggctgggtgacttcctctctctggggttcagggcccagcactgctaatcgggggtagagtcaacggccttccagtgcaccctttggtggctctgtgtggcacatcaggcacactggtcaagtagggggtcatcaccaggccttgggtgcttctcaaacctaaagtcatgtggtcctcacaacagccccgtgatgtcatcaggaacctgcccactggcccagggctgggaaggactagagccaaagtgcaggctcaggactgtttgaccccaaagccagtgctctgaaccctccatctgtcttcattaaccaccgcctctgccactactgtaaggcaagagaagcgtgtcacggcgcgaaggctaagcacatgctgggaaatcacccgtggcttgcagacacatgcacagctactgggggtagatcaagagccaagaacgggtgagctcaagctgtgctcacatggggcgcgtgctaggtgactgtaggcctcagaaaacctgggatccagaacagctttcctccgctagggggctctggcacaagtttgcctgaagacatggccccatggcgaagccatcatgtgtgggaccttccttggccccctcttggtgagccacattcctgtccacgcagtagctccagcccccacccgtggcttttcacttcttccttgctttccacttctgaccaccctataccagaaggtacttcatgtcagtcctctcccgcattccctctgccttcgggtctcctggaattggaactgtcactagtcaatcattacttacggggatgtgcagaaagccagacactgtgctgggcctcgggcggcagaaataagacagccactgtagtgtcagctgtgtgcacccatctctccttctgacccaaacgcaactgtgatgggggccggtcctgccctttggggccatcagacaagggagcaactgacatttgcagaggccagaggagccgtggtggaggggttttctcagggctcgagggaggtgcctgcccatccactgagagctttgggaaggaaatgctgggcgccttttgtgcctcctactcatcaattccccccagctgcaggcaagggaggtcgttagcagcccagcctgtggggagcaagcaggccatgagctgcatgcagctggcactgctattacttaggaggcatcacaacaatgactcaggtgctgaccataacccttaaccaggtcacagtggctgcctaactgttgaagctgctacccctcctttaggttacaccgcacgaaaagttggcaatcctctctctcggtggctgctgtgggagcagctaacctcacagcacccgaagggatgtcatcgggaccccagctcggtttccagcatcagctgatgccagcaagaagccagccaggcctggggcttggcagcccagggactttaccatccaccatccacagggctgttgccctggacaggtcattgatatctgactcacagccaattcatggatgacgtgaatccaaaaatcagaggcccacgtggatttagacatggaaatgcctcaccagcttccatgagccagtctctgtgcggcagacttgaactgcacgggggctgataggaagcagggtgggcgctgggatgtgactgtgcccttgccagtgtttccagtctcccagctcgggttctgtggttgtctaagcctgggggtgctctgccgggtctgtggcgacccggctgccttttcagcctaatcaccagagaagccacagaaagagctggaccacttagaggggcagtctggccacagccacttggaagaacaggctgattttgtacagatgtgtcattttctcctgacttttaaactgtaaacattatataataccctagaaaattttgaaaatagatataaaccatcaataacactggcaacctaacacttttacctaagagctacccattttgatttatctgatgcgcagttttcattgctggaatcataaagacatagcaccttagattcttctcttttctttttctttctttttattataacataagcatctttcccactgctacttttgatcacttttgaggactcaaaatgatcatttttgggcctgcataatatttcactgtgtgaactctatcaccatttcaatcaggtgtttcgtttgcttccatatttttgtatcaccatagcaggtgatgattgaaaaaataaatgcagcttgcaaagtcattctgaattacatcgtggagctggagagtgttctttcctaatcccttcaaggaattacgatgatatggggagatgaaacattcatttgggggctggcgtggggtaagctttaaattgcgtttaaagtcagtgtgatagtgacttgagtttttcatctcttttctccagctccttgacggccatatttgctggccagggttactggtgtggtctttggccagagagcagactttcctctctgtgaaatgaaatgactcataaggaaacaaaccccaaggctttgggtacatttgtcccatcatctaaaccagggtttctaatcagaagtccatgaatgattgtggggctttgtcgggggagaggtcctgaagctgagcacaaaatttggcatgtttgtgataagtgtattttatagggatagtgtctgtagttccatcaggttctcaacgggggctgtggccccaaaaatgttttttaaaaaacccagctttctctctctgtctctttccccctttctgggaatccgagattgaaatgaaagaaatcgaaagatctttgcctacatacagaggtccagtaatgggatggggaatatattatccccgggatagcgccactgtactccagccaggatgacagagactccatctcaaataaataaataaataaataaataaataaataaataaatacataaataaagtgcctctttgttaaggcagttgcttctatttctacttttttaaccaaagctaattgctaatgtgttaaagtacgagattctgccttgattatggccgtccgtggttcttaactaaaggaaatgctttggcattttaaaacacatggatccccgtaagctttgcatttctcaccagggagtcagactgacacacaaatatttgtggttagttaattgttctttcctgctacaaacactcaccataggaggtgagctgtatttaccaaactgaaatgttactatttgaggctgaaggagccaaagaaaccttgaaattcaagagaccaaacccaaaagttccacccaacggagtgggagacttcagctcattgaattcctgaatacagctcggccttttgtcttcacacagcaatgagaacacatggacacaggaaggggaacatcacacaccggggcctgttgtggggtggggagagcggggagggatagcattaggagatatacctaatgctaaatgaccagttaatgggtgcagcacaccaacatggcacatgtatacatatgtaacaaacctgtatgttgtgcacatgtaccctaaaacttaaagtattaaaaaaaaaaatcagtttctgttaacaacaaactctggcaccagtcagcgggtttgacttcctaaaaaagtttgatttgctttctctcttagaaattctgtcttaaatttccttaaacgcaagtgtgtatacctggagcaaagaacatggggtgtaattcaatttctcttctcctttcttcctctgggaatctctgctaggtttcccacttattattgttgaaaactggcagtctttaaaggggatggacttcctgaaatacggcaaacagtcatgcaacaaaaaggagaaaattatattttcattttgggcgtcttagatgtagtgcaacattcaacatgagatcaatgtgccctcttgaccccaaagtattggctaatgatccataatcaatatttaggataacactggttgggagtatgaatgacatctttccaccattgtcttggtaaatgaaactatttactctttctggcagtggatgctgtcgggaggtggaaaagtaagcattttcttacgtttgggttttctgtgattgtttgattatttaatttattcgttcaaagaagagaaagatttactgcatgtctacaatgtatcaagtggtaagatggggcctgaaaatacaaagataaacaaccaaacaaacaaaatggcttttccttgaagagctcaggaggagtctggtttagaaggcagacacgcaagttctatgctactggtctgtaagaagcgctgtgggatcagaagaagggatgacttaatgggtacagagttggtgatgtgtggatgacctcgtgaacgaagactagttcttcaagcagacccgtggaggacaccacagaaaactgtgttgtttgtttagctcttttccagaacttgttatgatctcttaacaaggtctagccaatatcattataagcacgtaaaattcctcatcctaaaccccaccctgaaatcactctgacgacatgtcagccatctgacacagatgtggatagtctgaaagcccaacagttctaatcatttaggttcaatttggtctcaacagagatttttacatgggacttcatgttttacaaattattttagtattatcaatttgatcctttaaggcaggcagaaaacatatttccaccctctactttatagataaagccattgaggctcagagagattttaaaattttactgcaaattacacaggcttctggttttgtttgtttgtttgtttgtttgagacagagtcttgctctgtcacccaggctggagtgcagtggcacaatctcggctcaccgcaacctccccctcctgggttcaagtgattctgctgtctcagcctcttgagtagctgggactacaggcgccacccaccaccatgcccagctaattattgtatttttagtagagatggggtttcactgtgttggccaggctggactcaaactcctgacctcaagtgatctgcccgcttcggcctcccagactgctgggattataggcgtgagccaccgcggctggtcagattattcaattttaaggtcttacgggccacataacatgattgcctttctaaaagaattatttattcatggaagtctgaagcaagagtctcttgaagttcttttttgtccttgataaaatatttacttttcttgttttatcctcctacgagatccctactgtccatgcccacggcctagattggtctctggccttgagccttacagagcatgctgggtcccagggcttgtcctcaatgcaccacacgcagttggctcatgaactaggacctctgtgtcttgaagtgggagtggatggtaggaagggggagatggaaaagcaggggtacaaggctgatgctggcagcaatgaagaccttggtgattcgtggaccatagtggagactgagagggagtggagaggcgaagagaaaccagagcatcattcctgatggagccctgtgttacccccaggctcctttagggcatgagagtgccagggctggaccatctccaggctgcacactttttctctgcagctgtgagcagagcccaggctgtctgtccctcagcatcccctaaatctgcgatgcaatcatagcccctgaatgttagggctggaggcaactcagagatcatccacccacagccctcgctgcacagagacagaagcaatgagatgaagtgactcgtacaagattgcaccttgggctgcaaaattcataccaagtgatccagggaggcctttgaggcattgcattcccaaagtgccttctaaatagttagccagagttatagagtggtgctcagaacaggttgtggacgtttattgaattccatgtgatttaagtgtggttggcgggcagtccacaccaccgccgcgcactgcatgagaaccctgtgtgaagggggcttggggtaatggagcagctgggcccgacccaggtggattcagagtctcccatcactcggagaagcctgcaccttggaaataattcaactccttggtctgacttttgcaagggaaatgtttggggcattttataggtctccatggctgtggtgttttatgacattgaacccaataaaactcgtaatgacacaggatctgccaaggggatcggaccttcccttctggcacaaggaaccattctgttttggtatcccaggaaatgagtggaggaaaatccttgttatttcaagtgaacagggtctgggcaaggtctctgtccctggtcaccttgaccatgtgctacctgtcactgagtctaacggttgctccaattcagctgaaagacaggactcagcaaatagagccttgatctgtccacagggtactcctgtccactgttccagcaaatgtgagaaaacccacttgtcctttgcgagagagaggcaatgctgtcttagtcccatcctaaaggcagaaggacgctaaacaagggtgtttgcgggctacaggcaagagccccgcaatggcctccccgagggatctgaggcccagcaggccatcccaggtctcagaagccttgtaagagcacagtggaggacccttcttgcacgctgagctctgagcagtgaggggaacagctgggagagaggctggggtacaagtgacacagtgcagagatgctgctcccagccgaagctgccactgtgggccttctccatccacccagcccctgtaattgcactgcccccacctctgggctcgagtagcccgtgagcctgctttctggacccatcctggcaagttgctggtggatatacctatgcagcagggcaactacaggcttaggagggctccattccagccctggctgagcatcagaatgggggtgagaggtaaaaaatacagattcctggccctgtttcatactttctgtatcatatgcaggagcccaagaagctattacagtcccagatcatttctgatccaacccaccagtcagcaatacctgctcaaatctaggagtcactgacctcagccccctccccttcctggggagctcccactccagggttgaggcacgcacatgactttcacctcttctggagtcctcccctccacattccccaacaagctgctgctctgagattcttcccctagtctctccacacaggccagcagtcactgcaaacgcccagttgcaatgcaccaagaactttcagggttttgccccgttttgctggttggtgccaggagatggaagctctcgagtggggtgtgctgtcccctgggctgggtggaggtggccacagcagagaaggaagatgggtcctggaagtacaggcggtctgggcttacatcctccctgtgccactcccggctgagggacctcgagcaagcttgacctccgtcagtcttcatttctttacctgtagagtggaggtctggaagccggcctcctgggatgctttgaggatgaccaggagctgagaggtagtgccaggggtcagccatgtcagtggctccacctgagtcctcagggcctgggggagtgtctgggacgaagtaagcagccggcgcacaggggtcctccctgctcccctttaattgcttgcgtctctctggggcattcttttactgtctttggcttcttcctttgctgcagccctcatctggatgcctgcctctatttcccccttccttccattttctttaactgcattatttttctgtctttagaggccagtcacttacctccttaattttcaaagttttgtcttttctaatattgtatcagtgcttaaaatgcaattttccccgccactgtagtgcctcatgtcatatgtgctgcgctgcatgcggggatggcccagaacagcttcctgcagtctgtgttcttcagaacagtggcttcaaacaggaaatcaaacagggaattgctttagttgttcatgaaatcaagtgggctcctgctggcattttaaaaacaaaatcatatagaatagagaatacccaggggcattgcctgtaggaaaggctttgggaggcttttgtatcctggtgtggggatgggtgtgcactcgcgtgcctgggatgtcaggcactgtagatggaacaaaagttcatgcccagatgaactgataagcagatcgtggcctgtacattccatggaataccactcagcctttgaaaggaaggaaattccttcacatactgctacatggatgaaccacgaagacatgacgctaagaggagagagtcagacacaaaggagaaacactgcaattccatttaaatgagtccctggagtagtcccattcagagaacagaaagtagaacgggggtgcgagagcctgacgtctttctcactgacagccacagtaacaaagaacagaaagcccgacagacactgtcgtggatgctcttagaccacaccgcacagtggagacttcacagaccccgagtcctgcacttggtgggtgggtctcacgaccgcccttcccccttgcggtgcaaagaaagttcaccgccctattgctgtctctcccagaggatctttctgacctactcaaggaacatttattaataatctattgagagaaagacaatctagtaggtcttatgcattttctatcttctcccatttttccatgaacgatatctgttatagcagccctgttaaactaactccccgacccagcccccagcccctgacacctgttactctaccatctgtgtcgatgaattgggctactttagggacttcatttaggtggaatcatacagtgtttgtccttttgtgtctggccaatttcacttagcacaatgccttcaaggctcacccatgttgtagcatgtgccagaatttccttcctttgtaagactggattccattgtacatatagcccacactgggcttatccatccatctgtccatggacactggctgctgccacattttagccactgagcaacactgctgtggacacaagtgtacaaatacctgctcaagtccctgctttctgtcattctggatacacacccagaactggcattgctggatcatatggtaattctatgtttaatttgtcgaggagactccatacaggactttgaattttactctgaatgagagggtgacactggggagttctgagtagggaagcgatgtgatgggacctaacatttttatagggtcacagtgggctgcctttgggaataggcaggtgggaggacagggaagaggagagcagggaggagttgctgtgtgtatcctggaaagaatgaaggtggcttagacccggctctcggccaaggcagagagatgtccattcctggctgcctgtggacgggagagccaacagaaatcggggttgcatgtggatttgtatgtgcagaatacgagagaaagagcatgaggaagagaagatggagctgccattcacagcgatggaaattgaccaggaactcacctctggccattttaagtctgagacatttactagaagtccaagtggccacagcacttggtgacattgtcagctggtcctctgacttctaccagccactttccctggcccctttttggcttgagcctcccagctgccaagcacgcctggatgttccagatgttttcaggttcccagagcccttgctgtagcagctcaagccttcctccccggcctcatctgctttccccgtgatgtttgagagcttttctcaggtgtgtgggaggaaacagcatgttgggggccaggagacagccacccagaccttgacaaggcaggggacggcttcagctcccgaagaccctcttgcgttcccagccaagccagaggcttacaggctgctgaacgcacctgaggcagcacccatggtgcagccctggtgctgcaggccaagctcttggtcctgtcacagggagaaagtctatgccccgacagcttgaacctgagtcaagggtcacctttcagagctgaaattgacttcttggaaagccagagaaatgcattttcccatagcattgagggcaccccagccctgtgcccactgagggagggaagggggcttctagaggcatcatcagagcaagatgtgagctggctttgctttgacctcactgtcagggcctgccccagatgccagcactcagagctcactctgcagaagagggaaccgaggctgggaggggcgagagagtgtgcagggtacgcagtgggtgaataagtgagtcaggtagagagcccagttctcctgggccccaggtgtgccagcagcctgcacagagtggccttggcttggcggtctttccccacaaagcatggactctcagaatcagaccccagctgagacgaagcaccagatggattgctttttagacggtgcatcctgttagagcttaggcttcccagagtgaatacgcactttcgtgtgagtttttgcaatgcattcacttttttagaaaacttccctgtagatgcccgctagatactgggttctgattctgaacacagacaccccactgtaggtggattggtggggggcagaagattttaatctttgggaggattgaggggtgtctctctcccttgcacctctgaaggtcactgtcacgctgttgctggcatctcagcatttccatccacttctctatttccactaacaatgccctagctctgccatggccacctctcaccgatctcctgcggtggcctcccatctagtgtcctgcttcacccgcaccccacaatctcctccacacaacagctgcagtgatccctttaaaggtaagtcagctcctccttaaaaccatacaatggtccaacacggcatttggaaagaaatcccaacccttccccagctggtctctgggccctgccctcctctcaccatccctggctgctctgctccaagtgcagggagcctctttctgctctgggaatctgccaagcctgtgcacttttagagccgtctctctgctctgccctctgtgctttgcaaagcctctccttgccactgaagactccagcatacgtcgcactttctgggagaggtctttctcttatctaaatacccctgggcctgtgcgatgattctgtcccgtcatcctgtttgaatttctttgtggcacttacctctcctagaaatcagtggccgtttactttgctagtctgccatctgccttcccctctgctctcctccctgcatcaactagaatatgggctccacggagcaggagctgccagctgtggcctccagcatgttgcaagatctgtctcaaaagttcttgttcaggggataatggattcctcaaaggaaggaatcagaccctctctgggactcccctgggtgctagaggacctcgctaccttcatgtggggctgctgggagccaacactgtcacagcgtttctggacagcaatttggctgtctagaccagaagctccgaaacagttccacggtattgaaccaaagcaatttttcttctgagagcctaaactgagggaaaaattctaaaatgtaggcaataattcatacacaaatattagatgaagctatatacatacatccacatgtagtagggaaatgtcaaaagtggtatttactattagcttgaatgacattaaaaaggtttatggtacagtattaagtaatatgaaacatacaaaagtttatgtacagcatcgtaacagttcatgcttatttagaggacttgtgccagtcaccacatcgagaactttatttacattttctaattctctgaacaaccgtgtgaggtagttattatctcaattgtattgactgagaaaatgagacatgaacagatcaaggaagctgacaaatatggcgtagtttgtaaactgtaatgtgaggatttgaatccagagcctctcactccaagcactccatttaaactctactgtatgctgatttgagtttcataaacaacttgaaaatgtgcatatcccttgccgcccccactatcagaaagactaagaagaaatacaccaaaatattcacagagattgcctctgggtattggggttctgggaaacgttttctttataatttcctgtatttaaatatttttctgtaaagagcacacatcattttcatgtaaagttttgaattttatcaaaagattagtagtcacacacaaaccacagataactttggctaattaatatagagtcaaaaatacttctataaaacaagctatttcaatcaaacatgatgtttaatatgattaaggagggctcattccactgtgaaaagacaacttagcattaagaaccacatagccaggcacggtggctcacaagtgtaatcccagcactttgggaggctaaggtaggaggatcgcttgagcccaggacttcgagaccagtgtggtcaacatggtgaaaacctccctctataaaatttacaagaactagccaggtgtggtggtgcatgcctgtagtcccagctacttgggaggttgaggtgggaggatcacttgtgcccagaagattgaggctgcagtgagccgtgatcatgccacacacttccagcctgggcaatggagcaagaccttgtctcaaaaaaaaaaaaaaaaaaaaaaaggaagaaagaaaaagaaagaaaagaaaaggaaaagaaaaaagaaaaaaggaaacataatcaaaggcatccctgtaaaagcttgttgtaacctaaagaaaaaggaaacttcctagatatcttctgcaagcctatagccagattcagaagtgagagacgcctgctaacattgagataatttaactttgttttgggaattcttgccagtgtaatacaacaagaaaaggtaatacaacatctacacatttcgaaaaaaggcataacagatgatctgtttgtctttcagggaaatctaagacaagtaattgaaaagctattagagctaataagagaactgaaatagacaaaaatcaatagctttctttttttcaacaataacattagcaatgccaattctccaaaaattgtatataaatttaaatttaatgccaataaaaatgaatgcaggaattcatagcttgtcaaaattatagccttaagttaaatcagaaaaatgaatgagaaagaataatgaagaaaatcttttaaaaaagaactgaaactgtatcattaaactggagtaattaatttatgtggttctatgcaggaaaagacagagtccagaaataggcccatgattatgtgggaattgagtaagtgataaggaaggcaattcaaatcagtaagaaaaatggcttttaaaaaatttattatctaatatttgatttgtcaagtcattaaataattatctataccctaaagatatcctgtattttttctaaaagatttaattttcacctttgatttacaattaataaaattttttcttgagacagagcctcactctgtcaccaaggctggagtgcaatggcaccattatggctcactgcagccttgacttcccaggctcaagcaatcctcccatctaagcctcccgagtagctgggactacaggcgtacatcaccatatccagctaattcttctaatttttgtagaggtgaggtcccactctgttgctcaggctggtctcgaattcctgggcttaagtggtacgcccaccttagcctcccaaagtgctgggattgcaggtgtgagccactgtacctggaccatatttatgtctttaatcaatttggattcaatagtcaagaatggttgagcagtaaggccacagttttatgtgaagaaaaaagttttctcagcctcatttatcgagtagctcataccgccctggagacgcacagtgcctccccggcatgtgcatgagggtccgtctgagactctccgttcacttcctgttctatttttacactccctggtccgttccatcttcattactgcagcttttagtaagtgtggacatctaggaggggactcctctctatcttggttttttttctcttcatagatatcttttctatttttgagccttttcttatgcataaaattttgaaaaccagcttgtaaagttcctcaaaaacaccctttggaatatagattggaaacacatttgatttttaagtaatttggagagaatatgcctcttaatgatgagtcctcctaatcatggtaaatccatctttccttctgtttaagcccttctttaacatcgttcagtaaagtttacgtctccatacaagtttgcacatattttattaggtccatttctaggtaaattatgtgtttagttggcattggaaatgagctataaaaaaaaactacatttttctaaatggtcaaaatatatgaataggccgtatacagaggcaaagaatccatataacccatgagcatctcaaatataatcaagggaaacaaattaaaacaaaaagatttaatttattacctattccactagtaaaactaatgtttgacaatacgagttttggtgagaatatggggaaaatgaaaactctcaggtattgctggtgggatgataaatgggttcgatcgctttggggagtgttttgggaacccatagtgccactgagggaacatagcccactgccctgtaagtccataggtaaattaaatatctaaattccctgtgttgttcagagaaactctcacatatgtgcaaaacagggaatgtatgaggttgcccatcccaatgcatttcatcattttgaaacagtgtcccttagaaaatgaatgaataaaaggaagtttattcacttaatagaaaaggatacagtaaaaaaaaaaaaagcactgggaatctgtgtattacaacaaacaaatctcaaaaacacatatttctgaaaaaaaaagcaagttgcaaaaaggttacatacattatgaagccatttttaaaagtctaaaacatacagagtagcaatatatattgtttataattgcttatacatgtcgtaaatgtccaaaatcatacatggttaacacctactaactccatgatcattattaattttggagagaaagagaggagaaaataatgaccaatctttagttgtatcttcatatctggaacataaaaagagagaggaaaaaaagagaaggaagaaagtgtaccaaaatatgaatatctgtttgatcttagcagtgtcacattattttctgtgtttttttatacatttaaaatattcatagctagtggtgaaaaaatttcttaaatagttgtatatttctatcatctaggagtgaggaagacatttgcaagtgtgaacgacacaggaaagattaataggaaagattaataaattgactaggtagaaatgatagcttttactgcataatacataccatgctgtaatacataatacaaacacaaagttcagttgggcatggtggctcacacctgtaatcccagcactttgagagaccaaggcaggaggatcacttgaagtcaggtgtttgagtacagcatggcgaacatggagataccccgtctctactaaaaagacaaaaattagcgagcatggtggtgggcgcctgtagtcccagttactagggaggctgaggcaggagaatcacttgaaccccggagaaggagattgcagtgagctgcgatggcgccactatacaccagcctggatggcagagcaagactccatctcaaaacaaacaaaaaaaattagtaagttaaaaagcataacctaaattaagaaaaatatttacatttatgacattaatgtaaaaattaaacatatttatcacataaagaggtcttccatatcattgagaaaatgataaataccttaatgtaaaaagtggtagaagacgtggatgatcaaatcataataagagaaacacaagtggctaataagtacatgataaaatcaatagaaaagtaaattaatactatgttgttcatcacttttcactgagcagattgacaaagttgtttttttttttttaatttgttataaaccattgtccagggactggagaaatggcttccttcatcacggtgagaatgtaaaccagtcttacctttataaacattaatttagcttcatagatcaagatctttaaaaatgtgcatattcttaaacaccataattccggttatggaaacatagcttaaaaatattggacaattgaatatttaccttacaacaatgtttactgtgggtttatttataacagccaaaagttgaaaataacttatttgaccattagtgattaaataaattaatggtaaatttgtacaatagcatgcagttattcatatggttcaaaattacatttatttatatataatttatactgtactgttcacagaaataaccaagttatgacacaatataaacagtttggcccatttttcaagactatatgtatatgtaacacctttgaaaatgcatacactgaacattcacaacgattttccattggtggtagggttgtaactgattttttttcctttgcgtagatgagaattttctaattttctacatgtgcagtacttgcttaataaaaaatgagattgaaaagtaaaagaccacttttttgtaagccagctcagaaaggatgaaaagaataataacccttgtttaagaaagtacagggaactacatacttccatactgctgtacgaaatgtctgaaggacaatttgccaaaatatatcggaagacttagaaaggttatgtatgctcttgagcgtgggaatcccacttgtgggatttttaacctcaacaaaaattaagggaagatatgaggaaagagaaagggcatgagcaaaggacatttttgcagcatgtttatgatcttgagaaaatggaaacagctggggtgtgcggcagaagaagtggggaaaatgacaacggttcattaaacctcacgatcagatgctgacagcccctcacaggttgctgcagacaaaacagggaacgacaggaaaaagatgaccgtgatacgctctgctaaaagcaggtcgcaaaacaggatgtagataatgatcccattttgcttttttacaaaaaaaaaaaaaggccatggaaaattacatatcacgaatgttcagagtggctgtctctggatgatggcattggagttaattttatctttcactctattttctgaatttcctatatcaaaagcaaattgatggtgtgaaggggaaagcatatttaatgtgattcctaaaaggctcagccctccctgcatggattgagcactgaaagaagagggttctgtcacctctttcgtcctgacccttgccttttctaatgttgctcagaggcacacagacgtatttgctttaagtaattgcttgtctgtttttaatatcacattttgaaaaggtatttagacaacatgagtttattactttctgtttaacccaaatccttcagaggtacttaaagcaaaatgtaaagtcctcttatccctttgtgaatttcagtccccagaagtctcactgttagtagtttgatttttaccaaaaatgtccaggtattttcttttcatctgcaaatgtgttaatagactcctttttttaaatttcacacaagcaggattatatcatacaaaacattctgcaatttactctttcatgtaacaataatgtatcctgggtatttttctttgccagttcagatctcttttatccttttactaatttatttacctatctattcatttgcttaacttgattttattattatacaagttatccatgaatattgttttcaaaaatttaaacagtcagaaaaggtataaactgaaaactcaaaagttcgccttccctgccaccactcatgtgccctcctcagaagcaaggaatggagcagcttttgtggggttttttgttttttctctgagacagagtctcattctgccgcccaggctggagtgcagtggcatgatctcggctcactgtaatctctgcctccctggttcaagcgattctcctgccttagcctcctgagtagctggaattacaggcacccaccaccatgtccggctgatttttgtatttttagcagagacagggtttcaccgtgttttcattagagacagggtttcaccatgttgcccaggctggtctcgaactcctatcctcaggtgatctgcccgcctcggcctcccaaagtgctgggattacaggtgtgagccaccgcacccagctgcagcttttgtttttaaacattcttttcattacagttacaacttcaagaaatactaatgccaatatctctgagctaaatacactgacagatgcagaatgcacttcatcatgctgtctcttttcttacctggctttcacctgcacactcccctctccatttcctagatttttatcagctgttttgtatcctagtgattggctttatgactttaaataatatatttaaatgtttacgtctcaattcattagctttaggcagtatctgaagttaacacctgctcacaaacactgctttcaaattcacatcctacttttttgttatactgttatttttacatattaaggcttatcatatatatattctggctggacttggtggctcatacttgtaatcccagcactttgggaggccaaggcgggtgggtcacctgaggtcaggagtttgagaccagcctgggcaaaatgatgaaaccccatctctaatacaaatacaaaaattagctgggcgttgtggcacatgcctgtcgtcccagctacttgggaggctaaggcaggaggatcacgtgaacctgggaggtggaggttgcagtgagctgagactgtgccagtgcactccaccctgggggacagagcaagactctgtctcaaaaaaacaaaaaattatattctgttgtgttcagtgcttatataattttactgtgtttcatcagtaggttagtactcaaaactttttcagttgaaaatcaggcactacaataatataactatgtaaattttgttctgtagaattaagtgggataattgaatacatagagaaggccatctgatactatgtcattaaaatttgccatttgagggagaatttcccaaatatcaaggttttatgaagcctctttcgttttcttttatgtgcttgggggtcacactcggctatccttatttcttataactcatgtcattcttatttgcagttttgttagaggacgtcctagtgtcgcttattctttcctgtacgtgcatgctcgcaaggggtctttcactgtccttaaggcttaatgtggacgtctagacagcaataagctttttctaccagcttacaaaactcaacacaccaaagactatacaaaactcaatacccttcaatggcttgcaatgctctttttaaaagtcacctctaagggggtgtaaataacattccacaaaattcacccatttggggcacaattatgcatttttgcaaatatatactcttgtataaagtccaccacaatcaaaatggacaacattttcaccaccccaataagtttcctttagccctttctgttcataccccttatgctacctccaaccactgatctactttctagaaccatagctttgccttatctagaatttttctttctttttttttttttagtggggaaggagtttaattgacataagcctagcccacacaggagaactgagttgtcactgaaattagtctccccaaaggtgtgaaggtcaggacttttatggacaatttggtgggcaggggaatagataatgggtgttgctgattgcttgtaaaagaaatcgtaggggtgtggaaaattgcccttgtgagtgagtactcctttgggtggggccacaggacaagttgagtcatgagttttgagtttgggtggggtccattggttgccagaatgcacaagtctgggtgtaaaaaaaaaaaaaaatctcaaaagaccaatcttaggttctgcaatagtgatgttatctacaggaccaaatgggggagtcagaaatcttgtgacctctggccacatgactcctgagcagtaagggattacagaaattatgcctacattttagcagaattcaggtccccccataatcctgttcttgtgggctttcttagtcttacaagggtgatttttgctccctgagcaaggagggggttagttttggggagggactattatcatccttgctttttctttgagacagagtctcactctgtcaccgaggctggagttcaatggcgtgatctcagctcactgcaatctctgcctcccaggctcaggtgatcctcccacctcagcctcccaagtcattggcactacaagcacatgcctccatgcctggctaatttttgtattttttgtagagatggagtcttgctgtgttgtccaggctggtctagaactcctgagctcaagtgatctcccaccttggcctcccaaagtgctggaattacaggcatgagccactgcacttgatgatcattcttgcttttaagttaaactataaactaaatttcttccaaagttactttggtttatggccagcaatgaccaaggagagcttggaggtcagaagcaagatggagtcagccatgtcagatttctcttactgtcataattttgcaaaggtagtttcaatccccctcacacacacttgggcttcagcacccctcaatcctgaggtgttagctacggagatgagaaaaggctaatgattgctctaacttcttcctgctgacagggggcatatttgggggaggggttgaccccagggtaaaaggagtggaagtgtcttgcagttgcctgtatgtattcaagtgcaacttgttggggtccaacatgtgtataacgaaaacattggtgctcttatccacagatttagtacagcatttaagaagaaaaataatgagccgtaaaaaggaacgagattatgtcctttgcatggaagtggatggaggtggaaggcattatcctcagcaaactaacgcaggaacataaaaccaaacactgtatgttctcaattataagtgggagctgaacggtgagaacatatggacacacagaggggaataacacacactggggcctattggggagcgggaaggagagcatcaggaaaaatagctaatggatgctggaccgaatacttaggtgatgggttgataggtgcagcaaaccaccatagcacacgtttacatatgtaacaaacctgcacattctgcacacgtaccccataacttaaaatttaaaataatagtaataataataattagccctaatataaggagtgaaagtgtaaatcgcccagtgggttcaccttgcccgctgcctagacaaagccaatttatcaagacagaggaattgcaaaagagaaagagtaattcacacagagccagctgtgtggaagaccggagtcttattattactcaaatcagcctccttgagcattcggcgatcagagtttttaagaataatttggtgggtggaggaagccagtgagtcgagagtgctgattggttgggtcagagatgaaatcacagggagtcaaagctgtcttcctgcgctgagtcaattcctgggtgggagccacagatcagatgagctggtttcttgatctgggtggtgccagctgatccatcaagtgccaggtctgcaaaatatctcaagcgctgatcttaggagcagtttggggggcgggagatcagaatattgtagcctccagctgcatgactcctaaatcataatttctaatcctgtggctaatttgttagtcctacaaaggcatctagttcccaggaatgaaggagggttcttctgggaatgcgctgttattgtcttcatttttaactacaaactataaattaacttcttcccaaaattagttcagcctatgcccaggaatgaccaaggacagcttggaggttagaagcaagatgcagttggttaggttagatctctttcactgtctcagttgtaattttgcagcggcagtttcaaaagtcctagcttcaggagtccctgtagaactgacctgaagcctcaaggaatccaggtgaataaccccaaaaatcaaccaaatatggggtcatcagcagaagctcaagaacaatggatgaggctggaatctaataacaggtgtgctgtagctgttttgaaacataatttttctctctccagtttatttttactaaagacaagaccaatttatttgcaaaataagcttgccttattatactttgcctaattatttacataaagtgcagcaagaataattattggccatataggctctttttttctaactggctttgctggaatttttttcataaggaatctcagattagaccttttaaaagtctcttgagcccagccaaggatttatttgtgcctgcagatacttgtatgaattgggtgaattcctttcttcttgaggtcccaacaaagcttggagttcctgggcctgtcagaaagtgacattctttatttgccacaggttgggaatcctgtacaggacaaggtaggaggccagttcctccaaggggctttcatcagctctgtaggtcagcctcgatttcttaaagcagtctgaaaatatgtcatttcagtcaaagccttggtaaaataagcagtgtctccaactgtgtcttgctacaaaagaaaacacattcttattgaacttactcaagtaactatattgccttatgttaaaaatagtcacagataatttccaaattctggagaaggcaggtaaagagaaagaaatatgctctaaattttgtttacaggagtatattttgctcaattgttaaaagttgtattctcagtagaagttttctttactctgaaaaacaaaacaaaaagaatcagcaacattttaagtgaaaagtcgaaaagatttttccagttactgaacgttttggttgtttccagctgggagctaattaatatgagtaacaatgctaagaacatatatgtcaagtctttctgtggtcatatgtttttatttctcttggataagcaacaagaagtgaaatatctgggtcacaggttaagaagctcccaaattgtttcctaaagttgtttcgtttcaccttaccatcagcctcaggtgagcattctagtttctccatatgcttgccaacacttggtatgatcggtcatctaattttagcatctgggtggttgtgtggtggcatttcactgtggttttagttgccattcccctaatgactgacgacaccgaacacctgttcatgggtttgtgtgctgctcagctgtcttctctgttcaactgtttgttaaattgaatttttggcttcttttatagagtttaaaagttaattatatattctcatatagatacatgtttttcaaaaatgtcctgcctgtctctggtttagctatttcttttcttaatggtgtttttaaagtgcagaagttcttaattttgaaaagtctaatttatcaatttttcttgtatactttatgatcttctattctaagggaataatctattctaagggaatagaaggtcacgtttgtatgcttctgactcatattctttatatcctttgtgacaccaaggtcacaaagatttccttctaggttttcttctaagaatataatgtacctctttaaagcagcttttaagattgtttttatttatcattggttttcaacaatacgattataatgtaccttggtgtggttttcttcatacttggggttgatattcttgagtcttcgggtctatagcttctatcaaatttggaatttccatttttggtttctttaagtttcatagtctttctggtagcccagttacgtgtcttctgactgcgtgctaatttctccccagtcactgatgctctgttgtttatgttcacctttttctccctgtgcttcactgtgggtactttcaattgcagtgtctccaagccctctgaccttccttctgcagcacccaatgtactattcatcccatctagagttttggttgtttgtttgtttgtttttgagacagagtctcgccctgttgcccaggctggagtgcagtggcaccatctcggctcactgcaaccacagcctctcgagttcaagtgattcttctgcatcagcctcccaagtagctgtgattacaggcacctgccaccaaacccagctagtttttgcatttttagtagagatggggtttcaccatgttggccaggctggtctcaaacccctgacctcaagtaattcacctgcttcggcctcccaaagtgctgggattacaggcatgagccaatgtacctggtcatgtttttttttccttttataaaaaattttaatatttatttatttatttatttatttgagacaaaatctcgctctgttgcccaggctagagtgcagtggtgtgatcttggctcaaagcaacctctgcctcccaggctcaagcaattctcctgcctcaggctcccaagtagctaggattacaggcacgcagcaccatgcccagctcattttttttttttttttgtatttttagcagagacagggtttcaccatgttggccaggctggtctcgaactcctgagctcaaatgatcctcctgcctcggcctcctgaagtgctgggattacaggcatgagccgccacttctggcctctcttttttcttaatttcagatattgtattttttttaatctctaggagacccatttaatttttttatgtcttcattttctctcttcattgtcttattgctttcagttatatatttgaaccagtttatatatttttgtcatttctgttttaaggcactagtctactaatatcaaaatgtgtgcaatttctgctcatgttcctctcaattaacttttctcctagttgagagtcatgtttttctgtttctttgcatgcctggcaattgttactggatgacaggcactatgagtgctgaatatgattagtgagcgctgaatattatcgtgtttctttagagagtgtcacacttgcatgtggcacactgttaagttacctgtggataaaattggtttttgaataacagttctgtgacttactgtaccttcagcaagcccttaagcctcaaggagcctgagtttcttcatctgtaaaatgggaaggtatatgtctgctgtcagggctacatataatacatgaaaagcatgcagtaaaatgcccagccttgagtcagaaggtgtactaggcactgtgccagcatcattagtattcatgtttttatgtgataggcaaatcctgcaaccgttttatgagttaattttaaatctctgcctctctagcaggacatctgtgtctctagatccactcagtaattacaatcaacccaagcatgttaaaggcctgagaccttttcttttctttttctttctttaacattttccaatctcatgtttgaaagcataaaagagaacctttcagtctaaatgttctcctgcaccctcaaacccgatggaggtgcttctcactgcacgctcccttcttacacattccacctctgggttctgccaaggaaacattggagaaacagctccaaaggattgaatgatgtccagggccttttaagagaggttcaagtcgtgaccagatgtgtatctgggtaagatacgtgtgaacctccgtgggaaagaccaagggtttgaagtcagagatgtggctcaaatctctcttctgtgcttcagtttcttccctgtctgccggaggaggaggaggaggaggagaaggaggaggagaggagtaggaggagggggaaggggaggtggaggagacggagggggagagggagggagatggggagggggaggatctatctagtttacagggtcctcatgaggctcatgtgggaaaatgctttgcaggctggaaagtaccacagaggtgtgagttattataaaaagggaagttatttccctctgtcaaaaagctatgcagaaatatactaatatgtaagaaatgtttgtatggaggacagaaataattcatttcatggagagacaagaggatcactggcagtaaaactgcaggcattatttatgggagactcaaaggagggaatgccccgtgttggcgggcctgcctttcaatccttgtcacaagtcatgatccagaagctcggccaattgaagaaagggtctccatgaagtggagctcatgacctgcctgcatcagcatcactgggggcattttttaaaaatgcagataccagcactgctggggctggggttgggagtctgcaaactcccctgctggttaaaatacaaactgaggtttcagaactattgtgccaaagaatcataactgactccattgggaagtaatgacccatgatttgatttctcatttaatttttcaaaatgcaaacaatgcaaaaagttaaaaattgaaaaataggttaaggcccatagtctcatcaatacaagacacaactgtagttggattaacattttggcatattgctaacatattttaataatcactactgtgagagttttttaaaacataaatttacatggtgttccccccccaaaaaaattcactcacataaaggaattttatccgtccccagaattacctaatgaatttcaagcttctctgttagcagaatcaaatgtaggtgactcgataaacaagtgtctgtctttgacttaacacagctttataaaaatgccttcttccttccttcctgaaggtctgctcagcaccctcaaactttttaccacctgaaaatcttttctatcaattttaccacaatggggggaggtgaatttccacaaaagatcttttcactttaaaaaattgaaatggccacataatttctcctcctaactgtgccgaagtacctaaaagtcacaggttggcattgctaggtcagccttttgcaggggccacacgtgcccaaggcccttacacacccagccaggtgttacagagcagcctctcaccatcaggctctgtgctagtgctgggaaaagattctgctggcatttaaaagtattgcacaaggaggccagatgcagcggctcatgcctgtatccaacccagaactttgggaggctgaagtgggaggattgcttgagtccaggcattcaagaccagcctgggcaacatgatgaaatcccacctctacataaaattgtttaaaaaattagccaggcatggcagcacgtgcctgtggtcctagctactcgggaggttgaggtgggaggatcacttgagcccaggagttcaaggctgcagtgagccatgatcacgcctctgcactccagtctgggtgacaagagacagacagatgaatgaaagaaagaaagaaagaaggaaagaaagaaagaaagagagagaaagaaagaaaaagaaaagaaggaaaggaaagaaagaaagaagaaagaaagaaagaaagaaagaaagaaagaaagaaagaaagaaagaaagaaagaaagaaagagaaggaaaagggaagggaaggaaggaaaggaaaggaagggatatattgcacaaagcattagctgtgaatgactgtagcacacactctacaatccagcaatggaaaagctttgttttctgaacgtgttttctatcttcatgtgtttggaaaaacacctatttctgaaatactacccaaccctgttgggagtatgcctggtatttttttctagtgttcccagtttctcatcctttgctctttcaactcccaactaacaagtgtggaaggactgatggaatcagagcacgcccattttgtaaccactaatgggacttttaaatgtcggtgaggaacttgtcaatggaggaatagggatgcctgagcctcgacctatcttagcatcactaaaatggtgcaggtaaacactgtgagcctcctggtaggatgcaacatggagcacagatcacctcctcgacagcatctctaccaagaggggctgagcttgaatctaatggagcctacagaggtaactctatgtgtaagaaggacgagagggaagagcaagtgatgaaccatcacaaggacgcaaaatccaaaatggagaacattctataggactggcctttacaaatcaaaggcttgaaactaaccaaagtcagagcagaagggactcctgtttaaaggaaacctaagacgttgagttatatacgaaccttgtttgaatcctgagtaggacaaactaagcaagaagctatttttaagtcaattgttaaaatgtgattatgaattgggttcaatggctggatggttagatgataccatggaaatattgctagttttgttagatgtgatgaagtaacattggggttatgtgagcaaatgtctccatgctttagaaacaaatgcaaaatatggggtggtgaaatgacttgcttcactacattgatttcatgttgtttccaagtttcattcatttagaggaaataaaacgatatgatgtaaaatactgcaacccagaaaacaattttaaagataattattgaatgtgggtgatgagtgtagaagagttctattattattaatattattattttatttatttttttgagacagtctcactctgtcaactaggctggagtgcagtggcaggatcttggctcactgcaacctccacctcctggtttcaagcgattctcccacctcaacctcccaagtagctgggattacaggcatgcgcctggctaatttttataggcacgtgcctggctaatttttgtatttgtggtagagacggggtttcaccatgttggccaggttggtctcaaacccctgacctcaaatgatctcccacctcaacctcgcaagtgctgggattacaggcatgaaccactgtgcctggccaatattcttgactttagtatattttggaaggtttcataaaaaatagttttcatctaaaaaaatctgttgtagccatccttctcaggtctggctagcgttttctcccaggtggaagtaatttctttttgctgagctcacaaaacactttacccaggcctctctttggtacagaatcatgcccactctgaactgatggaatcgggtgcatgcctttcctccttattttcctgtgagagtgggctccatccttgtttcatgcctgtaccttccgctatgcctgacatagttcatggttgacagcaactgaatgtctgtggctgaatgaatagaagaacctcgttgctaggaactgttatcggggctgtttcaggttcacatgtggagaggtcagtattagggcaaaggtgaggaagcctcatttcagtggtgttgtcctgagttgagacatgaaacatgaattttaactcaaattctttggccccttctttaattcagagccataggccaatcaccgtactttcttcatttacaagatgagtatagcattggtggtttgtactgggagaatttggaattctggatgttggtgagatgctccatatgggatctcatgccggcagctagcatggcattgtgatcgcgacacccagggtgagtcccagctttgccagtaggtacccctgttctacctggatgctacccacctatgtctggcaggtcaaatcagaaaggcaaagcctccagcacataacatggcaaggcttccagatacaaaatagcaaaactattttgccacaggggagatgatagggaatctgaactgtcccctccaagggacacagagcctcaggcagggccacaggtgcacctgttttgtgcagagggctcaagcagccctggagacagtaacaccctccagctgccagctctgccaccttcagcatgaccttaccaagccacctcgcctcgccttcttcagtggtaaaatgaggataactgtaaccaatttatcaaggctaacatgtattagaaaaaaagaaaaactcgttatccgtcaagtgcttttcaaccatgtcatgctagccaagtgcaaataaggggtttctagtttctctatttttagttgatgcctccaccacaccccttgtttgactgaagctgtgtttcaggctttgagcatctcccaaagcaaacattgactgccctgctctggtgaaagtctgcattagagggcctagctggtttcaaataaacaaacaactcccctttcccacttcccctcctcttgctgactcccccgactagacacacatgcacacggtgcacatgcatgctctctcacacatgcatatacacgtgcacacatagacacacacacacatatatacacacacatattcaagcacatacacacatgtgtattcacacgcatgctctcgctctcacacacacacaagtgcacataagtgtgtatgcttcctctcccactctctcacaaacatacacagactcacacccttcccacaatgcagcaaagccatctggagccccagccagtgtgtgatgcgttttgcctctgtctggacttctgcacttcctggcttcacccaacctgaaactgctgggtgcagcccgagcaccagtgacagccctggttgtcccatggcctcttgaggaacccaggtctccagtcaaagccactggagtagggggacccatagagacctgaggtactcatgagacccatggaaaatcatctgcacacacactgctaaggagtcaaaggacagaagtgtaagtagtgggtcatttaatcttaggaattttactttctgtccggttctttgttcaataaattgaacaaccaatgttcaattatgttgtctcagtggacacaggtgtttgccaggaagcttaaagtcaatggcaatatggctggccagactaagaaagacaagagggctggtcacctgggcagatgcggaagtatgagtccaagtctggggaatatactaggagctgctgaccactggcccttcgttgagtcagggaggctgagagaggccacgaaaggcctgaggttcaggcagccctggctggccacttaacggtcattgtcaagaactgcaggctggccctggctccaggccttatgctcctctgttgctgggcaaatcactcaaatcctccttttatttttctgcttgtatcaataatatatgcttagtattaaagaatttaagaaatatatacaattaaaagaaagaaagtcaaagtcacatgaagtcttataatccaaaatccatttagaaaatactttggggggacctgctttgcattagcacacacaccgttttttaagtccgctggttttttttttgttttgttttgccttacaccacacctctgttttgtactctcccttcctctaacaataaccacagtaaacaacttggtgttcatcctccccagcctctttctgtgtaatatgcaaacatatctacacgcctgaatagaggtttcttttcatttggtgtttgcaaatatgggattccctcatgcacctctttgggtcttacttttctcgtgtaacaacatggtaccgaaattcctcttgacctcactggtgaagatccagcacattttttttagtagttgtgtgagagatttatagagtgtagatttattcaacaagtctttaattgctgggcagttacattgttgttttctgtttgggattttttttcgggggaggggattgtttttccaactattactacaacaaacattttcatctctcacatgtgtctatataatgatgttttattaacctgagatagtccagagtgggactgaaaatcaaaaggtatgtgtgcttttttattttaacagaatttaaaagattgccctttaaaagaatttaaaagattgcttcttccaataatatttcatgttttgtctaataaatatttattaagcccacactctgtgccagacattggtttagcaatttggattcagcaatgaataaaacaaagattccagctctcacagaagattaatcctagaaatggagcgtgaaggaacaaatgaaacaataattataacaaacattttactatttgggtttgtgttgcactaacttcctatttcttatctttacacatttttctattgaatgaattatatgctgcaatatacttcctgtcaaaagtttatgagctttgtatatattatgaatagacatttatctgatgctttgcaatctcttacccaatctattgcttatctacgaacttcatgagtagtttcttataccatctaatatttttaatgtttatgaatttgtactttttttgttctctcttcgcttctgggtattttatctttgttagtagttgtctccaaactctgggttatatacacagtttcttacatttcttttaattacatttttgttttttatttttttcagtcatacacctagaatttattttttaatatcatgtgaggtaggggttcaattgtattttccttaaggtaaatagtcattttcctaataccatttattaaaataaactatccactttctactgaattaaaatgctatctttttcacatacgcgattcctgtatttaccaaaatctgtttgtatgttttttattctgctctgatgattgttgtctacttttattattccaatttcatgcggttttgattacaatcttctatttcataattataaagctaggttaagacttaatttagtcatgtaaagcttcagatgattttatgcaattacaaattataattttaattaaaagaacattccatttatattaggaacaagaaaaacatcacaatcaaaaaagagaacagagtataataattacaagacaatgctacataaaactatggcaacagattggaaaatgtagatgaaattaaagatctataaaccatataagtcatcaaaatggcacaaagaggagaaaaaatgggaatagatcattcctatagaagaaattggaaatgtctttaaagatttactatttgaaagggccccagacacagatggcttcacaactgagttctatttagcctgtgaggaacagataaccccactgttatgaaaccactcaagaagatagaaaaaaaaaaaaagagagctcctcaatatctgttacaaagccagcgcaccttaatgctaatgcctcatagacaaatctcccttgggaatatagattctcattctaaataaaatattagcaaatagggccgagtgtgatggctgacacctgcaatcccagtactttgggaggctgagatgggcaggtcacttgagctctggagtttgagaccagcctgcatgacatggcaaaaccctgtctctaccaaaaaataaaaaatttagtagggcatggtagcacatgcctgtcatcccagctactcgagaggctgaggtgggaggatcaccttagcctgggaggcagaggttgcagtgagccaagattaggtcgtgggactccagcgtaggcaacagagtgagacactgtctcaaaacaaaataattagcaaataagaatccatccatgtgccaaatagactaatatgctgtaatcaaatagtatttttccaggaatgtacagatgtttcaataacagaaaatttaccaacataatttattacattgacaaattaaaggtgaacatacatcatattgatcgatattgtataggcacctgctaaaattcagtagccagccgcaatacaaacccatcgtctctctctctcttttttttttttcgagatggagtctcactctgttgcccaggctggagtgcaatggcatgatcttggctcactacaacctccgcctcctgggttcaagtgattcttttgcctcagcctcctgagtagctgggattacaggcctgcaccaccacacctggctaatttttgtatttttactagagatggagattcactgtgttagccaggctggtctcgaactcctgacctcaagggatctgcccgcctcggccttccaaagtgctgggattacaggtgtgagccaccgtgcccagccaaacccataatctcttatccaaacttctgaaaccctaaatctctgaaaactgaagtgatacttgtaaccctggcactataattcacttagtggtaaagctgatctgagctcacataaagaaatacttagatataaaaagtgttggtctttaaaactgtgaattattatgtgttctgtatgtaaggcatacttgaaaaaacatacttgtgaatttttcgcttctgtggcttgctgtcctatatcgaaatttgttatagtgttttctttttcaaggtgggtttgaggagcaatgacatgaggaatgtgctttcagctctctggaagaaatgcatgactgtgtttcacttaatcgaagacgccactgataggaaggctagcatttaattatgtatcactaaaagagaaaaaaaatgctgctactagttatactgcaaagcatcctccattgtgagacacctcccagttcagagatattgaaaagtgaaaaaaggtccatcttagaattgatgaaatatggtgtgtacatccaaaggaaatcaccactaacaacacgcccttctgacacgcgtggggacttgggtgcttcctctctatgatgtctgcatctcgaggaagagcccgatgtaagtgcaggagtgcagtggtctcaggtcagactggactccagagctggctctcacgggccagttgtttgaccctgagcaaactccttaacatataaatagcagcccctggaatgaggatggtgacaacatggtggtgttgatggtgtcaaaagggcctgtcccacatctgccatcctaaaattctttaccaaagaaaaaaacctgaccacatcttcccccctttaaggagacccctgatattactgtgaggccgcagctaggcctcgatgcctgtgctatcaatctgtcctaaatgtatatagtgtctcacccaaaaatctgagagggagagaacgttagtcatcttctaacaaagcccctgctgtttaccaaagagctaatgggtcggagagaaaatgtcactttcccaagtgacacagccagagacaaaatgaaaactaaacccagagccccagacacattggtgggctctttctagaacaccacgtggcctcccgctcaggctcctgtcacctgaggaccgggatccaccccagtggtttccagcggttatctccagccagaggatttctgtgtcctaaatgcagtgctttctgctgtatgggcccccgaaaaaagatggacacccatttagctcacccacccgcttctacccacgttctgactttgaggtctttgctgcacccacttccaccccacctttctaaccagcctcccggaaggggccagggatcccctctgtgcagaagatctgaggccccgctctctcatgtcctctgtctgctgtgtgtctccgacaggatggggctggtaagtagcaaaaagccggacaaggaaaagccgatcaaagagaaggacaagggccaatggagccccctgaaggtcagcgcccaagacaaggacgccccgccactgccgcccctggtgagtgattgcccacccccaccaagagcagattacttacttctcctatgccttaatgtccaagtttgtaaaatgggtatagcaaaagtgccttcctgatagggatgtaacgatctgcaatgtataagcaggtgtgccatgcaatataacacgcacaggacccggcctggttagctcccaataattcttagccagagctcatttctcgagggcagccttgaaaagaaaaagaaatgtaaaaaggtcagcttggggagagggtgtcgtaaggaaggatccgggtatctagctgcagctactacctctcttctccccagcagctcctggagacccttgtcccctatgtggcattgctgctggcattccaaagagcctgctttcctgggataagcatcatgaaacaggagggtgcctgtcctcacctcccgagcaggctcttaagttttcctggaatcccatgggcattttaaatgaggaaaactttccaaaggaaaaaaaaagtgaaatttcaagtgaaaaggtcttattgctggggaatgcattttcctagtcatgcagtttgatttgtttataaaacacttagctccttttgatggctacagcatgtctgaagatgcatttttttttttttttgagacagagtctcgctctgctgcccaggctggagtgcagtggtgggaccttggctcactgcaacctctgcctcctggattcaagtgattctcgtacctcagccttctgagtagctggaatcacaggcacacatgccaccacacctggctaatttttacatttttagtagagacagagtttcaccatgttggctagattggtcttgaactcctgacctcaggtgatccacctgccttggcctcccaaagtggtgggattacaggtttgagcatccgtgccgggcctgaagatacatttttagatgattctttgtgctctctccactccctgaccagtgacccccttttggtttggggcagttgggagccttgccgcgaccccctctcctgtgctgtccacatgtccacgtggtcatctctttatcctaacagggacctgatggggagacggggattactaatcccacttcctagatgaacccaggcatcttacctatctctgtcccagtttagcgccggtctcagcgcacaaccacaagatgtttattgaataaataattgatcaaatggggaaacttggacttagactgattgagtaatttccccaaaattatatgataataagtagtagcacctggaatttttttcacttaaaagagtcacataatatgtatatggaaaaaattataattactcattattccactatgtagagtcaccagagttgcctcgagacccttcttccgtgtgttcatttcatgtgttcctatttttaagagaaacatacatgcacatcattttgcaaaatgctacttcaaaattgtgttcaataaatatggaattaagaaaagaatatttgtaacatatgtcaggttgaaagaatacaccaaaacgcacacttgtatagccacctcccaacttcagacaagaaagagactcgttcctttgaatctccctcctccctcccctgtttgtacccttcaccccaggccccaatacccagaatctgtttatcattccttagctttgctttttaatattatcacatatgtattacccctaaacgatatttagtttcattattcatgttgtaaactttaaatcaactacatcaaacagcgcatatgcttctgagactggggttgtggctccgtgttacgcatgtgaaacatatcgacgttgatgcacgtggctattgctcattaattttattgcctgagtatactgtaatttgtttattcttctgtcatgagggttagttccacgttttaaaattgtttatgtatcggtcgggcatgatggctcacgcctgtaatcccagcactttgggaggccgaggtgggaggatcacttgaggccaggagttcaagatcagcctggccaacatggcgaaaacctgtatctactaaaaatacaaaaattagctgggcgtgatggcgggcacctgtaatctcagctacttgggaggctgaggcacgagaattgcttgaactgaggaggcggaggttgcagtgatccgagattacgccactgcactccagcctgggcaacagagcgagactccatctcaaaaaaaaattgtttatgtattatgatttttgctaggagccctcttgtacacattcccttgtacactcttgtacacatacacagaagtttctctacaggatatatacctacaaatatgtttgtcgagttttggggaaatatgctttttaaatattttttcttgtcaacaaatacccgtttgcagtttgatcttgtaatggtagagccaggatgttaagcccaagtggttgggctttccctcattgtccacagctgtctcatatccacattggggcatcccccagcgcggtcagggcaaaggcagcagagggcgggggtctgtctgagggtagtgctggtccctgggtacagaatgtccctgagcagcccccacaggcagctgcctctcctccttcagtaggtccctggagataccctggctgcccggctcagcagtctcaacccccaggccccacccacgcagcagggactgaaataactcaagtgtgtgttttctacccaaggttgtcttcaaccaccttactcctccaccgcccgatgaacacctggatgaaggtaagaagggtggtttgggaagctgaggctccacagccctctcccctaggtggcagctttgtggagttggaaaaaggttgagtcaggagcagcttgagggctggagaagagaaaacggggaagctgagagaggccccggctctgtgcctcttggggcgtctcttcaggaaccaagaacaagtttcttcagtatgcctgagcctgggtgggacttttaaaacatgaaagactttacaaactgtaaacaagaacaaaaacaagagtcccagggaagacacacagcatcatcaaacccaagttttaaaatatgctaactctcaaacgcaaagggctgggccagtggctccaggcccttgcctccagcccctgtccgctctatgtggagggcaccttcttgtttcccgctcccagtcacttcgagagtcccgctgctgaccacctaaccacccacgcccctccctggtccccagactccacttggttttttttgagacagagtctcgctcttgtcacccaggctgcagtgcagtgacccaacctcagctcactgcaacctccacctcccgggttcaagagattctcctgcctcagcctcccaagtagctgggattacaggtgcacacaaccacaccgggctaatttttatgtttttactagtgagggggtttcaccatgttggccagattggtcttgaactcctgacctcaggtgatctgcccgcctcagcctctcaaagtgctgggattacaggcgtgagccactgtgcgtggcccctagactccacttctgctctggtgggctggcctgctgggtactgtagggaatgagctcagcctttctgggccagaggctccacccctggggactcccaagagggtggcctccttcaaagtgacttcccacagcctcctcatcatccatgtccacacagcatggggaagggatgcctcggccagccgggccccacccattaacctgctcatatgatgtgtactgggcattcagcacacagagcccagctctgtcccaggaatggcgaaggggtgacaacaggtagatgcgaccccttccctggaaaagctcagaatctgtcacacttgtgagcagaacctgaatcttaaaacttcagggaaccactgtcacccattctgaccctcgctttcctgctgagaagaggtgaccagcccgaggtcacaacactcagctcagtgacagagcggagccaccccacccggggaagctaagtgctctccaggtgaccttcatcaggtgggtcctgtggctcccagagctgtgcagagagcctgcgtcacagcagggctcacttgaagatggtgctccaagctcctgagccctcttcctgccttccatccagggcccgccagcaaggtggggggcccggcagggtcactggcagccatagacagtgtggctggggctctggacacagacagtggagaggccagggctccagctgccacgtggcaagaccacccctactggggatagaggcaggcggggcagaggaagaaaaggataagaggaggcttatgggcctccgagggcaggtgtagaataagaagatgagggctcccagcactatgtccgaatgtgggcctgaggccaccagcagcccggcagtggctgcctccctgtggctgacctctggccatcagcttcctcacacacgccttgtccaggtcatagggcttcttagtgggtccacaacggaggacaggatgggctctggggggcagcccatccctggtggggtcacagggctgggggtgggggcctgtgctgggtgagaacatcatttccatcatgggcaagcagaagcctgtcctccttggtagccaggctcaccccagccccaccttcccgcttgtgggcctgagtggtggtcatctctcccttgttcattttagacaagcatttcgtggtggctctgtatgactacaccgctatgaatgatcgggacctgcagatgctgaagggggagaagctacaggtcctgaaggggtgaggttccaggacaccatcccctgtccctgcaggacccccctcccccacatctctcctttctccacccaccacatcctccatggctgaccctggaagtcttctccatcgccctgcccccagccctggccccagcattttcttgaacttggcccttttgtcttcctctccaaaatctttccggtgaagtaatttccattcacaacctcctgctcatccttcaaagtccacgttccatgccaccgcctccatgcagccctcctgactcttttgggcatgtggaccttgtcctttatgcaggctggtctggctgttccgtgaaagccttgcatttaagccagttgtgtccatatttgtctccttttcaagacaggagcccacactgatgacacacaccaatcccgctttagctcatttcccatgtccttctcagaaactccttctaggtcagctctctctcagtggccaggcttgtcctgtggagctctgagggtctgatttggttcttgaagttctccaaaggccctgagccaagctcacgaaggtcctgactgctgattctatacagtccacgccaaccgtgtttttctcaagcctgtccccagtccctcaccaagctctgaacacgtcccattcatcaagaggaaggctgctggctggatccttgtgccctcttggctggtcaggctgtgtagataagctcttccccctagaacttgcccagatagccactgtaccactgagcagtgggcacaagccccttcctgcctgccgtactctctacccctgcggattctctgccctccagggagagatgactttgaggaggcctgagagctgcccagtgacgggcctacaggggccatgatctcatctctgtttcccctgctcccattagaactggagactggtggctggccaggtcactcgtcacaggaagagaaggctatgtgcccagtaactttgtggcccgagtggagagcctggaaatggaaaggtaggtgggcacgggaacccccctcgagccaagatgcagtcactgtttctgctccctgggctgttaggcagggcagggccagagtgggactgaccagggagcctgcaggcactagcaaagaggggacaggaaatgagctctgctgggaaaggcctctctgctggctccagacgacattcagaccgctgtgtgacactgagcaagccgctcttcccagctaaacaagagcggtccttctcctggctcccctggatggaaccggccccagcgtctgatggcctcgaaggctaccagggaggcactatgaccagcatcccctcccctacagcctccatgggcaggactcagggctcagccctcgggggctcccaggagggtggcgttgttcagaactgattaatactcccaatcttctaatcccccagcccccatcttctcccatgtccccatggcactgggaatttcggactcggccagccagagcccccacgaatctgctcacagggactagctctgcctgaggactgaggcccagcaacgagtcttctctggacactgtgggccccgcttctttccctggaacagtgtggggaaccgtggggctgtcctgcacagaacaaccccataccgaaggggacatactggggtccctgctcagagagtctcggcagtttgcctaattcagatctcagactgcaaggaggaggcacgtgcctgtgatacgcagctgtgctttggagagagtgatcaggggcatttttccaaagcaaaattaacaaaggtcaaccaactagtgttcttgtttcgttctaggaaaacagtgagtccagggctgacaggaagcggaactggaagggcagcggggcagagggcactgactccatcacggtgtgaggagcagcagctcagggccgactgggaccagaaatgctagatttttatttcttggggacaggcagtgcaggagggaggctgtgtgggaatactccgaggagcagggtcgctctgagtttcacctgttcctgccgttttccaggtggttctttagatcacagggtcggaaggaggctgagaggcagcttcttgctccaatcaacaaggccggctcctttcttatcagagagagtgaaaccaacaaaggtaggcttggtggctttgcctgccttccttgccctgctcctcccgggaaggcgcctccagaggcctggccctggagtgagaggggaaggggtgactgccaggagaaccagcagcttccgggcttgtgtccctcccaattcaggccctgcccgggagttgacatgggggctgtccacacagtcctccctgtcccggctggaaaccacctgggcacaggaagccgggtggacaggggtggtcccacgccagactggccctgctgcccagtcagcaggaacaccgaggccagtgggggccagggaagggggaaccctgagcccttaaccaccagcctctttggaatcaaggattagggggagctcaaagaatccttcaagatcatctcagccagaggctgcaggtagcatatgttaggaagtggcctgtgccgtgatgtaagagaagagggtggtaattgtggggagcccatgccagtctagacactcatgagttcaaatccactgactgagcaaaacagctgccatcaccctcaggggttttctctctttctctgtcatttggctttctttccttcttaatttttttggtgtaaaatataaaacacatataaagcttgcatgaagtatgaatgtgtaattctaaatcatatagggtaataataaacaaatccctgtgtaatgacagccaagagaaagagcatcccagaccaccaggagccccctcactcccccacttgggctccttcctgattcaacccccaccctcaagagctacctgctgtcctgacttggatggaaatccttccttgctcttctctgtggtttcgccaccatgtcttgtctgttttttcagcttgatgtagatagaatcactgtttttgtttctgtgtgtcttgcttctgtcactcagcagtgtttgtgggattctatgttagtttcctgggctgccgtaacaaagtggcacagactgggtggcttccaccacagaagcttattatctcacagctctggaggctggaagtccacgaccaaagtgtcagcagcgttggctcctcccgggagctctctccttggcttgccgatggccgtcttctctgtgtcctcacgtggccgtccctccatgcatgtctgtgtcctaatctcttcttgtaaggacacctgtcagtttggattagggcccacccatatgacctcattttaacttaatcacccctttaaaggctctgtctccacatatagccacattctcaggaccgagggttaggactttaacatatgaattgggagcgcacatgattcaaccagtaacagattcattcatgtggttgaggatggtgagcctgttcatgttcattgctatacagaatcccgggtgtgaccattccagagtcaagttagccattctcatgttgtgggcattgagttgtttccagtttggggctgttaatgcatgtgttgcaccgaaccctattatggtccctggtgctcactggccactagcttttcgtctgtaagatactaatccacttgacagatgaggaaagggagcccctgaaacaggaagtgacttgctgggggccaacagtaagcatcagagcccaaagcaccagtgaccacatcatctaagaggctgagaggcttcccaagctctacaacgtggcaagctagggtgacccaggggcttcccaggcagtatgaagaatgctttgctcatcaggaagctgtccacagggaccaggtacagccttgtagccaattttaactggagaggagatggtgacagtgacatcagaggaggaaagggagagagagtgtctggaatatgagtctggttccctgtggttggggcgatgagaatggacagagttgtcacctggtgggagcacccttgggctgtccattggttccatctgtggctcaagaacagcagccagagtggaaacccagagtatgaaaagctgtcatagcaccctgtgattctctggggacatcatgaggccttggtgccccacaaaggggcaggaccaggttggggagcaggaagggtgcattggaaagctggggtgctctgtgcaggatttcttggaatatgccaatgaatgcatatacatacatatacatacacatagatatatgcattttatatttatattcatattggatattgtcactatttcatttttgtggcagagcacctctgtacaagaaataatttgggaatcactggagatgacataagtgttttattgttgttccaggacatttcaaacatacacagaagtagagaaaatagtttagtggaacccctggtacccaacagccagcttcaacaattatcaactgagccagtcttgtttcatctgtatctcccgctccacccctgttctttcgaagtaaatcccaaacatcatgtcatgtcaccctggaaatgatatttcaaccattgcctattgctaaggtgaaagcctccccaccccctgcccaatctggtgtggaggaagaaggggttctctatgagtctggcatcttttcctgtccatgtccaccccaggaagccagtccaagctgggaataggccatatgggaccagggctgcaggactgttcaaccatcatcaccaccacacgcccatacacatgcacacatgaacacacatgcacatatgcacaaatgcacacatatacacacatgtgcatacacaggcatgtgtgcacacatacacatgcaaacacatacacatgtccacgcatgcacatatacacacacatgcacacatatacatgtgcacatatgcacagatgcaatgaacacgtgtgcaacacatgtacacaccttacacgtacatatgcacacacacacacaactccaaagcaagacccctctgcttctccgagccacagcagtgaatgcaagacagggatggaagcaggggagtgagttctacccttcgtggcctccggggtgtccttgagcctctcaagcctcagtttactggtgtctatgtgaggatagactagtttcacagctcaaaggcaggcggtccttcagtgctgagaaatcttcatctcagagccaggccctgcctgcccagggcagtccagacataccacagaggcaggggatccaggttttgtgaaactgaagctgataggatctgaggtcgtctttacaaaggacaccaaattgtcagaagccatcagggacggggcctcagagcagccaggcaagtgaggggtctaaagcaccagcttgggaagcgtcactgcgtggagagcgggctcctgggctcatcgcccgaggcacccgacacaagtgcagcctacaaaatggagagaaaagcccttgatgaatgaactccctaaggccaggctcgggttccttagagactgggggcacagctgcacccgggcagggtcggggagacagtttgcagcctctgggctgaggctggggtgggggtgtggaggggctgtggcaacagcatggcgtacgcctctgggtgtccttttgcaagtaggtgatgagagaggcacattggctgagggaaactggaggatggaagggggttgaggcaggggaactgacaggagaggaaagagccttaagtcaaacaggaccgcggaaaaccaagcgtccacaacgagaacgaggggtccgtgcctgacccctggcggggaggcgtggtactgctcgtggtaggcgcggactcggggaaccgggagccccccagcctgccgcgaactctgctgggccccagcgtcctcatctcccaaataatgggtaaggggcggggtaaggtcatggtacccaagtagctggacagacgcattttataaaaacatcaagttcatggaaaagcgtttcttacctggaaattcttacctcctaaattgtccttaacccttgacatctgctaccacttgcctgcgggaaaacattaacctagaagacaaaataacaggtgtatgtaacaggcagcaaatgactttgaacagagcccctgggcatagcttattacggtgtccgccatggacatgggtacttgcagctgtgaatggctatctgcttgtaggagtaagagataccctctttagccagaaaataaagcccctagtcactccaacgagactagatttctcaatagtccatgacaaagggtccccgagtgaccagatgcccaagtggggacctacatgattgctgagaaactgtgctgcctgccgcagggctctgtgattccctggctgagttttgcaggatagtggggggatgccaaggtcagagtcagatggaacttacaggggaggcttccaaaagcatggaggttgagatgcagggaaaggaaacttgtggagggagtgctgataatgaagaacagaattggggaacttttttcaaagctttaaaatgaggcccaaatcccagtcccgttttttgtctttgtgccttacttctcgtgtgtgtcttcatgaaccctccaggtgccttctccctgtctgtgaaggatgtcaccacccagggggagctgatcaagcactataagatccgctgcctggatgaagggggctactacatctccccccggatcaccttcccctcgctccaggccctggtgcagcactattctagtaagagggggcgtgcaatgggggcagggacttgtgccaagagcccctggatctctcgctaagattcccaattgtgtgagtcattggtgccaccttgggggatggaaagattatcccaaagttaggcctaaggaggtagcaactctgagcaccgggaattggtggccctaattccctctcctggctcagcagggaaccccttagagagtagcaagcattttcagtcttagagtgagcaggtcgattttagagatagcatgccctgctttgcgcaaacgaagagaaagagttgagtgtgtgtgcatgtgcaggcgtgtgcacacacccatgcagggggtggggtggctggggagtggagggccagctaggaatgatacagctcccaaggtagagcctggctgctctggtaacccccagccctgtcttttcttccctaatgcagagaagggggatggtctatgccagaggctgaccctgccctgtgtgcgcccggccccgcagaatccctgggcccaggatgaatgggagatcccccggcagtctctcaggctggtcaggaaactcgggtctggacaattcggcgaagtctggatgggtgagtgtgtgcacacgtgggagcatttctccccccattccacctgcgccgcatcctgagtccaggttcagcattttcatagcgtgtcatccctcccccagaagtcttgagagggagcgaggacagaggcgaggacactcattttacagaggaggaagtggaggtgcagagccgcgttgtaacagctgggaccgcttatggtggtggcagagcaggaacagaatccagctcacccagccccgaagtcgctccctccttcgttctctgcctgaagctggctttgacaatgagctgcagcggcgcgttaactccccttagcttttcatcacccagatggaaacaggaggttaaacgtgatgagccatgatgttccagagcctgagtgcacaccgagggcagccgtgggactttggccaagtcactgaagctccaggcctggtgtcctcacatttccatcgctgctgacacctgcccccttccccccccgcccaccaggatataaaactcgtgttccgttttatccctggattggtccatgagtcctcccttacctggggctggtccatgagtgctcccttacctggggctgatgcccacggtgcttttggcaggagctgtacccaggtccctgccaaggcccatgtcctctagaaaagcaagtagagttgtcttttgcccttcaggggacttcatggagtacagggagagtgtggagatacagatagtttaaggagtgggacaggatcgccatggggcttcagaaggagggaaggagacccccatgcgtcatcctcctgcccagtgtaccccaggctgtgtgcttatttccaccaaggagttattgtgtgatagaagagactcattatgtaggggaggggtgggggaaggacacaggttccgtgcaggacagaaggacacaggcccagggtgtggggcaaataggtgaaatgccccccaggcagggtacattcctccactgcctgaggccccatatagaagggacctggaacgcaaggtacgcaccacacaaccatggcctccggaactgcatgttccagctctggcacctggaatggggtggcacctgggcacttaccccgattttggttaagggatcacctccgagcaagctctctgtcttctgattggcttcttcactcccccgggctcaggttactacaaaaacaacatgaaggtggccattaagacgctgaaggagggaaccatgtctccagaagccttcctgggtgaggccaacgtgatgaaggctctgcagcacgagcggctggtccgactctacgcagtggtcaccaaggagcccatctacattgtcaccgagtacatggccagaggtggtgccccccgcagagccgcatcctcagagcgaggcgggagggccgggcttagcaggaggaggagggtccgctgcggtgggttcaccaggccagggggtcctgcagatctagggcatggcacggtgtggggacagggagggatggagggagggggagggacagagggagggtgagaaacaggagggtgaagtggttctgacagagccatgttctcagcccaggagcagttcagacagcatttctggagtgcatcttctgtgcctagcactctttgatgcctgctgggagggacagagcattgcaaagtcagacgaacaccaggccaggcatgcagggacagtactagatccaggtctcctgcctcctggtcatgcaaccatttacaactgtgtgaatattttacaaggatggccagagaggttgggcttgatggcctctgaggtccacggcgtggccaagttctcatgccactttctcaccctcctatgaccctgaccgcacactgctcctataggatcctaacatgcccatgttgatatagctccctaacaactgtcaccaaggggcccccggtcggaggctgtgctgggggtgcctctagcctgcccctagggcaagcatccatccctcccagctttctgattccagggggagctgcatttgtcccctgcaccaaacctgggggacagttctctccattctggtgctttcttgctgatgcctggtcctcagaggcagagggtgtctgccagcagggatcaagggagcgaggccaacacggggggaaagacaagaaggggcatgaaacttcgagtcagaactggggtcccactcgcagctcccggctgggtgacttcagacaggtccctgcacctggctgaaacctaacttctgggcaactgctggtatattggctgcctcccggggtgctgagactggcattttgtaaagtggaaggcactcggcagcagtaggtagatccttcctgatgcaccgagagatctgagggtgcaaactcccacttcccgcgcccatggggagccactcacaccagagagaggctggcaccaccaggggcgggtcactttgcagaagggcacttgcaacttctcttttcttaggatgcctgctggatttcctgaagacagatgaagggagcagattgtcactcccaaggctgattgacatgtcggcgcaggttggtgaagtaccaggtgcagagaaagggcggcatgtgccacctgctgcccacaatggctgctcgtgccttaccaccccatcctctcagccagcaggagaagtcagggggtactgaaggccaccttcctctaggcagatatccccaaggtcacccactgcacttggacttgcaaaccctggccactgtgcctcctgccccacgcagctgtgagggagcccagggaatggagccttagacccgggctgctgtgttggaatgaggctattctgttccgaaggaagagagggcgaatgaatgtcatgggaaacacacagagttagcaagagttccattgaacccggcaggcaagtgtgttctgttgtgacctcatctcttccttagatggtgcccacaaacatctcctgtaggacttcccatcccaggggccctcagcctttgcacagccctggcgtcgaccccaggctgatgggcaggcctgagctacacacagatgccagggacatgacttctctgagccctggaggacagccccaccttctgccaccagggaattgcgagtgctggacctcctcggctacccaggactggtcctcagtgtccctcacgttcacatgcagaactttctggactccatggggtgaagagcagagtggagaggagggttttagccgagagctctagctggcaggaagcacatctggtggccctgttaaaactggaactctcagcagaaaagttttggtctgtggtcagcctgtgaggcacacacgtgcgtacacatacacacacacatacagctgccaccgagaggaaacgctcccacccaccgcccacatcagccctcccacctcgcccctcgcccagccttacccagtagcgccgctgcaggaactgatgccacaacgcctttttccgctgaggtgggcagacagccatctgggcaggctggttttggaaaatgagtgctggtaaccggcttcaaaccccagggcagtgataagcctgcccactgctgctgcttcctttccccttccttctctcaccctccgctgtctcctattcaatccccactacacccccttgggaaatctcgtgtgacccaggggcaaaggatgtgaaaagccatcggagtttaatacctggatgtagccacagaatcgggggtgaggagccagaaaatcagaacttcccagaagggcagcctctaaccacatgctgaccatgccaatggctctctaagcacacatgtacacacacacactctcacacacataaaaacacagactcacacacacacggacaaacacaaacacatacacagactcacacagacacgcaaactcacacacagacagacacacacacacacacagacacacagactcacacacacaaactcacacagacacacaaatacacagactcagactcaaacacaaactcacacaaacacatttacacaaactcacaaactcacacacacaaacacacacacaaacacgcaaacttacacacacatgagcagacacacacccggcccttctgggctcttcttttcttactccataggaagccatgcaaagtctcgccagacctttcttccaaggccagatctggccaaccccacaggaaccctgcaatcacaatccctcgggccccactttgcagccagatgccaccggttcccatgccccatgcctcgccacccctctacctcctctgcccaggaagccttgaacacttcccacctggcagaatccttatcatcatccatggctcaagcgtaatgtcatttctatgaaggtttccctggacaagaaactgccagagagcccttagctcaggtgttcccggaagcactgttcttgctcagcagatctgggcagcttcttcttgaaagcagatctgggccctactcaacattttttaaaatatatttctggtactgctcaataaatattagttatcagaacgagtactgttagatgctgcccagatatatttagtactcagttttatattccccacagtcccatactagtaaatgagtattgattgcatggtgtaccaaggggatggatggatgcatggatgggnnnnnnnnnnnnnnnnnnnnatggatgcatggatggatggatggatggatggatggatggatgcatgcatggatggatgaatggatggatggatgcatggatggatggatggatggatggatggatggatccatggatggatggatacatggaaggatgcatagatggatggatggatggatacatggatggatgcatggatgtgttgatggatggatgggtgggtggatggatggatgcatggatggatggatgcatggatagatggatggattcatagataaaccaacaaaatgcaagcataaggagaagtggaatcaattctagtgctggcttcttgaagtcgcatgtctgaagaggtaaatggggtctctgctttctgcctcagtttcttcgtccattgattgggtgaataaagccttagtttcctcagctaaaaggtgccaagtagcaccagctgctatccctggcccaggctggtgatcaggggaggagagacaagtctcttcttcttcacagcctctgtccacctggatctgccagtgctccctgggtgcccccacggggcaggcgctgggtgaggttcttggtcacaaatcaacctcgtctaatgcttgcctcaaccccctgccctggagaccacatccctcatgttccatgtcaggactgtggcccctcggggaggttaagcagcttgctagaggtcagcgacttcccgagggcctccagctccaggagctgtgcttccagccagccagtgagagctgcctgtccttgcctcctgctccccctccccctccttccttaccatttcttctcttctccctccctctccttttctcctgcctgtgttcttctatcttccatctctgcagacccttggacacagctgtgtggagcgagaacgaggagggggaggggcacaggtagcccctgtgtctctgatgcccacgttgctgcgttgctgttctgggcttctaggagaggagtttattcggctgaggagcaacacagtcacctttctactccatccaagaaacagctccttccccagcagcccacaggggctgtgcgggggacacagtgtgggctcggtcttggcgtggaggcccccaggctgtccttcaccatgtgcctgttccctcagattgctgaagggatggcatacattgagcgcatgaattccatccaccgcgacctgcgggcggccaacatcctggtgtctgaggccttgtgctgcaaaattgctgattttggcttggctcgaatcatcgacagtgaatacacggcccaagagggtaagcacagcccctaaccacaagggaaacctagggccttatctttcccagctcctcaaagccgcctttaacttctcccagcacagccctgagggaagacacctgagggctatacggtttctacagctctagatcagcatttccttcatttacccaaatgtgttcagcagaatggtagtgccctgagacctcccatggaggaacagctttaggataaggtaggtttggagaaacagcagtccaccctactccctgtcttggagattcccagtgcacatcaacatattaaaggcactgagaagtcctgcagcaaagaaacagtttatgtttgcctcacctagtgcctcccaaactaatttgagctccaaatactattttttttttttttgagatggagtctctgtcacccaggctggagtgcagtggcacaatcttggctcactgcaacctccgcctcctgggttcaagcaattcttctgcctcagcctcccaagtagttgggattacaggcgtgtgccactacacctggctaatttttgtatgtttagtagagatggggtttcaccatgttggccaggctggtctcgaactcctgaatttaggtgatctgcctgccttgacctcccaaagtgctgggatgacaggtgtaagccatgcccaaatactatttttatatagtccctattaaccttccatggaattaggctttcacagagcacactgtgggaaacacagctctcatgtgcgatcagcaaaccaacctgtattagggtgtccacggagcactgttttactctgtgcatataactgaggtggaaatctacgtcacaagagaatctgaaggggtcacatatatttatcaagctagcaagcagtgtctgctgagcctatgagtcagatgacaagcagacaggatatggcttgttctctcgggaacttcaggctggctggggagaccgagaaatggaggccaggggaggctgtgaagtgccaagccctgaggtctgctccaaatgctggccggggctgcagccattgaggtgcttcacagggcagccggatgtgagttcttcctcatagcggccctcggaggtacaagtgtcaccatttccattttgcaggaagggactaacggaggcgcccgcaggtttaaatggcttgcccaggccatgtcttttaaattaaacaaggcccctgtaaggtgaaacaggccccttccatcccaggtggaaacgtggtggctgcccattgaggccatcactctctttttaaagaaccaaagtgggtgactgtgtggtattggtgtccatatcgtctttctgtgctgctgatgccgtgtctgcactcacctggtcatgtgtcctggtgtgcggtagtggctcccccgccatgcctggccgccccgccctgtgaggccccgcagtgggggcttgatggaaggacagcaggagcaggggtaggggtgaggatggagggtaggggccaccggccgtggcctcccaaagcttgcatggcttttcccacaggggccaagttccccatcaagtggacagccccggaagccatccacttcggggtcttcaccatcaaagcagacgtgtggtcgtttggagtcctcctgatggaagttgtcacttatgggcgggtgccatacccaggtaggtggctcaccccgcagctcgcggctccctgctttcccggccggccctgatggcaggtcgcctgtgcttggtgcctgtggctgccctgttcttttcagagtgagtcccagagcgaagacggagacccaggcatggcatctggggtggagctctgccccctgcatcactattgctctgggccacagggctgtgtctccttcctccagcagaggtcaaatgagtccctcaaactgaaatcaagacaaagggcacatccgaactcaagtttactcccaatggcttgttctcagttgaggacaggttgtgcctaccttggctttgcacccatagtggattccccaaagccccttcctgtgtggccagaatcgtggacgacagcccccagccccagtcgaagggctccagccacttggcccccacaggtgggcaggctccgggtcacctgctgctgtgtgcacctggcagctgcccatgagtgatgggcttggctgtgcccctggtggtcacaggtaatcaagagagggagggtcccatcttcagaggacctgccccgtactcaggagaaaatctacagcctcatttctaggcattccccaggcaataaaaagtaaataaagggctgtttagagaccgggcagccaggcaacgcacgaggctggagaagtggtctgggactgtgggcactgctgtcccttgcccgggcccactgtgccccgcgggacgctcagggcccccaacccaccgaggaccccagcccctcatccccgcttgcggtctcctctgccgcagggatgagcaaccccgaggtcatccgcaacctggagcgcggctaccgcatgccgcgccccgacacctgcccgcccgagctgtaccgcggcgtcatcgccgagtgctggcgcagccggcccgaggagcggcccaccttcgagttcctgcagtcggtgctggaggacttctacacggccaccgagcggcagtacgagctgcagccctagccggccgcgcccgcctgcgccccgtgcccacctctgcgcggacgaccccgacttccgtgccatcccagacgggccgcgaaggcggggtgtcgcctgtgcccttttctcagacccggaatccagtgggcagaggcagcttcgcagggggtccccggacggactccttcaccgactgcacccccgggcgagttacgcggcctctctgtgccgcttcatttgtagagggctgtaacagtgacctcgcacggtcatccggagtactaagccccagtaaggtgttcaggactggtaagcgactgtcatcaagtaaggcccccgtgctgggcaccccccgtgctggccgcgtccccgcctctgcgccctgcgtggaccccgccctgccccgctacagaagccagactgggtcccgcggacgccagcaggggcaaccccagcctaggctgcgctccagcactgcggggcttttctgcaataaagtcacgagcgttcgagctgttccgtgtcgttacctgcgacaagctggacatcgcgtgcaggacgagcacggggcgcgggcgtggcgcagccagggagtcccgcgtggtctgggctcccggcggttgagcggggcccgcagggggcgctgtggcctcataaatccgtggctcgggcccgcgccgggagctctgggccgggaaaagccaggggctgacgctgtgggccggcgctttggggacggctaggacgcgagcccagctccagaggctccgagtccccaggccaggtgcataaacaaggatcgggtgacgatggggcgtaaaagcgaggaacgtcggcggctcccactgcatggaggctcttcacttggcatgtttttgttttgtttttaatagaccgatttttttttagcagttaggtttacagaaaaaaaaagtgggaattaagtagacagtctccatatctcgcccatttcccctattactaacatcgtgcaatggtggtgcatttgttatcactgatgagccaatactgataaaatatcattaaccgaagcccaccttttgcatccaggttctcgctgcctgttgtacatgccgtaggtgtagaggaaagtgcagagacttgtacctaccgttctgggtcccccacttgaaagccccctggctccacctgtgcacccgcttccttccccttgaacccttgccacccagcttgtcagtgttgactcctctgactgtgagaacaccccgaggtaggactatacccacccgcagtacagaggtggaaactgaggcagaaagtgctcacacacacccctcttaagcggtaggatgggggcgtaggtgggggaaactgcaggtctgggcagcagaggattagagtggggacttggtgggagaacccccagaaagggggcagtcgctgcaggggtgctgggtgaggacagccaccagccaggaaggatgcggttcacatagcgtgatcacctacagtgtgtggattctccagcagcctggggtgggtgcatcaccattactaccacgaagctgtttctgcagatgatgaaacggacagactccatgccaccaggctcctctcagccagttcttggccctcacagcccccactgaccgtgggcaagcactggatgggagcacagcactttaaggaggtctggggggggcagacctggggcctcgctgaggagcccagagggacaggtgtccccagctgctccaggatgctggaggtggaggaacctagaggtggaactctgtcccatacagtggggctccagaaattgtggggcctctgatctcccccaggacctggtcacaccagggtgctggaaggaggaaactgcctggccaagaacctggtgccaggggacgtggctggtggggggtaaacaggagcgtgggacaacaaggtcagtgggggctcctgctagtgggggccactgggactcatgaatgggagggccaagctgacctgctggggctcctgtggggtggggctgaggagggagctaagatcacgggatgaggaatgagcccttccttcacctcatgagcagggaccatatgccaggacaccacctccccggcccctgcagcccctctgaagtggctgccatgactcgggagctatcctcgagttgcaaggcttgagactgtctcctcacctccctggaccccactgtcattccctaaacatgagtcacccagtgctttgccaacgtcacctcaagtttttgttttaaaatgcaggctgggcgcggtggttcatgcctgtaatcccagcactttgggaggccaaggcgggtggatcacctgaggtcaggagtttgagaccatcctggccaacatggtgaaacccgtctctactaaaaatacaaaaattagctgggcgtggtggcaggtgcctgtaatcccagctactcgggaggctgaggcaggagaatcgcttgaacctgggaggcagaggttgcagtgagctaagatcgtgccattttactccagcctgggcgacaagcatgaaactcagtctcaaaaaacaaaagtaataataaataataaaataaaatgcaggccgaaagcctctccctctcccacggagattctgattcagtgggttgaagtctggatccggaaacgtcctcttttagaagcaccctgagtgattcctgtgcaagcatttccagcttggaccagcagttctcagccctggctactcactagggtcaccttgggtagaatggggttggagtggggggaggcacattaaaaagtgccagtgccagggttccgggtgagcatactttatccagggcctcagcatactttaaacatccccagctggtgctaatgtcgatcccggattgggaacccctgggcagggctgtgtgaggtcggaagtgctccatcccagcgggcctggctccaagtacctgggggccaggctgatgttcaggtcctgaaactccaggaccagcagatgcctgtggctttttccagctctggtatgcaagtggcaacctgcggaaattagaaaagaaacccagaagaccagcacattctcagaggcacgttctcaggcaaggacacccacctctcctccggcttggttttcctgggaaagatgaggctggagatcttgaaggatgagggagagtttctccacgaggggtcgcacttgcccgaatggtgcccggagctgaacctgtatcctggtgtgttcttgttcgggacataaatatgtctattaaggatgaggagctcagtcaattctcagccagaaagtgaaatgtgagagtgtgggggggaagagagatggagagaggaggcagagagcgcatgaatggacgaaagcctcatttcctgctctagggctttgccttccttgtgggagggagggtatttcatggcctggagtcggccttctcccaaccataaaactgcacatatgaggacattgccggggggcccatgcctgagccatccgggtcatatgattgttgtcccgacacccagagctctggtgaagggggcagcccaggtctgggaaccccagacctctccttgcctgtgaaggagctggtgcctttccctttgcctccattcctccattccagagccaggacacaccctcagcgttgctgtgaagtgagcaacagcagggtctctgagtcagacagacctttcaaaatcaggcacttcctctccccggatgtttgacctcggagactttgcttcatttctctgagcctcggtttcctcatctgtgcaatgggcacaatgctgacacctgcattgtaggcttgctgcgaggtttgcacaaagcagctcacaggaagcatttaccagagtgcctgtcttatgctaaatgctcagaaatgttagctctcattagggctataataacccccaaagaagggcctccagagaccccgatcccagctaagcccccttagccgggcttccctggcctctgccatacctcccctgcctcgggcttctagctctgcggttcagagctttgttctctctttgctgctgtgatctgttttgtctacagtagtggccccttatctaaggtttcagttaccagcggtcaactgcggtcccaaaatattacatgcaataagatattttgagaaagagagagagagggaggccacattcacagaacttttattctagtatattgttataattttctattttattcttagttattgttgttaatctcttactgtgcctaattcataaattaaactgcatcatagagatgtgtgtataggaaaaacagtgtatacaaggttcggtactatctgcagttcagagcatctagatagtttgggggtcttggaatgtattccctgtggataagggggactcctgtactttcacgctcttcccaccctcggggcagaacttccaaaagagcacacggggtcagaagccaaggacctaggcagcctggcactctccggctgtgtgactttgagtgagtgactccattcttctgaaccctgatttccttgtctataaacagagggcagtgaggcctccttgcagggttgctttaaggatttaaggagtattttggaaatggaatagtgtattcgtttcctaggactactggaacaaataccacaggcgagtggctgaaaacttaaaagttgattgcctcacagttctggaggctggaagcctcagatcaagctgcgtgcagggtcggtttctcctgaggtctctctcctgggctcatagatggccaccttctccctgtgtcctcatgtggtcgtccctctgtgtgtgtctatgtcctcgttgcctcttcaagaataccagttatattggactagggcccacccatacgacctcactttactcatcgatttttaaaaagcctatctccaaataccatcacattctgaggcagttgggttagggtttcaatataggaatgtggagaagaggagatacagttcagcccttgaaccataacacataagcatatgtgttatttctgcttttgtttctttcactctacctgccatgtggtaggtatccatgtattcttgtgactcattgattagtttcaaaatcaagaatatttggtgtgaataaatgtgccatctacaaataagaaagacccaaaggtaagctggaacaccagtagagcagtcttaagcaaattcacgtatgaaaatccggatttcctccaaagataaaaccgcctttaatgaaatattttataaaagtttccaccacttattccattagatactaaaaaaccaggactcgagtttccccaggactcatgatgtcgtttgttttttttttttttaaggtagtaaaatacatacacataacataaaatttgcaagcataggcatttgctgagtgttccatgcagtggtacattcacactgctgtgtaggtgccacaccatcatctccaggactttctcatcttcccaaactgaaactctgtctccattaaatgctaacgccccattccttcccgcccccagcctggcaacccacactctactttctgtctgtaagaatttgattctctagggacctcaagaatcgtgcagtatttgtccttttgtgactgggtcattgctcttagcatagtgtcttcaaggttcatctatgttgtaacatgtcagagtttcctgcctttttaaggctgaataagactcccctttatggatacatcacgtttggcgtatccattcgtcagtcgatggacacttgggtcgttttcaccttttggctgttgggaataatgctgctgtgagcctggtgtgcaaatgtctccatgaacctgctggaccagatggcaactttaggttgaatgttttgaggagccgcacgctgcttttcccatcggctgcgccattccgcattcccatcagctgttcacagcttccagtttctctgcctcctctgttattctctgttgcttgaaatagttgccatcctagtgggtgtgaggcttgtggtattgttttaagagcaataactgcatgtttttaactttggtccccatggcacctcagccctctttgaaatgcccccacgcgttttaggggttcagggatgttcgcttcagggcctggctgggaggagcccgctcacgctgggggcaggagtccttccctctggaagagcccctggctctgttcttgggaaagaacctttttctttcttcccctgggcaggtctgccctgtgctgcctcagggtcaaggggcagttggtcgatatcctcaccagacatctccaggcgggtctgcatcctggtgggcacgtgctcagacccccaccccaaaatgttcacaaagactgcctggacacacagcatctcaggcaaagcaggcaagaaccatgcctagctccaggcactcagtctcaggtggcaaggacagagagcagaaggcagcgccactacgacccacgggcagatcagggaaagcagaagcaccgggcccctgacctgggctgtgggcactctccacaacatcgctgggattgcagagtcacccgacttaaaggttgaaacttcataccattcttagaatctttagacagctaaagagaccttcatactcagtcaccgtgtatcgagtgtaaagtgctgatgactcgagcaatcccaagaggtaggtgtctgatccttattttacagaggaggaagctagggcccagagagggtaagtaactggcccaaagccacacagctgataaatggcagagcagggacccactgctcgcagcctttcttccagaatggcatagccaccgcactccacattttacaaaggggtttcccgtgccttgcctcgggggctcctcacagcagcctcttgaaggtgtggcatcttcattctgttcagtctggacagaagaaaggcagagatgctgagcctgtcacccacatcacatccctagaaatgatggggggcagtccttgaatcctgagctcagctccatggccagcacttgaggggccccaaaggatagtgagattaaacgtgctcttgagcacttgaggaacaaggcagacataacccatggggcctgtccagtggccctcagggggcaaaccttttaataaggttaagcaaactgctgagaggatgacaggaaggttcgtgaaagcctggtggaaaagattccaggaagagaaacatctggtgcggatggggccaccaggcttaatggatccgcattctcattgcagtatggcagcccctggaggggtgaattggccagtccccgtgcaggaggccaggtgctctactgatgattcagagagaggcagctccacctgacatcagtcggagaccaaaaaaatagccctgggcgagtattcaggagagcacagggagatgttaaaatttgtgggtgcacacagaaaatttccaactggcaccgtggggacttcgtggcctctcaggctttcacttgaccctgcggagatagcagagccccactcccagggagctctgccatgcaccctgtttgacggaagcaaaggcctccccacgctcacagacacagatgctgatgtcagctcccctgccggtcacaccaccgagctgtgtgatgtgctggggactatgctcacacggcaggtgcatggtcccattaagccagcacgaccgcccttaggagtagatcgttactggtcccattttgtagatgaaaaaatggaggatccaaaaattgaggccatctgccaagcccacgcagctgggacacaagcccaggtcagcctggcctcctgccaggcctcagcagagccgcctccagccagagcttctcgggaggggcggggaacaaggctctgaggctgcaggtcacacagtgagcaagagccagagctggagctggccccaggcgccgccaggcttgtgccccgcccacacccctctggcctggcctccttgccagttgcaggtcatgtcgtagaagagcaggctttggaggagtcaggcagggcttacttcacctcttggttctgcctgctatcagttatgggattcttggcaaattttgtaacctctctaagcctcagtttcattacctttaaaatggacataagcatacctgtctcaaagggaagctggggatgaactaagataatgtacgcaaagctttggccacaatggggtgcacacagcaggatgtcaatatatgcacactccctttccccatacacccttgacagcagaggcccaggccagacagcaccttccctgggggcacctaggagcctggtctgccagtcccctggtctcccttcccagtctggtcccatcctcctccatttccaatcagcagcttggcccctgggccaccaggcccctgtgggctgcagaggctgacaggggctgatgggagccagccccaggggggttgaaggctgattactgaggactgatgaggtgaagagggactgctgcctagagctgacagccttgcctgggaggaaggacaggcaggagggcaaggagaacactccagtctcagcctgacatctctggaagggctaggggtccatctaggggcatctctgttggtgccttcttttctgtgccaaggtcactccactgctcttggttaaaattagcctcctgctcactgctctggactgagtggcctttcctcatgaccagtaggacctggtcttgcacaggcagggctgggctacatgccctcggctctccaaagagcagatacagtacatgcccggcgccttggaggctggagcagggtggggtgtgtgcatgcacatgtgtacctgtgcccgtggtgggtgtgcctacaagtctaactaaccaaaccagggtgtctaggaaggtgacagttgtggaattgtgcaagcatttcatcagcagcatcattcctaggttgtgttatttcttgcttatctccaaggctcccatgtaatggctgatggcctcagcttactcatttctagccccaagcattaaacacttggcccaactccacccacacatcacccctgagattaagaaagtgctctcaaaggatatttgtcaaatacgcaaaggaatggggacaagtcactatcttattctttgtccatatcccatacctggtaacatcttaatccaaaactacacactcagtcagggctcaggcaaggatgatttgagctgggagaaaagccagctgaggttgaaaggaagagaagcacagtggtcaaggctctggggccagttggatgtgggctcaagtcctgcccagccacatggccttctgcaagcagtcacctccctaagcctgtttcctcacttgtcaagcacatttgctaagcagcagccttgcccagagtggacgagacggtgcctctccagtgctcagcagaatgcctggcacagttaggtatacaacagaaggaagttgttagtatttttactggatgtcagcgaaaaaaaaaaatgtggattaaacccttagaaacagaggatagcattgttgctaatcctgcagagggaaacctgacgaaggacgttgtgaacaaagttaaagcaagtgtcaggcaggaagataatatttgcagtgcctgtataacgaaggattactgcaaagaaaactgaagaagttcttcctgttcctaaacaacccaaagacaaatgagccaacgataagaatgggcactgcacagaaagaggattagaacagctaataaataaagcaaacagtgcccagccacaccagtccatggaaaaatgcagttgaaatagtagtgccagatacttttaccatcaggtggcaaaatggcaatactgcttatatccaataatactggtaaagatatggaaaactgttgctctcataaagtttaatggccgtgtaatttgataaagccttttggggaagcatttttggcatccaaaatgttgacgcatacacacactgatgaagctactgcatttgtagaaaactatcctacggtaagatatgcccttattcccaaagataaacatacgatattctttactgcaacttgtttgtaattacaatgggaacaacttaatggtacaagagggtagctgaaagaagtggggcacaattttttttccttgtttaattgtccgaagggccagctagaagggcataattattttattaactactattctgccattaaaatgaatgggcatgccagggatggtggctcatgcctataatcccagcactttgagaggccaaggcaggagggtctcttgaagccaggagtttgaggccatcccctggaaaacatagcaagaccctgtctctgcagaaaatattaaaaaaaaaaaaaaaaaacttaaaaaaatgaatgggcacatccataggttctgattttgacacatggccaagactatcaagtgaggggaaagggtgcagaaaaacacatacatgcagcatgatgtacacacacacacacacacacacaattttatgttcatcacacac

SEQ ID NO: 493 - DNA, 2231 bp, Homo sapiens
gggaggctctgatcgcagaccgggggtgctgccacctctgtctgctgccggcagaaagccacaagccatgaaaactgattgagatgagaagaattcatctgggactggcttttgctttaggatggtgttggaagttgctcgttgtcgctaggagcctgctccactgtaagggtgtcgggatctgaagagctatggtgaaacaccactgaagcattgccaaggatggggctggtaagtagcaaaaagccggacaaggaaaagccgatcaaagagaaggacaagggccaatggagccccctgaaggtcagcgcccaagacaaggacgccccgccactgccgcccctggttgtcttcaaccaccttactcctccaccgcccgatgaacacctggatgaagacaagcatttcgtggtggctctgtatgactacaccgctatgaatgatcgggacctgcagatgctgaagggggagaagctacaggtcctgaagggaactggagactggtggctggccaggtcactcgtcacaggaagagaaggctatgtgcccagtaactttgtggcccgagtggagagcctggaaatggaaaggtggttctttagatcacagggtcggaaggaggctgagaggcagcttcttgctccaatcaacaaggccggctcctttcttatcagagagagtgaaaccaacaaaggtgccttctccctgtctgtgaaggatgtcaccacccagggggagctgatcaagcactataagatccgctgcctggatgaagggggctactacatctccccccggatcaccttcccctcgctccaggccctggtgcagcactattctaagaagggggatggtctatgccagaggctgaccctgccctgtgtgcgcccggccccgcagaatccctgggcccaggatgaatgggagatcccccggcagtctctcaggctggtcaggaaactcgggtctggacaattcggcgaagtctggatgggttactacaaaaacaacatgaaggtggccattaagacgctgaaggagggaaccatgtctccagaagccttcctgggtgaggccaacgtgatgaaggctctgcagcacgagcggctggtccgactctacgcagtggtcaccaaggagcccatctacattgtcaccgagtacatggccagaggatgcctgctggatttcctgaagacagatgaagggagcagattgtcactcccaaggctgattgacatgtcggcgcagattgctgaagggatggcatacattgagcgcatgaattccatccaccgcgacctgcgggcggccaacatcctggtgtctgaggccttgtgctgcaaaattgctgattttggcttggctcgaatcatcgacagtgaatacacggcccaagagggggccaagttccccatcaagtggacagccccggaagccatccacttcggggtcttcaccatcaaagcagacgtgtggtcgtttggagtcctcctgatggaagttgtcacttatgggcgggtgccatacccagggatgagcaaccccgaggtcatccgcaacctggagcgcggctaccgcatgccgcgccccgacacctgcccgcccgagctgtaccgcggcgtcatcgccgagtgctggcgcagccggcccgaggagcggcccaccttcgagttcctgcagtcggtgctggaggacttctacacggccaccgagcggcagtacgagctgcagccctagccggccgcgcccgcctgcgccccgtgcccacctctgcgcggacgaccccgacttccgtgccatcccagacgggccgcgaaggcggggtgtcgcctgtgcccttttctcagacccggaatccagtgggcagaggcagcttcgcagggggtccccggacggactccttcaccgactgcacccccgggcgagttacgcggcctctctgtgccgcttcatttgtagagggctgtaacagtgacctcgcacggtcatccggagtactaagccccagtaaggtgttcaggactggtaagcgactgtcatcaagtaaggcccccgtgctgggcaccccccgtgctggccgcgtccccgcctctgcgccctgcgtggaccccgccctgccccgctacagaagccagactgggtcccgcggacgccagcaggggcaaccccagcctaggctgcgctccagcactgcggggcttttctgcaataaagtcacgagcgttcga

SEQ ID NO: 494 - protein, 501 aa, Homo sapiens
MGLVSSKKPDKEKPIKEKDKGQWSPLKVSAQDKDAPPLPPLVVFNHLTPPPPDEHLDEDKHFVVYDYTAMNDRDLQMLKGEKLQVLKGTGDWWLARSLVTGREGYVPSNFVARVESLEMERWFFRSQGRKEAERQLLAPINKAGSFLIRESETNKGAFSLSVKDVTTQGELIKHYKIRCLDEGGYYISPRITFPSLQALVQHYSKKGDGLCQRLTLPCVRPAPQNPWAQDEWEIPRQSLRLVRKLGSGQFGEVWMGYYKNNMKVAIKTLKEGTMSPEAFLGEANVMKALQHERLVRLYAVVTKEPIYIVTEYMRCLLDFLKTDEGSRLSLPRLIDMSAQIAEGMAYIERMNSIHRDLRAANILVSEALCCKIADFGLARIIDSEYTAQEGAKFPIKWTAPEAIHFGVFTIKADVWSFGVLLMEVVTYGRVPYPGMSNPEVIRNLERGYRMPRPDTCPPELYRGVIAECWRSRPEERPTFEFLQSVLEDFYTATERQYELQP

SEQ ID NO: 495 - DNA, 2613 bp, Homo sapiens
ccagccgtgctgttaaaccaaaaccccaggagaaaactttctggtgacagaagggcattgtgacccacgttgcccagggccagggacagggcagctgctcatggtccttcctcacgagttttcctggagcagagggatacccccaaacccagggagcccacaggagcttcagaagggctcggctggagggcggggcccctgttgcacttgctcactggggactggggaggctctgatcgcagaccgggggtgctgccacctctgtctgctgccggcagaaagccacaagccatgaaaactgattgagatgagaagaattcatctgggactggcttttgctttaggatggtgttggaagttgctcgttgtcgctaggagcctgctccactgtaagggtgtcgggatctgaagagctatggtgaaacaccactgaagcattgccaagatgtcatcgggaccccagctcggtttccagcatcagctgatgccagcaagaagccagccaggcctggggcttggcagcccagggactttaccatccaccatccacagggctgttgccctggacaggtcattgatatctgactcacagccaattcatggaatggggctggtaagtagcaaaaagccggacaaggaaaagccgatcaaagagaaggacaagggccaatggagccccctgaaggtcagcgcccaagacaaggacgccccgccactgccgcccctggttgtcttcaaccaccttactcctccaccgcccgatgaacacctggatgaagacaagcatttcgtggtggctctgtatgactacaccgctatgaatgatcgggacctgcagatgctgaagggggagaagctacaggtcctgaagggaactggagactggtggctggccaggtcactcgtcacaggaagagaaggctatgtgcccagtaactttgtggcccgagtggagagcctggaaatggaaaggtggttctttagatcacagggtcggaaggaggctgagaggcagcttcttgctccaatcaacaaggccggctcctttcttatcagagagagtgaaaccaacaaaggtgccttctccctgtctgtgaaggatgtcaccacccagggggagctgatcaagcactataagatccgctgcctggatgaagggggctactacatctccccccggatcaccttcccctcgctccaggccctggtgcagcactattctaagaagggggatggtctatgccagaggctgaccctgccctgtgtgcgcccggccccgcagaatccctgggcccaggatgaatgggagatcccccggcagtctctcaggctggtcaggaaactcgggtctggacaattcggcgaagtctggatgggttactacaaaaacaacatgaaggtggccattaagacgctgaaggagggaaccatgtctccagaagccttcctgggtgaggccaacgtgatgaaggctctgcagcacgagcggctggtccgactctacgcagtggtcaccaaggagcccatctacattgtcaccgagtacatggccagaggatgcctgctggatttcctgaagacagatgaagggagcagattgtcactcccaaggctgattgacatgtcggcgcagattgctgaagggatggcatacattgagcgcatgaattccatccaccgcgacctgcgggcggccaacatcctggtgtctgaggccttgtgctgcaaaattgctgattttggcttggctcgaatcatcgacagtgaatacacggcccaagagggggccaagttccccatcaagtggacagccccggaagccatccacttcggggtcttcaccatcaaagcagacgtgtggtcgtttggagtcctcctgatggaagttgtcacttatgggcgggtgccatacccagggatgagcaaccccgaggtcatccgcaacctggagcgcggctaccgcatgccgcgccccgacacctgcccgcccgagctgtaccgcggcgtcatcgccgagtgctggcgcagccggcccgaggagcggcccaccttcgagttcctgcagtcggtgctggaggacttctacacggccaccgagcggcagtacgagctgcagccctagccggccgcgcccgcctgcgccccgtgcccacctctgcgcggacgaccccgacttccgtgccatcccagacgggccgcgaaggcggggtgtcgcctgtgcccttttctcagacccggaatccagtgggcagaggcagcttcgcagggggtccccggacggactccttcaccgactgcacccccgggcgagttacgcggcctctctgtgccgcttcatttgtagagggctgtaacagtgacctcgcacggtcatccggagtactaagccccagtaaggtgttcaggactggtaagcgactgtcatcaagtaaggcccccgtgctgggcaccccccgtgctggccgcgtccccgcctctgcgccctgcgtggaccccgccctgccccgctacagaagccagactgggtcccgcggacgccagcaggggcaaccccagcctaggctgcgctccagcactgcggggcttttctgcaataaagtcacgagcgttcga

SEQ ID NO: 496 - protein, 552 aa, Homo sapiens
MSSGPQLGFQHQLMPARSQPGLGLGSPGTLPSTIHRAVDRSLISDSQPIHGMGLVSSKKPDKEKPIKEKDKGQWSPLKVSAQDKDAPPLPPLVVFNHLTPPPPDEHLDEDKHFVVYDYTAMNDRDLQMLKGEKLQVLKGTGDWWLARSLVTGREGYVPSNFVARVESLEMERWFFRSQGRKEAERQLLAPINKAGSFLIRESETNKGAFSLSVKDVTTQGELIKHYKIRCLDEGGYYISPRITFPSLQALVQHYSKKGDGLCQRLTLPCVRPAPQNPWAQDEWEIPRQSLRLVRKLGSGQFGEVWMGYYKNNMKVAIKTLKEGTMSPEAFLGEANVMKALQHERLVRLYAVVTKEPIYIVTEYMRCLLDFLKTDEGSRLSLPRLIDMSAQIAEGMAYIERMNSIHRDLRAANILVSEALCCKIADFGLARIIDSEYTAQEGAKFPIKWTAPEAIHFGVFTIKADVWSFGVLLMEVVTYGRVPYPGMSNPEVIRNLERGYRMPRPDTCPPELYRGVIAECWRSRPEERPTFEFLQSVLEDFYTATERQYELQP

SEQ ID NO: 497 - DNA, 174600 bp, Mus musculus
  misc_feature (1)...(174600): n = A,T,C or G
actacacattttaacagggtgtggtggtacctccctcccttcaatcctggtattagggagtcagaggcaggcagatctttgtgagttcaagatcagcttggtccacattaagaattccagttctagggagggagagagagagagagagagagagagagagagaggagaggagaggagaggagaggagaggannnnnnnnnnnnnnnnnnnnttctgggattataggtgtgcatcaccacacccaactttaaatttccttgtaaaaagttttagtcaagcattgtggtgcacaccttttagcacagtgctcaggaggtagaggagtagaggcaggtgtctctgtgagttcaaggccagcctggtctacatactaagttacagaacagaaagagattctctctaatatatatgtgtgtgtgtgtgtttgtatataatagaagaggagaggagaggagaggaggattgcctcctaatgtcaggtttttcttctctgatgtcattacagatgatgaagtaaaatagttaactcaaaaccttctcaatctgtcctggctgccctgtttttactttgtttggagatagagcctcgtgcatcccaggctatcctctgagccactgtggagccaaggatagtcttgagcctctgatccctttgcccccatctcgccaacactgaaattacagccacagcacctgctttttctgtgtttattattgctgttgatactattttttattggagtatgtgtctgccattgtgctgtatgtgttctggagcctgtgaggaccaggaaaggatctactgaagcccaccacttgttaggttcctaaagtcatgttattaatgtgtgtgaaccctcattcaagcaggctcatgtatgtcacaactttaggggttggttctcggctcccacggcgcacagaactcagatcacctcaggcttggaagagaagcaatgtaatctgctgagccatagccctctctgtgctgcgttaatcagaccaccacaattcattcactcagtgtttatccgcattgctgagtgctcttcatggaatgttcctgaagaagggaagcccccatccctgctaggaagtcctgagtctaacaggaggcaataagactgtgtagactggcagaggaaaggctccctagggagagtggagcttgaatccaagcagccaaagttagcatgtaggataatagagacagtgccaagtaagaagagaggacaaatgtgcttgggagatgccaggaagtaccaccaaccataacttgggtgaaaccaaagccacagagtcagcatggagggagacctttgctgaaacccaatgtgggtttgttttgttttgttttgttttgttttgttttgaatctcttctgatttggtgcaggctgttgtctctctccatgtctccacgtctccccaccttctccagccagcccaccaccttcacctttctggttcagaggctgaacttcttcctttatcaacatttgtccccagcgtagacaaaagtcccttctttggtttagaagaatcagtcacataaacacaaatttatgaacagttagcaggtatggtagttcatgcctgtcatttcagtacctgggaggcagaggcaggaggattgcttagaggttcacttgtgtatgtgtatctatagcaacctggtgtggtggctgacacgtgtaaggccagtgcgctcagaaggtggaggcagggggattaaaggctacacagtgaaactacctcaaacattaatgacaacacaaagtgaaggcgaaaacaaaacaaagcattccccacccccacccctcaccccactgcccacctcccaaaagaaatgcttacaaaatacggagaaccacaaagtagtttataagggaccccttgctctttggggcttgtaaaccctggctcattctaagtgagatccccaaaaaagaggtcattgctgggatccaccctgcctagcccatctcaggagaggttcaagacccaggagggtcttttgaactctcaatcctttcaagtagaagccaattctactcagtggcctaaccccacagcacggtgactttatcatttcaggaaagacaaagctggataatccccaagggacacctaaaggcccatgctttctgctgaaggccgccactgtgggagcaattatgtcaaagctttaaagcagacactaaaggccgggaaagatggtggagggccaggagggaggctcagcttcctggggaccttggttctgacccctagaaactcagtgttctctggtacagatggtctctcttctcttcctgctttctcttagctctccttctgaggctcagtgttctccattctcgtgagagcaggcctaagagcctcggctttctctgcctccaatgttgtttcccaagccccgcccatctaaacctccagttctagggcagtgttcttttttttttttttttaaatttgtttgatttcgttgattggtttgtttttgttttgtctgtttgtttgtcttgggtttttggagacagtgtttctcggtgtagtcttggctgtccttgaacttgctcttcacaccagactggtcttgaactcagaaatctgccagcctctacgtcccaagtgctgggattaaaggcacatgccaccactgcccggtgtggacagtgttttttcttttttttttaagatttatttatttattatatgtaagtacactgtagctatattcaggaaccccagaagagggtgtcagatctcattacagatggttgtgagccaccatgtggtggctgggatttgaactcaggacctctggaagagcagccagggctcttaaccactgagccatctctccagcccgttttttctttttaaaaaagatttatttttaagccgggcgtggtggcgcacacctttgatcccagcactcgggaggagagcaggcggatttctgagtttgaggccagcctggtctacaaagtgagttccaggacagccagggctacacagagaaaccctgtctcgaaaaccccccccaaaaaaaaagaaagaaagaaaaagaaaaagaaactcctgtgtgctactagatatgcacatatgtagatacataagtaaattttaaattaaaagtactttccccctgtgctggtcactgaacttagggccttatatttgaaaggcaagcactcaaccactgtactaaatccaaaacccattcactatctttgttttgttttgagtctcccatgattcaggatgtccccaactgactctgtgatcaaggacaacactgaacatctggttctgcctccagttcccaagtgctgagaactcagctgcgttccaccacacctgggtgctggctttgagacttgggaacaagcagaagaaacttactcaaagtcctgccattttgttttcagactccagctaaccatagggagaaactaagttcaagatctcaggccctaggggacctggggacttccctgtagctgaacagcttctgctgtcaacagctgtctgagtccagacatctgagggacaacttgtaaggagacagttgtccgagttcagacatttcaaggacagcttccaagccttctggcagggtcaaactaagttcatgttccccgggcccaggaacccactacctaacctgannnnnnnnnnnnnnnnnnnnnnaagtatgtgtgtgttgtgtgtattctcgagagcgtgtgtatctgtaagggggcccacagaggactgaagattccctgaagctaaagttacagaaggttgtgagctgcccttcttggatcctaagaactgaacctgggatttctggaaaatcaggaatataaagtgttttttgtttgtttgtttgtttgttttttggtttttcgagacagggtttctctgtgtagccctggctgtcctggaactcactctgtagactaggctggcctcaaactcagaaatccacctgcctctgcctcccgagtgctgggatcaaaggtgtgcgccaccacgcccggctttttctttttcttttctttttttagtactattgtattttatgtgtatgttttgtctacatgtatgctgtgcctgatgggtgcctgttgcctgtggagaccagatgagggcatcgtatcccctaaactatttacagatggttatgaaccattatgtgggtgctgtgaattgagcccaggtcctcaaggtttaggaattaacaaatttaaaaagttgtttttttttttttttttttttttttttgctatggttaacataacccagtcttggcttgaatctcctatgtagccaagggtgaccttaaacctcagctcttcctgcctccaccttctgagtgctgggattacagacgtgtgctattatataaactcagtttagccaggcgtggtggcgcacgcctttaatcccagcactcgggaggcagaggcaggtggatttctgagttcaaggccagcctggtctacaaagtgagttccaggacagccagggctatacaagagaaaccttgtctcgaaaaaacattaaaaaaaaaaaaaaaaaaaagctcagtttattgggtgctggtaaatgaacccagggctttgtgcatggtaggtgagcattctgacaactgggccacacccctaccctccaattttgaatttctgatcctccagtcaccatctcaaaaatgctgggactagagacatgagccacttcatcagcttatgatgctccaggagaatcaaacccaggacctcaccaaggctaggtaagcactctcctaactgagccatatccccagctaccttctcccctcttaaaatgtgtattctggacacattacataagatgagcctaggctagggctggtttgttgactaggataataagatgattaagactaggggacagagagagtgatatcatagaaaccaagggaacccagaacttccagagggaagagtcaacaccaggtacgacagacgagtcaagaaaaataaggaccaaaggctacctcattagattcgtaatgagaaggtcaattgtacatgctaccatgacggctttattggagggttgaagacaggtgaaagcatgattaaattaatagctggttggctaatgacaggcgagggagggaagacactgtagattattatttgggtagctcggttgtgcaggactcagggagacaagtaaccagatgcagactcagggctgaaggcaatggccctttgattttcagtcaagaattattctttggtcacaggactgggagaaatcaaattggtgctgactggaagctccttctccctgatagccagctctcaaaatgttggaaggcactatgtaagctgctggagggtactgggcggttaccgacagtcctacccaggtgtaagtactgtggattcccacagctgttggctgggcaatggtggcactaatatcgtgaaggtaaccgagagctgtgagattggactgaaggtccaccctgtatgggggaactcggatctcatgcctcaaaactagccaagaactggggagctcatagaccctaggggagaacctatgactactattttgctaaagggatataaatataaaccatcttctaactatttctccttacacccatagataagtacacaccttgactctcatcaaaaagcttctttttgcggcacacagaggctactccagaaaaccacaacttaccaaagcatagaaagcacccatctgcaaatgggacacgacatctatacccaagggtttcaggagagggggtgaatacaggaagagccagaggaccgggaggactgtcgtaagatagtatatctgtacatgaactatcagcagtatggttacctgcatgtgaccacatgtggagcaggaagctaattgcttatatcttgaactgcaagcatgaagcagagtgagagagaaaaaaaactggaaaaggacgtgagttttaaagcctgtctccagtgacacacttcctccaacaagaccacatcaccaaaacctccccaaacagcaccaccaactggacaccaaatattcaaatatatgagcccacaggggacattttcatataagccaccacatttgtccaaaaggtcaactcaacacccacgtatacacagacaaccttacagcataaatacatacacacacacacacacacacacacacacacacacacacgggaaggggtggatatgacataaatatattgtagttatgtatgaaattctaaaagttgaacaattacattgtcattgtttgttcttgctttgccttgtgagatctgaagctgttagaagggctgtccagatggaggggctgttgaatgggctgcacaggggccagctagcagaacctcactgccatggagtggggtgaaagagaatctgaaggctgccacagacctgtgccagtggagtacggaactgtgactgcagacagacaaatagtaccgtaggcacagtcagcgccaggaattttcatggcagagttgtgattctttctcacaggagcttactatgtagaccaggctagcctcgatctcattgagctttgattcttgaaagaatgaaggaacaggtggtgaggggaaatggctcttcaggttgaatgttgatgaattaaagaagaaaaaatgtaagccaggtggtgcacatctactcccagccctcgggaggcagaggcaggtgtatctctgagtttgaggccagcctggtctacagatcgagttccaggacatctagggtgacacacagaatccctatctcaggggtggggggagtggaatgcaaaacagagctgtttgtgttttctggggatcgaacaatttgtatgcagactttgtttctgcttcgagaggttgcagaatacagcgggtggttgctgacagcatggcttcacctgaatatgttactctgctttacatcctcagtgtagaggcaataacattaactgctccatccagtctgtgtgagaattaaacaggctcagagatgtaaagggcttagggtagcggctggcatgaagtaggtattcggttagtaccatcaggtcaaagatgaccatgaagaaacagactgggagcatagtgaggcagccctttaatcctagcagttgggagcagctgggagatgggttgctgttagtataaggtcagcctggtcgacatagtgagttctaggacagccagagcttcatagtgagaccctgtctcaaaagcaaaacaaacaaacccctcaaaagaaagaaataaacagaaggagtaaggaaagtccctcagcatcagaaactgccacatgaatggaacaaatagaaaacaagaagtcagtctcagattagatagatctgcaaaatctagggggtaaaatgagtctctcctagccgcagttaactgataatatctcacatctattttcaacctctacagaacacctaccccatccaaggttgtccatttacaaaacaaaagcacagagtgctttttctctcttctcttcccattcccctccaaggtgactaggcagaaaccagggctttccctcctcttggcaacccactgcaccccccgccccccagcacgctaacttgaacagctccagtttcggtttatctggctgtggagcccctggggctctccaggctgcaggttgtaacctgcagctagctgtctttcctctctcacctgtcgctgggtggtgacttacaggccttaagaatcttctgcatcttcaaggaggatcaagagaccttgagtccaaagggagactaaccacaattcctcagggcctttgtcctgaatttccatgtaaataaaatttcctgttgaaacttcttaaccttcttttttcttatctcactgccccagtttaaaaagctagagtggggctgggcattgaagctcacatctgtagtcccagtagttgggaggctgaggtaggagcttggagcctagactcgtctcaatttatggcaatcttcctgcttcggtttgctgagtgctgggattatagtatgtccagtgctattcccgtttgatttagtgttactaacatatagtaagggtcattaatgcaccccaaatctgacttttgtgttggctaaacagaacatgtttgtaggatagacttggtgcacaaaccaccaaccagcagtctctgtgaggctgataaacagtatttacactttggtttcattgactcacacgataaatgtcactgcaggttgggtgacacagggtctccactttacacattaaaaaagatgaaatttgagtggccaaataagttgaccgtgaccacaggttggcaaatgagtgggatttgagttaagtttgtttccataacccaaggttatgactcagaggatgcagaggctgtggtcaaggttgaatgcatccatttatcctgaaggataagtcagtaaagaaacaagagggggacaaggcagtcagagaaaatcatcaaaatcaaggatcaaacccagaggtcttaaaaaggagaggaagaggttttcagatgaagggtcagttcttggacaccgtagtctcaatacagattgctagagtttaagagtcctgcagaatctaggtgaggcgaggtgcaaacctttagctccagcacttagaaggcagaagcagatggatctctgaagtggagaccagtctgtctactgagtgagtttacagaccagctagggctagatacagaggcaggcgagagaggcctcaggtctgttattccagctacttgagagggtgagacaggaagattgcaagtaaaaagctaatttgagcaactcatgtggacctctatcaaaacccaaagcacaggggctggagagctggctcactgggctctattctctgcccctatgtggtggctcgcaactctctgtaattctaggtccaggggatcggatgccctcttctgaattcagcacaggcatacagatatacattcaggcaaacatccataaacataaaaaaagaagagaaaaagaagtaaaaaaacaaaacaaaacaaaccccaaaaaccccacccatccaatgaaaaactataacaaaactccaaacacggccattgagatggttcagtgggtaaatgttctggcttgctagccagataactgaattccatccctaggacccacagggtagatagaaggagagaactgactcttgaaagttgtcttttgacacatgctcccacatgtgtacacacacacacacatccaataaataaataaataaataaataaataaataacaagtacattacacagaaggggaaaggcccagcaccaacaaggcagtgtatgtattttcccagctcactagcccattcctattcttagaagtgccttttctttctttcttttttctttttttgagacagggtttctctttatattcctggctatactggatctcatgctatagaccagactggcctcaaactcaacagcgatcagcctatttttgcttcccaagtgctggggttaaaggcctgtgacaccatggccagttggctttctctttcttaataaactatctctacttttattatctcaaaaaataataaaaggaaggctgggaatataactcaaggatagagcgcttgcctaccattcataaagtgctaattttaatgtccagaaaactctccacacgcacacaaaagagaagttaggtgttgcgggatggacagggaaaatcctgcaacagataggaaggaaggaagagagaggaagaagtaaagaaagagaaggaaaagaaaggagagggaggtacaggaacagcggcacaattgtaaaacggtgacagatgactacaagttccagagagcggcgcgcgaattttcccgccagcgcctcggcctgacttgtgggaactacacatcccagcatgccccgggacgcaccggtcctcgcccctcgtcggtcccgcccccttttcccccacagcccccgcccgccgggttggcctcggagagtttgtccggtggccgaggtagacggaggtgcagtgagaaccccggcggtagcacgatgggagactccaaagtgaaagtggcggtacgggtccggccaatgaaccgacgaggtgagcgcttgtcccgggccgggggcgacaggtgcctgtggtggtagagcttcggcgtcccgggggtctcggcgggctcccttcagcgcgcgtgcgccctcgacggcgcggtcgggccctcagccctccgccccgccagctgtcaccgagctctccaggcctggggcagctccggcctcgcagtcctcctgtgtacgcagctcttagggcggacagccctacttttcgattttccacgttctcccttgaacctgcaccttgtggctgtttgcagaaaaggaaggacatgcatgccttcttagttcttttctggtttatgactgtcgagaggtttcctttttttccttttgcttgaagtgatagtcatcatctcaacaataaatagtctcagtgccaagattcttgggaaattgtatctttcagacatgctctgaagtctgtagggagggtagagaaagtagataaacccaggacacgtaaatcatctatccaagttggaaagactgaagcccaacttgaatccggggagtagctgctttttgcctctgtagcttcaccagagggtgactgggcagggtacttaaaatgaggtgatgtgtttgaaaacactttctagacaagtcttgttattgaggttgctgccgcgctcccgggagatggaattgctgctaattgatttagactactgactagctagagccattattaagtgcaggagtcattttccaaggtttctagtttgttttactgtgtttaaagtctagtgtgtaggaaatagtttttctgtctccttgcccttttgtgtatgtattgaggtaagtaggtgtaaaagttaacaaagatttctctggttggttgttccttgggaacttggtgtctctgttttcttgtcgttggtttgcctacttgaacctgctgaagtctatgaggcaagcttttcccctgaagacagaactttttttttttttttttttttttttttttaacagcatttttttttttttttaaagatttatttatttatttattgtaagtacactgtagctgtcctcagacactccagaagagggagtcagatctcgttacagatggttgtgagccaccatgtggttgctgggatttgaactcctgaccttcggaagagcagtcgggtgctcttacccactgagccatctcaccagcccaagacagaactttttaagctctcagctcattgcctcctaacatccaggttctcacaaaacagagtgagtagcttagaagtctgaaagttttcagttctcccattttttgagtatccagacatctttattttagatcacttcacctcattgtgatcattactgcgattaaaaaaaaactaaagaaaaaaagaaaacagccaaatgaaatccgacatatctgggaatgattcggaaaggaagggttcagcacattcttaaaatttcctttttgcaaaacccttggaaatgtcagtgctgaaggaggcctctaaccagccaccacagcagggtttggcacagatagttagagccggactcttccttgttttctcttactgggaggaagctactgtctttaatttgctatgcttgtaattctgacagtggctgttactaatgctcagagttttgagatattcgttgaatgatttctagctgttccttgtattccttcctttctctttctttcctatttttgagactgggtctctgtacatagccctggaactcattatgtagaccaagctggcctcagattcatagaaatatgcctgcctctgcccagatctttggtgctgggattaaaggcattcgccacaacacctgacccttcttttctttttaaaacttaggtgctaaggatctgaactctggtcctcacttggttttcatccattaaaccatctgagttcaaccaaccacccaggcatctccccagtcctattttttttttttttttttcatttatttagaggcagtctctgtgtagaccagggtggcctgggacttgcagtcatcttcctccctcagcctcctgagtgcattgcaggggtgcaccaaccactcctggctgaactcactttaaaatgaatgtttacagtttggccccattgtccagtggcagctgccccgtagtctctttgcttactctgtcttctgtttctagtgctcatcatagataatttcttcatctacaggttattatgcaatataatagagaggaatcttaaagcttgttatttctgagttggcatcttgaattcctatgaaaagggagtaacaaaattgagctcctttttgctgagtttgaaaagaattctatttaagcattgcttctggggaatgtagtgttttaagggatagcatgtggctgtcaagtagttgggtctagtcctgagtgctcctgactcagtgtgtatgtgcgggaagtgtcctgaggattgacatggagacaggctgagactgggtcactgggttgtatttctgatcatagactctgttgtttgagtgacatttgtgtcttttgagggaagtccaaaggtttccagaactcttcagggtagggttcgattcttgtgtgactcagtggctggttgtgcttaagggggttcagtttttctgcttaactgtctgtggggttgggaaaattaattgaatattaattggtagttcctaatttaatgataactagagttgtagtggttaatttgtcaagataaagaaaggaagtgtgtgtgtgtctatgtgtttgtgtgtcgtctgtctctctgtcgatgtctgtaatcttaaaacttggtggaggcagaaggatctctgaggtgagtctgggctgtgtacatagtaaagttgcttttttaaaaaattaaaaaattctctacatccttgtctgctaaccaactaaccttccttcctcccggcctctattttctacctttttttacctttggtgatgctggggtcttaaccagggccttgcatacactaatgttttcatttagatgttatgctcacatgtgtgtgtaatcttacatggccttaacattacagcttctaatcatctgaaataggaagctaaactgctaaagaaaattatttctttactgctaaataggaagctaaactgctaaagaataaatatttcttaaaagatcttgggacatcagtgggaggagaggcccttgggcctgagggtgtttgatgccccagtgtaggggaatgcctaagagggaagacaggagtgggtgggtgggtgggggaacactctcatagaggcagggggaaggaggatgagttagggggtttccaaaggggagacctggagaggggaaaacatttaaaatgtaaataaagaaaatattaaaaaataaaaaagatcttggacttgtatttgcaggtgatgtccctttttttagtattgttttgacattgggtctcaggtgactcaggctagtttcagacttgctgtgtagttgaggcttactgtcttgttctgtcaggcttcgtttttgtctgttctttcagattgtacaactcagcagattacatttacattcttctacatactgcacagaagaccgtttcatatcttattataaataatctgaaaggcctttatttttgttttgtgtgcatgagtttttttcgctgcatacatgtgtaataccatatgtgtacattatccaaagaggccagaagggggtgtttgatcccctctagctggagtgctaggctttatgagtcacctattactattataacttactattattatgatatgggttctgggaattgaaccttgggtcctctgctaaagcagctagtgcttgtaaccacggaaccatctcctcagcctctccgaagggtttctaagcacaggtccctttagattagggacagtctccttttcagggatttgatagtttacattgggtagttaaaaaaaaatatttaataggcaaatggatattgactacttgccaggtttctagttcatactagattgcatgggagcttcaatcaaggaactgccaatttaaaaaatatgtgtaagattagccaggaaaaataaaaccattataaagtgtttggaaaatacttttgctaaaggaatggaacagaaaattatgccagaagttgagccagaagctcctgagcgtgtgtgataactctgtttcagaaggtatttccaacgagcttaaagttggctttaggcaacatttaaagataaaacacaaaaaaaaaagtcagaaacttccagatatcctggtcctggtggtaaagtggagggactatgatgtaggcattgaaagctgtgccagccaagacagacatgctatggggagagcagaacttgaacccctgtgtgtaactctattagtgtggccattggtgactagaaaccatgtagccaggggaccagggctagcagaagctgtgaaaggaaatggattgctcttgtggaaaggattttgccaaagaccttgtttgtgttgccctgagttgtctgtgtcttcaagtgtgctgtatggtttctgtatgaggaaatgactgtcatgtgaggagagatgatgaaaaaaagataaacaggtagagcacactgctacttattaagtgccaggtgagtgacagtgacacgtaggaatttagaggagtgaaagacctctgcatacctggtgattagggaagacttcactgctcctggagggcagatctgggttacaaacattcccagcaggaggcctgtgatttccctgggtgggaggggaaggccttggttctttgaggaggaagccaagcacaaaggcacgaaggagtaaggcctgtttaggcagcagagactagattggcctgtcctaaaggcggattctgcagggttgactggaggaaggggtgaggagggctgggaggagctcgggactcctggggacagctaggccagaagtcatcttaggtggctggtccagagctctctagacttcatttggccacaggcatgaaggagaaagattgctgggttgctttgcatgcaagctcagaagactcaatagatggctgagtccttgccatagttgagcaggtctaaaacctacttgatagacatgaaaccaggtgaacaagaagtcagaggaggctcgccatactcaagtagccttgattcagaagatacggggcaacttcagaaatgggaaacttagaaggccctgtctatcaaggaggagataggaagagttctctaggaagtgaggggccaagccaggtggttttgaccttggtgttgatcatagggaggctttggatctttcagaaagatgtctgacaaatgtggaaccacaggtggctgaggctggaaatttctgacagtgtttgctgaaacagaaagtagttgtttgcacacatctgcatgatgtgccaatatccagtgagacacccccaccattacaacactattcctgctgtcagtccagggacagaaacttgggtctgtacacagaggactggagccctttgctgaaggtataggcatctttgttacaacctgtgttaccatttctgtcacctctgtaaaaccatgactaatccctcacttttccacttcttcagttctgaatgcgggagaaggcactgataaagctattacttaaggagatgaattgaggcgtttattgagtggaaaaggatttattgatctctgcttactgatggcaggacatgttctctgaacaaacttggcagagatgaacagtgccttgtggggaagcatatgaagatccatgactgaatggttttcactcatgcaagctgtggaagccttagaaaatggtattcattaacctatccagtttaagtattgggtgaagaaaaactatagtaactactgtttctgtttttcttctggagtgctggggcttgtggaagttgattttttttttttttttcccacctagtgtgtaggtccagggactcaaactctgtcaggattgcagtaagcactttctgtggactggattatcttgctggtcctctgatagggatcttccaaagacctgctccagtagctgtgctgagttcctgtttgttgctgggactctaacccagggcctttcatgtttcatgtggctttatcattagcccagtcccaggacttcctattttctattgtgagttacagagtttactgtctttggtattttttggttttggtttttttccctccacaaggcaaacatctaagtagcgcagggtgtttgcaaacttgccatttttctgcttcagcgtcccaagtgctggcgtgtacgtgtactgataagttattcttcgtcagtgcagtgagccagttgaagccagattagagtatatataagtaagtttattgggaaactgttctctggtaggcaaattcactgggcccaaggaaggagaccagggaagtcacatgggaagggagacaatagagaagggaggggagagagagagagagagagagagagagagagagagagagagagcaagccagcctcaggcagagagggaggaagataggcaagagaccaaaatgtctggataatatagggaagagcagctcagcccctgggctggaatggaaagttcaaggtagaggggttgagtgtaccaggtagggactgagggatgctaggagaacttgcagtgcaggtctgctgtgatatgtaaaatatgcacctcagccatttgttctggggcctgaaactaaacgcgcactattacctggtgcacagttgtagctttggtttttgtttgtttctttagatagaatcttagtttgtagccctggctgttctggtacttgttatgtagaccaggctggccttgagcgagctcacagagatgagactgcttttgcctatcatctgatgggattaaatgtgtgcattgctatacctggcccacaaatagtttttagaaaatgcacaggcttactgtattcttcaagctgaactttgaaatgttttcgtagaatttctatatttcacaatcccagagaaggggattattttttttaaggtggttccacgtgggagaggtttattgtgcagaggcagaggggtggcgaatcgggtagaagggcagagaagaggaaaaaggggggggggagagaagaaagagagagagagaaagagagagcgagaaggggattattagccttgtaggataatcaaactagtattttgggtgcctgccatcagaacttgtgcttttcctgggcctctcaggaaccaggcagatctgaagacagatggtagtcagaggaacctggcaattctgagaggaatggtctttcttccctttgcatagggtgtcactgtacaacctagtgagagtcaggctggcttcaaacttacaacagtcctacctcagcatccgtagtgatgagtaaacacaggcacgagtcaccatgctggtaagtcactatcctgaccagaggaacttaggtaacagcaggtggcacaggccagttcgtgatcaggctgcagatgcttgtgcagtaagtaatgacagttgtagagcagtagggcttgggtttgagcatgcactgcaaacagtcctggctgtcttccttgcctccaaggcccatggtgctgatgtagaggggttccagtgaatgctacaaatgaagtgaattcagatggtgttcaccttggagcactgagcttactgaatccacctcaggtctgctttagatgacggggtgcatgctggtggctctcgccaacaagtgcaggagaggcaggttttaggggaggtgttggagacaatgaaccatgctctgagtcattagccagcttgagtcaatggggatgtgccaggtactgtatctgcacctgttgagttagctgttacaggtgccgggaagacactcagtggttacccacagttaaatggacagaggcattgtgtaagagagactaagaatctgtacagacctggagccattactgtagaagagagaatttatgttagggcctgtgtgaaggaagaggtcacagaggccaaaggaacccaagagaaccaaggggcagaaatgctgtatatgatcatggagacaaaatgtatcacagaataattggcctacagtcagatatcacaggaatgggcatttgttttggcctcatggtgttgatggtaattttcataataacatcatctagctagatggatgatttggtgatggagtgcggtgtaggcagtgtgttgagcataccaattgggcatgccgatattgaggctgtgagtctacgggaatattctttcagctcctcagggacgagaaggcaaaggcgtggtctagagggccaggaagccaacgctaggcctttccagcctcttaattatttagtttcttcttaaaatctaggagatttttgggccagttatatacagaaagccattggagagggaaagctttgaaatgtgggaggagaaagaggatgattctttaatgggaaggccccagagagtttcattttcttggaaagattaaaagattgaaagcgaggagaattgtgtgagctgaaacaaccagagacagtgtgtagactatgttgaagcttgaagagggctgtggctgtagttctgttggtagggcttgcttagtatgcatagagcctagttcccaccccagtaccatataaaatgggtgtggtggtgcagaaggaggagttcaaggttatccttggcagccacctggaacacaataaatcttgtctgaaaggaaatataaagcatttgaaggattccagcaatattttatatctcccccatcccgtctctctcctttcttttcccttcttgtcctggctggccttacttagcctcctgaatagtttcacgtgcctggctcttcctcttccttttaaaaattagataggtttgtgtaccaaaattattcccttcagtgttttgggacattcagatctgtgtggccattgctgctgtcacttcccattccccgatcctgtcttgtctctgtggattttcctgtcctggtgtttcatagagatagactcatacaacaggcttcttccagttggcataatgaatttagggcttacccatgctgtatagcatgaaccaaagctccattctttgtatgtctgaatactatttgattgtgcctcattttgtttattactgaccagttgatgggcatttggtttgttcccttcttttgactattatgagtcaagctgctatgaagtttagggtttttcttttagatttgtttgtttgtttgtttatgtggatttttttgtttgttttgagatgtaggttcactgtgtagctctgtcttacctggagctcaccttgtagaccaagttgccttgaacttacagagttcctcctgtccctgcctccagaatgctgggattaagtgtcccaccttgcctgaggtaaggtcagctttttgattcaggctcttctgtggtccatcccttctcttgcggcgtgctggcattgcaggctgtgctaccttgtctggcaggtgtacaggtttttgtatggaggtttatattcattttgtgtgtgcatggacacaggagtggagttgctctgacatacaccagttctaattattttttaaagatttatttatttattttatgtaagtgagtacactgtagctatcagacacaccagaagagagcatcggaactcattacacatggttgtgagccaccatgtggttgcttggaattgaactcaggacctcttaaagagctatcagtgctcttaactgctgagccatctctccagccaagggttttaatcacccatttctttttttctttctttctttctttctttctttctttctttctttctttctttctttctttttctttttttctttttttttcttttctttttttttttttttttgagacagggtttctctgtatagccctggctgtcttagaactcactttgtagaccaggctggcctcgaactcagaaatccacctgcctctgcctccctagtgctgggactaaaggtgtgcaccaccacacgtggcttaatcacccatttctaaatcttgaggtttggttgtgattttgagtgtgcatattttgtgtttgaagccaaataaaattactgaaagttttcatgctgacccctctttcccttgacccacatcatctcttattgcatctcctcagtgctcacccatcgtagaactcaatccattgctgtcatttattagttgagtagattttgatattcactgatatataaaggtagagaatacttctaatatgtatttatatgtcttacatatggaagtccattttgctttccgtaaaaagtattacatgtgggctggagagatggctcagtagttaagagcactgactgctcttccagaggtcctgagttcaattcccagcaaccacatggtgtctcacagccatctgtaatgggatctgatgccctcttctggtgtgtctgaagacagtgacagtctacccacatacatgaaacaaataaataaatctttttaaaaaagtactgcttgtatttattggcgagcagcacgtgtggcacagcacatgcagaggttagaggacaacttgtaggaatcagttttcttcttcctgagggtcaaactcaggtcatctgcttagatggcaggtgcctttaccctctgagccatcttgccaactcccagtttgctttttacttacatggtattgccagtttctagcccctgatctggaacgttgggccacagtaagacagaggagtccagaaaagtgtaagctgcttccataagcagtgtagataagtgaggggttggaacttgaaaacaagaccacacattacctgcagattttaaaattgaaaagtgaatatgggggctggtttgatggctcagcgggtaagagcactgagttcaaatcccagcaaccacctgttggctcacaaccacctgtaatgagatctgatgtcctcttctggtgtgtctgaagtcagctacagtatacttatgtataataataaataaatctttgggccagagcgagcggggccaaccggagtcagtggggttgacaggagcaagcagaagtcctaaaaattcaattcctgccaggtggtgcacgcctttaatagtagaacttgggaggcagaggaaggcggatttctgagtttgacgccagccaggtctacagagtgagttctaggatagccagggctacacagaaaaaccctgtttcaaaaaaaccaaaaccaaaaccaaaaaaaaaaaaaaaaaaaaaatcaattcccaacaaccacatgaaggctcacaaccatctgtacaactacagtgtgctcacataaataaatacataaacaaacaaacaaacaaacaaacaattaaataaataaataaaaaagaaaagtgaatatcataagtaagttattaccttcctttataaagtaggcactagaggtgttgagtcacttagggctagcttttttagtgacatgcctggtaagaagaggaagggtctctgtgtttggaagtgggcagtctggtatggaaaccagaaaggcagattaccaaatgggcatctctgatacttcactcacaagtgcaagatccatttcctcagacagcacatgagttacataaagggagtgtcccaggccctacccgtattttaatatgaagtcattggggtacaagccacagccgatttgtacatcgaagaaagacttgtttcaaatgattgctcactcttacagagtgactaatacactggctgaataagcagaggtgtcagctgttgatagttaatatcatgaataatttgatgtgcatcctttttgggaatactgacctacagtagtttgggagcctttaatattaatacagtatatttcctgcccccctccccctttttgagacagggtttctctgtgtagcctgggctgtcctggaactcactctgtaggccaggctggcctccaactcagaaattcgcctgcctctgctgggatcaaaggcgtgcgccaccacgcccggcaaattttttttttaaaaaaagatttatttattattatacataaatacactgtagctgacttctgactcaccagaagagggtgtcagatcttattactggtggttgtgagcctccaggtagttgctgggatttgaactcatgaccttcggaagagcagtcaagcagtcagtgctcttacttgctgagccatctctccagcacccccccccttttttttcttaaaggtttaggaatatatcaaagtacccatggtcctgaggattataaagcctgcttagtcataacacaaacttaatgtattactgaaggtttctaattggttgtcagacatagtgttaattctcaatcttgttactttaggtttcattatgaataaatgtgcccatattatttattgtaatactgattagtatttggttatgtttgaaccattttaagtggagtggttggagacattacggacatttcacattgtgttaccatcaccaccatccatgagcagagagaacctttttacattgtaatattaggtatggtgatgtataactaatcccagcaattgggagttagagatcagaggcggaggctggaggattgctgcaagtgttttagccagcttgggttacagtgtgaggccnnnnnnnnnnnnnnnnnnnntttagcttcctatttcagatgattagaagctgtaatgttaaggccatgtaagattacacacacatgtgagcataacatctaaatgaaaacattagtgtatgcaaggccctggttaagaccccagcatcaccaaaggtaaaaaaaggtagaaaatagaggccgggaggaaggaaggttagttggttagcagacaaggatgtagagaattttttaattttttaaaaaagcaactttactatgtacacagcccagactcacgtcagagatggcccccccccccccccccccgcaaattgtttaactattaactcttaactcctatccagcctgctgagcctgccattcttttttccgtctgtgaatctgactctgggactcatgtaggtggaatcttatggtacttctctttctgccattacttcattcctgtaacatagttaccccaagggtcaacccagaagtgggtgtggcgtcacacacctgtggtcccagcacttaggagtagagaccggaggattgggagttcaaggacagcctcagctacatatatagcctaagttacatgggatcctgtttcaaaaataaatttaacaaatttgtttgtttttaaaggctgaataatgttacttgtgccgggtgtatgtatgtgtgtgttgtctatccagccatcagtaatggattcttaggtttcttccactttggagattatgaataatactgctgtgaatgaactctgtagctttattttcacagaggtagtatatggctgttgtccccactgtgttatatatatacatgtgtgtgtcagtgtgtgcaagcagaggctagagcatgatgcctcagtcactctccacattattttttgagatgcagtccatccctaagcccagagtgtgccattttgttgcaaacatgctaagctttaggtgggtgtgggggtcaaagtcagattctcgtgttgagtaaactgcttttacctattgagccttctcttcatccccttaaaatgttttcttggataaccagccttcaagctctccaaacctcactggttatttgggtgtgtgtcctagactgtaagccctgacacattctaaacactcctgtgaaaagcctctcttgatgtctgtccaccagttgacagaattggggtgggagttttatttggtaaatactgagctatgggtgtggcttctcactctggtaatcccaacattccagaggcacgaaacagaaacaggaaggaggatcgcctttcgttccagtctgggtttcagggtaaaataccacctcaagaaaaccactcccaacaaaaaaaaatgaataaacaaaaagccctgagctaataaagaattgaagatagctaattacgtgttaaaggctgcatttgagtggcatgtaggggtatttataaatgtcagtgtatttgggataaagtgaattcacattcgatgttttaattattaaatgatacttggtgatgaaaatttccagcttcttaataataccatttaatgcttccaaattattaattgcatttgatgacctacatggtgtgtgtgtgtgttccaaaaggagaagctgttaagagagtggggcttgctaggagtttaagcacattcctgtatcccagcacatggcaaactgagggaagaggagcatgagtttgattccagcctgggtgaaagtaataccttgtctgaaaaaaaaaatggtggcaagcagggcagaagcatacaagtgttgaaggaaatgtttagattccttgaatcttctcccaactcaagataatttgcttgtacattcttagtgaaaatccagttttgcaggaggcattcttagcaaactcaaagctacactgcctttgtggtgggcggtgagattgtgggttctgagtcagtgcttccggagctttagtgatgtgttcgtgtaatagagatctgtgtgaggggccagctcctgcagtgtggtcagataccactgggcaagcctattagcgaatctccatgcctgcaggtgctcaagctcaacccacagaagcagggctcactcgtgcttgcttgcttgagtgtttgcgaagttgcctcccagtgccgagccaagaccaaagcactggaagtaaatgacaaggctaactggccaccacagagcaaaacccccctttttggaattagtctttcacatctaggtgaaactggagagaaatcaaatagtagtagatatgcaaaagttaacttagcgccagcaaaggaggaaccatcttattttgctatgtaagttaaaatgaataaaaaacatgcccttctttgacatggaaatactttattacaaatgttacatagacatttggccaagcttatttgggaactacagctgagtccacagggtacagcccctttcctgagagcttatcttttggcagtggggggagtaaggcagactgaaacagtttcattctttgggtcagacaaatagaagaatataaaaactagagaacaaacacaggcagagtattcttttttaaaaacagctttgctcagacacagttcccatccaaacaatacatccagctttgtggtttgtagttagttcagctgtatactcaggaacacattttgtgtctctcagaagaaaaactcgacctgtagcagttttcctttgcaccagacactcctcatctgctttttcttttgtacatttctccacttaggtatgagattgaatggaatctcataccatgtggttctttgtgactgtctattaaattttttgtattattattattggtggtgatatgtatgtatgacgtgtgtgtgtgcaggtgtgtgcatgccatggtgcatgtgtggaggtcagactggttctctccttccacctttacataggcaacagggaaggaacctgcattttaaggtttgcattttaagtgcctttgcctgttagccatcctactggcctttgactatccctttttaggtcactgtaagcctcagccaagtagtggcttgtatcaggagttcattcattttatgactttaacactaagtgttgtgtgtactagcctgcatatgtggagctgattctttccttccactgtgggttgttccaagggtggaatgcaggtcatcaggcttgcccatcaagcccttttcctgctgcgccatctcactggccctactcattttaattattgaataatgttccattctgtggcaattcacattatctgttttttgcttgatggacttctggggttgtttctttttcttctactttatgcaaaacacactgtcatgaacgttttgtctagtaatttttgtgtcgatgcaggtttcagtgcatctagagttgctgggttgtatggtgaccctgcttagccctgttaggaactgttgagctgttttcccaagtgaccagcccacttgtgtgccagtcacatgccttctgcacatccttgccaacctttgtttttgtcttgttggctattgttctctgagtgggtgtcagggggcatctcactgtggtttgattcgcctttctgtggtgtctagtgacaccatatgcaccacacggtgctgcatgtcttcctgtgctcagtgggcatttttgtacctgtttagagaggtgtcctggtaatttgcccatttgaaaattaaattattgatcgttattactgttgaagtgtgagtgtaagactttgttgttattatctgagacagtatttcttaactaggctggtctctacacccctaaccatctgagggttgtcttgaaccccactccatctgcctcttccccctaagtgcttggttacctcctgcacttccatgtgcaactgagttctctttatattctagtgcaggtcctttagtatatagatgtgcttggcaaacattttttctttagttttgtagtcttttctctgtgtcattcccacccctgcccgtgttgctaaggatctagggatttactcagagtttctcagctcagccattacagccccaggccctgctgtgaacctttgctctgggagttactgctgtcttagcactgtgaagattttatttgtgaatgctgaatgtctccccacttatttaagtccttaactttttcaactgtgttttagagttttcgttatacaaatcttgaatttattttcaatttattcctaattaaaaatttttgatgctattttaagcgcaatttttgaaaaatatcattttcatatttccattattggtgtatagaaacacaatggatatttctatgttcaaaagtatattatgtacacacacagtctatacatacacacacaccacacacacatacacacagtacacacacatacatgttgtttgaatttttattagtgggtcctataggacttttcagtacacaaggtggaaccgtctgcaaatagagaattcacaccttccttccattccagtctggatgtctgtattagtttttcttgtctgactgccctgaccagaatgtcgagtgcagagctgagtagaatttgagcagtaaacagccttgtgctgatgttggaggttaagctgtccagtccttcaccatcaagggtgatgtgatgaggttacgctttattagactgagaaagttcctgtctattcttcgtacagttttcacagaacactgggatttctgttaaatactttcccgaaattatttatttcttaagcatgatggccttttttttcttacttttttttcctgcagaaattgacttacataccaaatgtgtggtggatgttgaagcgaacaaagttattctgaatcctgtaaatacaaatctttccaaaggagatgcccggtaagttatgaagcaataccatattcactgaaatcatcactggctactggacaaatgagggtgctcctaaagatacatggctaccaggaggctgttcccaggctgacaatgagtgagggatgtcaggagtgctgcagatagctagggggacagtggggactcatgacatgtgggcactaagggctgaagtgatgaggtggactttaagcagctggtgctggctgatggaccaggcaggtgggcagcaggagagggcaggaagggagcctgtgcactgacttatcctggtggcttttactttggccattccaggggctgcctttcctatagccctcagagggatgtttcctttaaacacaggcagactggagaccatctaacttaattactgtgctctgttaactctttgaggcataccttgactgtcaggctaaggatggatatttcagcctcacttgtggatttgggcaaatatatgaaacaaaagagaaagaggggaaaagtgaattgggagagagtaatgagattatgtttttctaaaaaaattggagtgaaattaattagatcaaataagctgggctcagattatagcaagtagacaaggagatttacattgtagtccaggctagccttgaacttacagttttctgctatctctttgagtactggaattataggtgtatgccaccacacctatctctgcttgtagttttttgataattatgaggtgaattagaaaaaaatggcaatgtagacagcagagtaaaataggaaagaagggttttatgggagacatctctatagggatgctgttgtgctgacccttgacgtaggtcaggaggggagactttctgctctggtgcccatgcaaagtatgtactttaactattgtgataatgtggctgtggcacttcatggtggtcttttggcttgagttctaaggagtgctggacttgggttcagacgttctgaattgaatccttccatagctgtaactgtagtttcccttccttgcccgcttagggctttgttttgtagtcatagctatcctggaactcatagaaatctcgccctggcttcctgagtggttaggttacaggtgttagccatcatgcctggcctgtagctatttatttttaacttatttgaggcaatctctatgatatcagatttacctatctcatagaattattttcctttaaagatcaaattagtgtttgggtaagcattttgtagtgttctgcaaatgtttattgctactgatggtgaagatatgacttagtgatatctttagtgataaggatttctgttacatattgttaccagtttcctcagaagcacagcagcttcatacagcagtcatcaatttgtgtggtccaggacaccagtcagggcacagtgggattatggcttgctctgatccatgctatgtgggatctggctagaagacttgaacacagggtttggaatcatctgggagggagtggcttggtcatcaggcctagtagttcatatcccctgttgaatggaggtgcctctgaggatatatgcaggacagcaattcataatcctggtaaccagttctaaaatatgtgtcccaaaggaaaccaagccaggaggaagcatatctgtgtccattgtgtgggccatacaggttaattctatcacattttcctgttcaaggatagtgtaagactctagaacccatttaagtttttttgtatttatttatggtatgtgtaggtgtgcatgggtatgcatgcacatagaggtcagaagtcaaaaaccagctggagttggttctttccttcttccatgtggttcccaggaattgaacctaggtcaccaggtttggtggcaggtgctcttgcccagtagcatctctggtttagagaagcattcagctctgaagccttagtttgttatgggacaggtagatacagccactgtcttttggagcagtctgtcggattgtgggatgtagctgcctgagaaggtgactaaaaatagagggagcacacagaacttaaaacaccaggctggagttatggcccagtggttgagaacaccaactgctcttccagaggtcctgagttcaattcccagccaccacatggtggctcacaactatctatattgatatctgatgcccttttctggtgtgtctgaagacagctacagtgtgctcatatacgtaaaataaataaatcttaggaaaaaaacctcaccttcttaaaaacaaacaaacaaacaaacaaacaaacacccttgagggcttccagtgttgcaggtttgtaaaagaaggagcactttctgattatatagattattttggatgcttcttttctctcatatagtaagaatagaaattggatattactattgtaagaaggattaaatatgattatatgtaatggtttttagtcaagtaaagttaagaaacttgacttttgagacagtgcatccctacatcactatgtagcccaggctggccttgaagtaattactgatcttcctgcccctctttcagagtgctgagactgcaggcatatgccatcacacccagctttgaaacatagacttttcaataacaaattttcattgaagcatatacatgtacagaaaagtgtacaacttggtgagtttttatgacttggatatccttctacaattggcatcatgtaaaggaaaaaagccagtgtattactgcttacctaatgaaagtgcttgctaccaagcctgctgacctgaaaccatggtagaaggagagaactgactcctgaaagatgttccctgaccttcacctgtgaaagaacagcaaattaagtaaaaatgagaaaaagaaacagaatattgctagtgtgcaaaagactcactattccttgcctggaacttaatggctagaccaggctggtcttgaacttgtagtgaccctcctgcttctgccttctgcttgctgaatatattccacatagctaactgtttgtctgtcttctttctttttttctttctttctttctctctcttttgtaatacttagttgaaaagagaaaaaagaaatctcgaatgtagcagtcagttgtatatgctaactttataaatttgaaaaaaataggaaatcatacattaggagattaaaatttaattttgaataattttttttcttaaagatatatttttattttcctatgtgtgttggtgtctgctatatgtgtgcaagtgcctgttgtggccagaagagaatgtcatacctcttggaactggagttacaggtggctgtgaactaccctatgtaggtgctgggaactgaactctggttctctggaagagcagcaatgctgttcaccacgagccatctctctagccataccttaaacttctactaatgtgattaattatcttgcagagtgcagaataatgaatgacaactttataggatctgtacttataactagaaaactagggattttagttaacatggaagtgtttgcatcaaagttcctagcacttgggaggctgaggcaggcagaaggattgccagcctgggctacatagtaagttagagtctaacctgggtttcatagtatgttctaagtacacggtgaaccctctagaaatgtcagctgttactcttagtattgctattatttttatactctattcaagttgaagtccatgctgtattcagtgagctataatagagcttaataaaggtgataaatacttttttttaaatctttttttgtaaagatttatttatctaagtacactgtagctgtcttcagatgcaccagaagagggcgtcagatctcattacagatggttgtgagccaccatgtggttgctgggatttgaactcaggaccttcggaagagcagtcggtgctcttaaccactgagccatctctccagccccgataaatactttaaaaatcaaaatatgtttagtatttaagaatctctggctgtcaagaagttacctaggttctagaaaatttgtagccttttaggattagaaatttaggaataaccctcccagttctaacttagcaagtgcttttctttagaacccccttcttaatgagcaatatgtctgacctgtactataagatctttctgataatgcattcagagattttttttttttttggtcgatcagtagaagcgcgttcctgttttcaccttactttactcaaagctagttagtgctttccttagttttctagcaactaggtgtgcaaatcatgtgttgcagctttacagtttttaaactattttagatattcttaaactatgaaccttctaaacagtccaacactgtcatgtgactaatgctgcctctctagacctcactcacgaggacagacgcttcctgtcgtggctctgcctagagatgttccttggggtctgtgaggttctgtcaactgctagtgctaatgctgtcctgtacaacctaactcactggcaagaatacagtgttgggcctttcaaccactagaacaaacttttttcagttgacagttgcagaattgtggagtgtttttacattgatcttttgctaatgcagttaacagtatgttttgcatgtatgacttaataaatccttgaatcattaaaaaaaaaagaaatttaggaataaagattactagggctggagagaagtttcagtgggtcttcttgctcctgtagaggacccaggtttatttccagcactacatgatgaatcacagctgcacacagctcagttcagggttttgacatcttttgacagcacagactccttcatacacacagtggcacatgaacacacaaaggtataatcacgtataaaaaagaataataaaaaggtaggtgtgtgtgtgtgtgtgtgtgtgtgtgtgtgtgtgtatctgtgtgtggtctgaggataattttatggaattggtttggttctctccttccacctttattagggggtcagaggatcaaatccaggccatcaggctttccaacaagtgcttttacccactgaatcatttcactggcttaggatctgaaagctttattgagttttctcatgttgattgggcacttaatgacaaacttgccttcctttaacaagatagctgctctgggcaggagagtgagctgagtaaagtgcttgccatgcaggggtgaagacttgaattcagtcctaagaacccatataaaagagctggggctggtgtcacacattggcagtctcggcacttgggaggcagcgatgggtggctctctggggcttgtcaagctccaggtcaggtacaagataggcagcatctggaaaccggcacctgaggttgtccttggtcctctatgtgcatgctcgcacctgtatgtacctgtatacccgtgtgtacacatacacacatgacaggacctctgattgcatgtttgtagtgcgtgggtattggtccctgttagcatcaactgattttggaaagaaaggttaagtcattgctcatgaacaaaggaacattttatcacatagagaagtgatttccccttattaccaacattatagggaacattattttatctactgtattcccctttctaatgtcattacacagaatacccactggagacaacttatatatttattttcccatgtaggcgctctgtacttatattttagtttaaccaaatatctttttgagattatcttcttacctagaaccaattggactttctagacccatccttagggctttccaaatcttcaccagcagcataattaattacaagtcatttgaggactaatgaatgactaattccttaccttgtatagatttaaaacaaacaaacaaacaaaccaaaaagaaaaaaacaaacaaaccaaaaaacctagtaacatgggcagtggtggcacttgcccttaatcccagcacttgggaggcagaggcaggcagattttgagtttgaagacagcctggtctacaaagtgaattctaggacagtcagggctacacagagaaaccttgtctcggaaaaaaaaaaaaaaaaaaaaaccaaaacaaaaaaccaaccaaacaaaaaaaactagtaacattttcagtgtgtaaattttttaaaaaatattttattttatatatgtgagtacattggtcctgtcttcagacacaccagaagagggcatcaaatcccattacagatggttgtgatccaccatgtggttgctgggaattgaactcaggacctgtggaagagcagtcagtgctcttaaccactgagccatctctcctgctcctttagtgtgtaatttaacttagcattttagataccaggtgtgttggtgcatacctttaacatagaacatgggattgctgtgagtccagctaggactgcacaggaagatatcctgtcttaacagtccccctccatattttggagcactgcactgtaactacttttgataacgtgatgtagcatgctccattcttacacatctgaaataatctttcttcatagtgtctagtgcctgtgatcatgataggtgagcaggtttctagggcatcatttgctcgagggtggcttctctgttttatgtgtgatcacagctgatactcaacatcacacaggagctgttgcctgtctggtagcaactgcattctgagagagttcaactctcagttcccatagttggtttcctacttggttctgcaaacaagggtattgtcttttctgttccaccagcttaacacaaacaagaaatctgtgttcaggggtcgggacaaactctgtaaacactagcttaccgaggatgttcccacctgtaaaaggctccttttctttaccggctgtggttttatggtggtgaagaacatggtaactactagggtcattgttcgtaagatgccagcattaggctggtctagagctctcccagatcaggctcagactcctgatccttctgccttagttctgccacttctggcttttatatcaacacaattaaatggtcaatgtcttagcattatcatgaaaataattttgatcttcaggccctttggaatgttgggagctgcccaggaattcttaagccacaagagacaacagctttagggatttagcaaaaaaaattttcgtctgctttctgttactttgagatggggtttctctgtgtagtcctggctgacctcgaactcagagatctacttgcctctatctcctgagtgctgggactaaaggcgtgggctaccaaccacttggcctgggatttagcagttttacaaactcttaagaacctaggggttgcctttcatttgcttatttaatttctactctaatgtttagattttatttgaacagaggattgtgttgcacagattgatgtattatgaactagtctgcattagtcaggttctctgcatcagaactgatacaatttgaaaggggattgggaggaaaggaatcgaggtctgggcctgcgagtttggttagatatcaccgagctaggtgggacagtccggtaacaatttcaagatgccaggacggtccagtacaagttcaggttctactcattacatatctctcagctctctcctccttaaaaaacttccaatcctctatcagctctggaatggacacagtttctagtgttgccttggaccttgtggagactcaaactgaagtgagtagtgagtacagtatggacaaggccatggttgagtttgctaaaatggatcaagaactaagccattatgttaaggctgtccagtctacaatcaatcatgtaaaagaagaacgtccagaaaaagtactgggtttaaaattactggtggagaagaaatttttggcagtacagggataatgccgactttaaagagaatgaaaagttcgtgcagttcaagcaacagctgagggagctgaagaagcaattagtgaaacccaaagaagatggaagacacagtgaattcaaccccaataaggattccagtagagcaggcaatgaacgagttgcccaaacattggctgtagtcacacagacatgagaatgtcagatcttattccggatgaagccctgagaaggttaatcaagagccacaacaagaagaaaaaacaccactccgagtaggagcaagcctcctgcccacagggatgtcagcagcctacctccccgccagccatcagacagtgagggtagacagcaatgggcctggccgagcagtgctctgtttgctgtaacccctgaaggctaattgtaaatgaaagcattttttaagttacacagtaaaaacacaagtacattatattctttattttcaagtgctctgaatttttaaataaaactttgataatcctcaaaaaaaaaaaaaaaaaaaaaaagaaagaaagaaaaagaaaggggattggtcagttggctcacgtggcacactgtaggtggtccaacagtggctgtcttcacactgctgtggccaagaacttggaggctgctcagccttctcctcacactgactgctctttatttggccaccactgcaagggtgacacccacatttaggttggaacttcttacttcaagtaacctgctaagaaacccttcacaggactggtgagatgactcattgggtaaaatccttcatccaagcctgatggcttcagtcccaggacctaagcagcgaaagaactcaccccacaaggttgtcttcttacctctggacacactggacacacatctgagtcccgtttctccagtaaatgcactttaaaaaaaaaaagaaaatcctaatgccttatctcctagttcatttcagttctagtcaaattggcagtctggcttggtgcccccccttctctctctctctctctctctctctctctctctctctctctctctctctttctctctctctctctctctctcacacacacacacacacacacacacacacacacacacacacacacaggtttatacataatatgtactaatgtataatgcataaatttaatccatttctcagacatagctgtctaaaatgtaactttttagcctctctgttttccggtggtttacattcggaaacagtgagtctctgagttctgctgggccaacaatgccacttgacagcctttttctctgttttgctctttcttagactggcattctgaggtatccacagtgtgagaactgtcctgtgtggctgagaactataggcagtggttctgtcttgagcagtttagggatgcacatttctactgaatggacccattaggccctgcagtgaagagctctgccgcattgtttattattcatttcccagtttattggagcatgatgtgttttctcttcagacagaggtagtaacagctcatggcatagtgttcctttggacaagtttgaggacatctctacttgcccctttctcaattctccaaagtgacagacatctccactgtttcagcactagcccttaaccctgcgtatgtatctcggcttaatttgcagactcaatttatttcacacaccaaaaagatgctatctaatcctttctcagtatcctccagtctttttctcaaatagattttgtgctctgataaagaagacagcactgcctgtgttcacgggctttccttaggtgtccctcttattacgtatgactccttaagctcacctttccttctagggaccctcccccacagccacctccttgcttggcccacagctgagtgtaccgcactcagttcttacagtgatcacctagtcagcctggactacaggtgaaaggccgcagtccttcacaagattgggtaacacactggcctaactgggtccccggctgtatccactttccatgtggatgtacatctgtagcttcctcatccctttctggtttgatgattctgttcacagaacgcaggaaacaatccatttaacaccgctcttttgatgctgggggtgggggtagctcaaagggaaaacatgtgcaggagactctgggttccaatctttggagccagaacataaggacacagtgaaagcactgcgctttaaagtaaagggtacaaatcagaaggatcagccacctgaaaagactcaggacaaggtctgggtggaaatggggaacttatgatgtgcatgtcacttgcagtcagcgtatgctattatcccagcacacccacgtagtcactagccagggaaggaccagtgaacttctgtgtccagagtttgtaaacatttttaatttagtttattaccattttgtgtgtgtgtgtgtgtgtgtgtgtgtgtgtgtgtgtgtacctgagccacggtgtgtatggaggtcagagaacaacttttaggagttagttctcttcttccatctttatgtgggctcaggttgtcaggtttatgcaacaagtgcttttatctgttgagccatcttgctggctcaatacagatttttttttttaaatcagagttttcagaacaaaggcatagttactgtcacatggttgaactgtccctaatccttggcccttcaccaaaaagtggaaaggctggttaggtgactaaaattccaacctctagttagaggctaattctcaaggcatccatctgtaaatgaattgccccctgagtgatctgtgattggctggcttcttttccttaggtgtcatttatccctgctatagctttgacaagaacttctttttgaaaaatgacttccatcttgtatacctgttcagccgttgctgggccttgggttgttttcggctcttgtggctttgtgaataatgttgcctgttgtacatggtttatgtggacacgccttttcatttctcttgggtgggtatctaggcatggaattgctgggtaacttggaaactctgcttaacctctcaggaactgccaaagcctttcactgttgcacgttcttgacagttcaggaggggtggtttctttgggtcaccttgaggatattggtggtacttcggctaattggggggtgggggtgcgtgtcttgcccaaagccacaatgaaaaagcaaaataaaacattgtgctgtccaaacaaaacaagtctggtcagctttagcccttggctaccaatctggatcccatgttcttataaaatggaacccagttatgtttattaagtaggactttttggaaagggtttaaaaagtcaagtggaatttgaggattatagcatgagaaagggtctaaagaacaaaggatttagcctggcagcagtggtgcacgcctttaatcccagccactcgggaggcagaggcaggcagatttctgagttcaaggccagcctggtctacagagtgagttccaggatagccagggctacacagagaaaccctgtcttgaaaaaccaaaccaaaccaaccaaccaaacaagcccgaaggatttatgtcccgtccgcttggttgagcaaatcctcctccctgtgctttaaacttgcctgattggttcctcatccttctgcaccttggtgtcctgaggttgtgtgtttgtttgttttcatcttcactttttatgtctttactgtttcactctgtgtgtgtgtgtagctcatgcccaggatatgaatgtgcatgaatgccccttttccataagaaaccagaagcttgacttggaaaagatgagccaccttgtaaacgctaatgtctgacttttaaaggcaaaagggctaaaagaagataaacataatattaccgtcaactttggggaggaaagtgacacttggtattattttatcaaatcttgtttgtcttcttttttctcttaaaagattaaaagagtccagaagctttcccctcctgtgtcttgttggcagtggattgttttcttgtacctctgactctttgaagagattgcatctctaagagtggctactttaagcatcagccccaaaacttgaaaaggaaagagctccctcataccaactgcattcccagctgcttgtccagttaccctggtttcttgtttagccctctgctttctgctccagctgtgctgtgtgtggctctgtgtgagtctgtttgttaacaccatgcttggtatgttaaagtggaatttcttctatgattcttcctttgtgactctcccacaccaagggtcagatcttgaaagtagaacttctgaggttgaaagcatttggagatttagatgtcacgatcttgagccaggtgtggtggtgcacacctgcagtctgggaagaggcagcctcagttccatggtgactctgagataaacttgatgagtcatgagaccagcctcaaaaatattaacagatcaacagtacccctacccccaccttagcaatattttaagatcttgatttacccagatactgatttctttagtgtcctatgtgatgaactgttctaatacactggggcaggctccaacaaggatgtcatggggtgtctcagctcttatagtagacacaggatgctgtccctgtcctccttgcttgaacttaatagttagagagcagtgtggaggttaggactgctggtctattgagcgtgtctgagatgtggatttcagccccacttggtcaaggcaccggaagaagcctctttgtcccctctgaggtgctaagaggcatcagtttagtcaagcgagatagttagtgaatgtctagtacaagcaaagtaaacccaaccctctttcactctgatcctggtgggtgtgcagattggagcttgtaaaacacactgggaagtctggtgaccgtgttcgttttctcttgcacatcttggttagggcttatgctggtaatttctttgaaacatatgaagtaattttccaactaatatcttattagtggaaagcgtcattaggtcatattagataatgacttttaaaaatttctctgttgttagatggatgctcatttaaatgaagattttaattgaaggaagtcgtgcaaaatgtaattatggcatgcacaatggacatgcctgttctctgtgctgtgaaatgacccacatgaggccagcagttctgcctgcatagaaagcgcttctctggagactccatgcacgtctgatttaatttcataagagactttcccccaggagtctgtctaccctaattatgtgggcgggctggagagtgattttgtactcagaggttgtagatgtctctgtacagcctcccatttacagaagtactatgatggctgatcgtgtaaatcatgtatgtgtaaccatggttatgaaaccgagtcaggaaaaattgtaaagaaagtatttgtggttgagtgcagctcattgtgtagttaatagaaacagatgatcaaattgcagtaagtatagttttgaccaagtttactagcacagtctagcagactgctacgctgatctgtttgatagctcgttaataaggttgtctgaataaagattatgaaggatggctgccacagaatcagtatgtgatgtatgcatatacatttatgtttgtgacagcgtctcatgtagaattcagtatgtaacttaggatagccttgtacttctgatactcctgcatccatctcttaagtgctaggaacataggtgtgtaccacaggctggacttatattttatcattgtcattgacatatgagtactgcctgcttatgcttctatgaagttcattggtaataaaaaggaataaactttagaaaatgctgcatggatacttatatttgatgaaacaaggaatccacattatgtcagcagaaagtaagtctagaacaggttaagttacaactgatgtgactctccctgcattttgaattcaatataaaattgtcagtatatgatctattgagaaaatatcttattataaacaaatttggacagcttctaagccctggcattagagaccttcctaaagagatctgctttacttggttcttgtttggcatctatatcaatttcttttctagatgctctgacagaaacaacttaagggagaatgggctcactatttgtgggcacagtctattacgttagggaaggtgtgggcaatatggctgcactatgacaggcagctcttacactgtccctcatgaggcagagagaggaatgctggtgctcagctggcttcctctttttcctttttattcagtctcccacaaaattccaagtccagccactggaaattaaccatcacatcatagctcccttccaaggctctgtgtactgtctaagttcctgagtagctggactactggactaaccctgatgcagtacaagacaaggcaatggcacttgtgaagaagtgtgatgtagaaatgcagccgattcacagcacattggggaggtttctgatcagctcaacattttgtgcatctagtgtcacattcatcaagctaagaggacaatctgctaatctttagttgtatttatcctgctatcaatcattggacaacatgtctaagaagaacagaccccaagtaacaaagctggaaagtggagaggaattatacacttcttccatggatttttctgattcaagagttgaagtagtttggctttattctgagcattgtctggtttcctaggagaagtttcttttgcaaattagtacttggcttggaatccttaacttttatacataagagttcttttaaaaaacacagtatcttgtaaatttcacctttatcaagcctaatttacctaagcttatagtaaaatttgtttttttttttttttttttttgggttttttggtttttcgagacagggtttctctgtatagccctggctgtcctggagctcactttgtagaccaggctggcctcgaactcagaaatccgcctgcctctgcctccccagtgctgggattaaaggcgtgcgccaccacgcccggctgtaaaatttgttttgaggtgctaggaattgaactctgggccaagactgctgggtgaggcaaagtcatgaaacgtaaaaatgcatgtattttcatgttctgaccaatatataaagccagtaatgctttgtcctacctttaagaactgaaatggaatttaaataatgatcacaaagaatgtagaagttacatttgttgttacattttaagaattttgttatggggctggtgagatggctcagtggttaagagcactgactgttcttctgaaggtcctgtgttcaaatcccagcaaccacatagtggctcacaaccatctgtaatgagatctgatgccctcttcttgtgtgtctaaagacagctacagtgtacttacatataataataaataaatctttgggccggagtgagcagggctggagcaagcagaggtcctgagtttaattctcagcaacgacatgatggttcacaaccatctgtacagctacagtgtactcatttacataaaataaataaacaaattaaaaaaaagaattttgttatggaaaacttgaaagataatgtaaaaccattatccatggcttacaatgtcctaccatctcttcctctctttcttcattcatatattgttttgaggaaaattccatttactcagcaacatttggatgctgttaaacataatcataatactgtaaatttgccttaaagttagttagttaatgacggcgagttcactaacctgctagtctggaatcagaactgctccaacaatcccagcactttgtgagtatggacgtgatgccccagatagtgttcacctgactgcatatggcaggtggcagtcaggtcatacaatgcaggtacacttacagtcccatgtggtttgtggtttgtgagtaagttgggtatgagctgcagatgagctgcatgtttggacccgagtctgcccccacaatgcctgctagttaccgttgttctgcctggacttattctcaaggcccctgtttgatgttgcctttgaaacagtggtttgaaggtcggtctggagtcttgggagtttccttccaatccttgatgatgtgaagatccaatgcggcctcttacctacttagtataccagtggactttcccaggagtggacttccattgttcactaggcatgttcttggggggacagtgtcactgttgcaatcttttaggtgtccacagcacacagctttgttctgcagtccttttgaccatctctgagctgtgtgtgtgacactgatgatgttttactgcttcccaggtacctacagttaggattgtagtttctggatcccgtacccgatttcctgtatgcaaaacactgcttatgccatatagactagatggggcatgtggggtactatgtatggactggaccctcctggaagagtgcttggtttagcctacagcttgaatatttaaaaattaggacacttcatgtataaactcaaatttgttatatgtttaaacagcctttgaccaggccttcacctcctcaggcccaatttgttattctcaaagctcttatatgcctctccctttttggctagcagtgtagattcatttttaaaatatttatttttattttatgtgttttgtctgcattcatgtctatgaaccatgtgtgaatagtgtggccttagaagccagaagatgcatcagctcccttggaactgaagttacagacaatcatgagccaccatatgggttctggaaactgaaccctggtcctctctaggagcagcaaatgtttgtaactgctgaaccatctctccaatctcaattcaaatctattctattctactgtttccccctcccccactttttatttctccttatttttggtttggtttgtttgtttgaggcaggatctcactatgtagtccttgctggcttggaactcggtatatagatcaggctagtcttgaattcacaaaggtctgcctgcttctgactctgcctctacctcttaatatactggcattaaaggtgtgtatcactatgacaaacccagcagtacagattctttccggcttctgtgacaaagattattcttcctcacttttgccttgggctttgagattcattagccccaccctcattttttcttattttattttattttattttttttgtggtaaatacacagaattacagaatcttagcacttaagagctgaggctggaggaaactgaggatttcaaggtgaggatggtgatgcaaagagtttgaggcctgactgggatatattgtgagacccctcctcccaaaaaagtaccatacttttctttataactaatactttaaaaaatatatatatttattattatatctaagtacagtgtagctgtcttcagatgcaccaggagagggcatcagatctcattgtggatggttgggagccaccatgtggttgctggaatttgaacttcagaccttaggaagagcaatcagtgctcttaactgctaagccatctctccagcccccaactaatattatttaaaagggcatttctatgttgctggagaactaggttgctgcagaatcttattcaatctgtgatacttcatttatttattttactaattcagtgtgtgtttgctgaccaaaggctaatcctaagtatctatgatgctgttgactctgtgtgtgtttgtgtgtgtgtgtgtgtgtgtgagagagagagagagagagagagagaaagagagagagagagagagagagagagaacagggctcttatggcttgaactcactgagtaggctagactggctggccagtgagcagcacagatccacctgtctgcctccctagttccctagttccctagtgtgggattccaaatagatgccacctcctccaggtgttttatgtgggttctgggcatcaaactgaggttctcatgtttgcaaggcttgcatttacttaatgagccctatctccagcctcaaactatgatatttctgaaggtcctggcagtgttcaccaaagcgtgttgaatgagcagttctgggcatttactgcagtgtcttggggcagtgggcaaagattccctgctcttgagccttctgactcttgcttacagagaggtgtatggggtcagaaaaacttgaaaggggattttggtgtgattgtagatttttaaaaaggggagttagaatgagattcacatgctgcagagtaagggagtcatgtgggttatatgaagtccttctttctttcagttttataaagaagacagcaatgggagaaactgagcataccccagtcctggaaaaccaatattctgctgttgtcaagatggactgatgtgattatatatgtatcaaaaagagttatttaacaaaaacttaaaagcattcctaaattaaaagacagatcactgtaaaattttgaatgccatcagaatatgatcactgtgtacatgtttgatactatttatgatagccattatactttctttttaaaaacaattactttatgtgagtacactgtagctgtcttcagacacaccagaagagggcatcggatcccattacagatggttgtgaaccacactatgtgattgttgggatttgaactcaggacctctggaagagcagtcagtgcttttaaccactgagccacctctccagccctaagtctaatttctttaatttcaactttttatttcatgtgtatgaatgttttgcctgcatatgcgttactgtaccatgtgtatacctggtgcccctggagggcagtgagggcatttggagcctctggaactggcgttacagatagttgtgagagagccaccatgtggtgctgctggcagctaaacccagggcctctgccggagtgggagcgggagcaaacagccagtgttcttaactgctcaaccaattttacagttccatccttttgtttgttttgatttttttttttttttcctaagacagggtttctctgtgtagccctggctgtcctggaatttgctctgtagaccaggctggcctccagctctgctgttcatatgcctctgttcccaagtgctggggttaaagaatgtgtcaccactgactggttctaattttatgttttttaagagcagattttattttacttttgtggtgctgggtctatcactaagctattctcagccttcagtgtcgtctaggaaaacccttctggctgaaaatccccactctgagtacaagatgtatagtggctgagcctgtgtgcattcttcatccatttttgtctagtagggtactgggccagatatacttcagtgctgaataggactttgggccttgccatttccagaagcctcacatgcatcttcagactcacttgtatcagacaccttgctgctgcttcagatcctcggtcttactctcctcggagcctttgatcacctttcagccctggctgctgccaactcagcctgaactctatccagactcactgagaaacagtcacacactttcttgtgcccccttccccctcctcctgctatgctcagcttgcagaagattcagtttgaggtagcctgtctgtgtgccaggtcttctgctcatgcctcacgggccgttggtttagcttcctgtttacccttggcctcctaggacttggtactgatcattacagagaacaaactttataggaagaggttgggcctattcttcctagagtggcttaacccccaaagcactggaaagacaaggattgaggcagtgctgctagagtttagtagcttttagctactcttagctcttagctgtgggatgggaagagacagtgttgattgataaagagtagagcttagactctggggcttgctaccatctgagtaaatctggaagctcatattacctcctggagcagcttcagctgctttctctgtgaggtggaggtggtggctctatgcaacacacggacactgcagtgggcatggccagctcttcatgtaagcacctggctcatgataatacttagtaaatgataattggtattgtatcctggtagacttattttaataatttgttagactgtgttgtattttaagagacatgcttttttgaacatggtgtgtgctaggcagtgaataagaatttgttgattgggttgaacatatagtagctacatcaggtttctttttactgacagtatcacaaatgagttatatgtgtgtattaatctccagatggcaggattgtgggatttctctgaagagcatcaactggcataatgttgctcagaattggttacagttgcacaaagaactgtcattctcaaactagaaggactctagtcctgattagagggcttaggagctgtcaggagtctaatagataggcagttcacagtccttggaaatgtaagtgatgaataaagaatgtaagtgttggatcttccattgatgacaagcagcatttattttatagctattattactagttttgtttttttgagacagggaattccttaagactcctgctgccttagcaccctgagtgctaggacaataggtacgtgtctccactcatgtcctgggctattgattggcacctaacttttttgatcttggcaaggtgcctggtaagggaaaggtgaatatgcatcaatagctaagagtattgttttcactaatgtactcagtgacccgtttattgtgttttaggagcattgacctgaagaagacagtggttttaggcttcatggagcttgctattgctagcacagtaggatgttttagactcatctaagccatgtgaacatttatagtgaaatatagtagctttctatgactagacttaggcataagggcatgtctccctcccaaccactccaccaggagctaaggtacaatataaccttgctgagtcctgcaccatgcttagtagcagaccgccacagcattagtcattcagtgctgttgctaggggccagtgaggtcacatctctcagacaagtacctggctggaaagtttctctggagacacatgtagcaggtattctgaccagatcagagttcaggtagggccctactcaagagcactcccaagggagcaggataggaggctggtttctccttgtgagttgctctcccaggaaagatgtatctccatccggttttggttgatctatgtttaatgctgtacattttttcagtgaaaaattatttttagtatttgctataacccttttaatgttgatcagaaaaataaataactgggggtatgcaaaaactgcttccagagcagaaatcaactctggtttttttttttttttttttttttggcaggaacccttttggctgataaagcctgtaaacccctcctcgagatgcataggattataaaggaggccagatttgtgctggggtataattatcagaaatggctttagaaatgtgcaatagtagtaatttgcacttactaacttactactgtgctaaccagccagatcaagtgttgggaataatcacttagactttgaaattgtgttgggtgtatatgatatttaaagatatttgcaacagggctgagagatgtttcagttgttgaaagcacagggcctgagttcagttcctattacctattcatgtcaggcagattcacaacccttgtaactccagctcttgggcatcggatgaccttttctgcttctccaggcactgtatataaaagtgcattttcatatgtgcacccccctcaaacaaacaaacatttgcaacaattagaatgtgataggaaagcaggtgggtttgttggtggtaagagtcacaggctgtgcttaaactacatcagtaattgagggctgcatccgtttctatgagaaggtcttgagaagtggcagtgtaactctgctcatctgggttcacagagcatctccttcagtttctgtgctaaagaatccctgctctagagtgggcctccttggtggtattttagatcacaagtcagccattatctctgggttgttcaaatggctgactgtgttcctattactttatatgcgatgagggtgctgtgcttagggttcagaggccaaggcctttaggatatagaggacagcatgaccttggggtagaaggagagaagctcgagaatgaaccccatgtgagtaatacaaagtcagaagcctggttggctatgagcatttcccatgtattgacctttctaatctccattattatttatcttttgtagatgagaaacaggcacggaaagattaagtaacttgcccaaagtaaaaactagatctgtcctgctctgtgattccagactactcactcagcacaagagcaccctaatgacaccgtgaggacagttagtgtgtaactgtagatgggacagtgggtcagaggctgctaacacgatactggccaaagatggaaaggctctctgaatgccaagctttaagaataggtgaaggattttccagcccagaaatctatacatctcagttttcaacttagacaaaattcatgtaataaataaagtctgatgtttctgagtagatttttttttttctagcagtttctgttctctttgtgcctgttatcatctgtttctgttatgacttcctccctggccaaagaatgctttttgggggtaggattttattattctttccaactagtgtttgtgcttacaccaccattgtcacctgattggatagggactggtgcatttcctaaatgtgcagtctggtgactctgtcacggccatctgatgcttgtacaacatgaagcaaaggagccttttgagatctggtttattttctggccttgtgtatgagaatgcatgccagtgtaagatgggagaggctgtgtgaggtcaggggtgcactaatatgcagacagcatcccagctacattgcattgactccactcctcactcctcactcccatgtaaatgcagcatgccctgacttccctgtctaggaaaagaggctcctggccacacagtgaactgatagtgaatgacagatcagattactgtggccaattctagctagacattttggggagtgtttcccaacctcctgccacagttgtggaatgtgacagatgagagtctaagccgagtggatgggtataagagtaacctgaactttgggcacttctgtaggtacatgatcgagtctgaagattttcacaccatatgcttacaggaatcttagtgcttacagccagtctttgtaacacatacttaccacacctttcatgatgggcttggttaactagttcctggtcccaagtgctggttggctgagatcagattcagcaccagctcatgtgatattatgggcattcatgaatttcacagaatgtcttagaagcccatgctaacctcattccatactctaacccatagcctgtgtgaaatgcccttatctcagactatgatttatgatcagaatgtttggttggctttttttcccatctgctgtaaggcagtgatgattttcaggttggtaaagagcaaatattgttcactgtcatggtctctcaaagattttatattgtgccaggaagcattcgtaaacggaaaatccacaaagcagccgtttctgatgtaattgcattaaggtctctttattataagttcaggcttgggctttcctctaattctaccttgagacagcaggacaggaagatggcaaagcctcgaaccttcagtaggacaaggttttataggaaatgggagcaagtgaggggctgtctagccttgcaggtatctaatagaatgactgttgtaagtcaacaggtgggtgctctgaaggaaaaccatgaacaatcataaacagtctgaaagtacatctgaaacaatcagactaatctttgactgactgttgttaggaagtagctagagagtaattttggcgtaagggccaaggacaagtcatggggtcctttctggtacttgggtgtagcttgggtttatgtgtaggtcaattttttttttttttattaaaacatggaggctggtcccaagatggagtaggtttgacctcttggttcctttctgcagtcttatgttttacttccctctttgaaaatttactttcatcttacagaccaatagtgggactcaacagttgcttaaaaaaagatttatttattttatatatgtgagtacattatcactatcttcagacacaccagaagagaacatcagattccattatagatggttgtgaaccaccatgtggttgctgggaattgaactcaggacttctggaagagcagtcagtgctcttaaccactgagccatctctccagccctagtagtttcctaataagtagcttctgcttaactttatttattttgatatagtctcgtgcagaccaggataccttgacctcgtagctttaagactagctttaaggtcctcctgccttcatctcccaaatgctgagattataggtcaatatcaccatgcttagctcatagtctctgatttcaataaacattcatcaaatacctcagacttggcaggctttgggctcgtggttgccaaggatatcagatgaaggaactgatgtggcagtggctggaagcagcatcacctgtagttagttaggattagggagctctgcgaaatgtgtattttcttttctctttaaagatttattatgtgtttgtgtgcatatgcacacatgtgtgaaggtacttgtagaggccagaagaaggcactggatccccttggaactagagttacatgattaagggtgaacaaccgtgtaggtgctgggaaccaaactggagccctgtatataagcagcaaagacttttaaccaccgagctatcactccagcccctaattacataattttaaaagatttatttgtgtgtgtacctgcatatgtgcacatgcaggtgactattgaggtcagaagggtggaattggatcccttgcagctggagttttaagtgtttgtgagaggccagagattgggactgggatccatatttttttatagatcagttagcattcttcactgctgagccatctctctagtctccttgttactggaacctggaaaggttaaggttgctgccctacgtgacataaaagaagtagacaggattcagacccaggcttctaagttctgaagcccagtcttggcctctgtgactaccctgtgtcacattacatactgatgacgttatgggagaagtggcgttggttgtgctttccaaatgggtttattcttcagtaccttgcccctgctgaatgagtggaagataggaagtattgggcttgaaactactgtactgctcttgttgtagggagcagaatcccgggtggactgctgtgagtgcttacacgggctatctaggcagcagttctccttggagagttacttatcagtgttgtgtttgtcagggtcatttcattgcacttggttctttaaggccattgtggaagagtgaatgtaggttggtaaccaggacaacagaaggagtaaggactgggatctctcaataagattgaaccaagagctgtggaaacatcagctctgtgcctcatgcacacacgtctccacagctttccattgagcctgttttcttttgctgcacactctatttaaagatgagaaaagacagtaaggggggaaaatacaaaatctaaaccaggtcatttaaaatgagcactttcttctccactttcctaaactacattgtcttaatttgtcttcccacatcttgtggcatggctaggggactggacggtaagaggaagtggggtgttaggaagggactaacttcaaatgttaaagtggaaagaacatagtttccagtggtactcctgggtctgaatcccaacattgttgataaatgagttattgactcttcgatctttctgccttagtacagtgagacagctcaagacctactttgtaggttatgagaagtaaaaattggcaggcatttgacatgtagtgacaaaaagagctcttatgtatatatatacatgtatgtatgtatatgctgggaatcaaacccagaccctctgcatgctaggcagatattataccactgacctatatcaccaccctgggttctattattcctctttttcctccttcttttttctttttttccaagacagggtttctctgtgtatccctggctgtcttggaactcactctgtagaccagggtggccttgaacttagagatctgcctgcctttgcttcctgggtcctgggattgaagacttgtgttaccactacctggcagtttctgttgttcttattaagttaaaaaaacatagagacctaaactaagttaaacagtgcctcagatatatcttcctttatcactgctgtgaaaggagaatggtagcaggccatccagatataaccctagctgttctggttgtgaccaccatcatgccaactaggtgaccctggcacttgatgcaaatcttgcttgataaacaacgattaagacaatcaattgagcattcatggccagctgtcgatccctagtacatttcttgattgatatttgatatattaatagcttttctttttctttttggaaattcaggtatgttgtgtgcctgcagccatctaaatgtagcttagcatagaagtccctgcttctgccatgacatgaagagacacttctgtcttgatactgcaagagatgtgctctgtgataaagtgtgctgcccaagcttggtttgtctgcctctttccttggtctcttggcattgtctgcctttggcaacaagttcttacacaccggcctattctgaaataggagtactgattagggagttttttgtttgtatgtaatgccaacatatgaagatgaatacttataagcaattttcaagctcctgtattcagtggtgtatatgctgggtacaatttagtttatattttttaaaaattatctttttaaaaaaatttgttagatattttcatcatttacatttcaaatgctataccctttcctagtttcctctctgaaaatcccctctcccctccccctgctccccaacctacccactccgacttcctgtccctggcattcccctatactggggcatagaattttcgaaagaccaagggcctctcctcccactgatggccaactaggccatcctctattatatatgcagctagagacacgagtcctaccatgtgttttctttgattggtggtttagtcccagggagctctgagggtactggttagttcatattgttgctccttctatagggctgcagaccccttcagctccttgggtaaaacattttctttttatttaatgtatatgggtgttttatctgcatgtttgtgtatcaagtatatgcagtgctcactgaggccagaagagggagttgaagcctctgaaattggactttagacggttatgagtgatcatatagatgctaggaatcaaacccagctcctggaagagcagccagtgctcttaaccattgaaccatctctctagatccacaatgtagttttaaaataagaattcacagggttagagagatggctgagccgctaagaatgcatactgctttttcagaggacccaagtttggctcctaacatccacattggacaactcacaaacacatgcaccttcatttctaagggggaatctaatgaggcctcttcaagtgtccacattcttgtgatgtgtgtgtgtgctcaattaaaaaaaaaaaatcaggccgggtgtggtggcacacgcctttaatcctagcactcgggaggcagaggcaggcggatttctgagtttgaggccagcctggtctacagagtgagttccaggacagccagggctatacagaaaaaccctgtctcataaccccccccccaaaaaaaaaatcagaattcaatagctgatcatggcagcgagtgtagtcccagcaatctagaggcagtgccaggagaattggattacacagccagactccttctcagaagaaacaaaagctgcagtgagatgctctggtgttccaacttgaatgttaccagaaagacagtgccaactcttatgtgttgctggaacacgtcagtcagtaacatatgcttggtatggagtttgacttttccaaaatgtaagtatagttctgcataagcagccacactgtgtgacctaacatttatattcttagctatctcttcaagaagaataaaaagaaatgtatgtacaaaggcttattgttaaatgtttctaccagtgtgctttctagtgaccctaaactggaagcagttcaaaggcatggccgataatgaataaacaaaatacaatatggcaataaaaagaaacccagtgctgataacaccctcctcaggaatgaccctcacaaaagcgctacttcagacacctgatgcaagagacagtatcgtgtgtactccttttcataataaatgtcctgaaaagacaaggagaaaaagcaaatctacagtagcatatggtagactgagtctagtgtagagcctgacgtatcgtaggcctgactattgggacatcttcctttgggaagatggaggtgttctgagcatccattgtggaggtggcagttagccatttgctaactatcattgaattatatacacttaggatgggtgaaatttgtgatataataagtttataaattaccatgcctgtcccattttactgatactcggttgatgctcttctgggatgcactacaaggtgggggctcaatccttgaagttttgaggttgggcatgcagaggctttgtgagtgctagagagtctaggagatagggctgattccacacagaataggaagcagcatattccagaggctcaaacccattgtcctggctctccaggaggtggaaacaggaagatggattgaggccagtgtgtaacacagacttcatttcaaaacacagaaaatggagttatagacaaaggtactttctaacgctttggctccaggcaggtcacacacatgcacctgcccaggagctatctggacttgtatatggaaaacacacacactcactcacacacacacacacacacacacacacagagttaatcacacagagttaattttaaaatgccttggctacctcaaaggctgggcattcctgaacctttccctgctaccccaggtccagtcagggaagtgactggtggccactctcctgaattctcacatggctggtcggctttctttcctgctgctcctgcctcccatcattcttccccaagtcattgctattctcctctgttcctctctgcatccttgcccacgtaactctaagggtcctgccctgtgccagccattgatattaagtagtaagtggagcaaaattaagggaagctaggtgtcctttatcaaggcctgactgttctgggcagagtggtacagaggttcagggttagagtttgtcatctagccagacacaggccgagacataactcttagaattcctggtagagcactgtatcctaatctgctttaggttgcagatgctagtctgagagtttagaatgtaaaactctgttacttccttcctccaacaaaatgaaacaaaagccatgatccatgtgaccgaggcgagtatttactgaatgaatgacagtgaggaggaagaagagccagcaggcttgagagaggtgggaaccgtcctcacagcctccactgagctgcgcagtgggttttcccgggagtcgtgaagctggccgcacttggaggttgaatcttcagttgaacccaaggaagctaaggggactcctgtttaatagtagatttgggggagtgattatagaaatgaattagaaatttcaattttctcttcactagtcaattataactgcagacaacattgcatcatgaaatgagccctctcccatgtatcagtatgtatgaatacgtgtggcacacaccccacacatactgttgttttttcctttgaggttcccacgtttcctgacttcattctgagttctagatttgctcattacttcaattagagttgatagcagatgacattctctctgtgaatgtgacgtttgtgttggaggtcccttgtttagtgtggatgtgttttattttttattttatttacttactttttttttttttttttaaagaaaattttttatgtagcccagtttggcctcaaacttgttatgcagctgagggtaatgacgtcaactactgatctcttggccttcctctctcaaatgctggatttatgtgatgttcagaattgaacacagagcttggtgcataccaggctgaccctctaccagctgagctacattcctagccaagttttaaaaagcatcagagaactcagagaagtaaaagttacaagtttcctgtactagtccaaaaaagttgcagcaatctctatagacaaacctttgtcatttgagtctgtagttactcaggtgagtgtgcatcattcagtatatgctttccaagaaggcactgagggggcaggtgagggggctcagcaggtaacagcgttgactgctcttctaaaggtcctgagttcagattccagcaaccacatcacatggtggctcacacacacaccgtaatgagatctgatgccctcttctggtgtgtttgaagtcagctacagtgtacttatgtataattataaataaatctttgggcaggagcagtcagggactgagcgagcggggttgaccagagtgagcagaggtcctaaaaaaattcaattcccgacaaccacatgaaggctcacagccatctgtatagctacagtgtactcacatacataaaataaataaatcttaaaaaaaaagaagaagaagaagaaggcacggaaagtagattagtattccctggccaaatttaaaccttcttataatgaaggcagactggctatttaaaatagtattttattttatgtatgtgtttgtaaatatatatgcatgtatatgtctgtgaaggccagaggaggccattcacattccttggagctggagttagagctttttgtgatccgtctgatctgggtacttggttctgaattcctgtctttatggttgagcagtaagtgctcttgagtcggatcgatcgtttacttgcttgttgtaggattcttctcctttgtttcctgggatacccagtacactcaccccgacccttttaactcttattttaaaagtctatggatatatttttttttcctgtcttcatattgtgtccttctgtttaaaagctttcctagttgtttttttttttttttctttttttgaagatttatttattatatgtaagtacactgtagctgtcttcagacacaccagaagagggcatcttatcccattatagatggttgtgagccaccatgtggttgctggtatctaaactggggacctccagaagagcagtcagtgctcttaactgctgagccatctctccagcccggtttcctagtttttggctatggaatttgcatttttatttttcacttgccttactgtttctggatgacttggggaaggaaggatggtaataaaagttcttttctgcagagactctgtcatatgtaagagagtggtatcaggaatgtttaaggaaatcattactactagagaaaatttaatcaagctgagaagtaacaaatgcataagagcctctcaagtcaaggctgacaaagtcgtgccgacttccccagagcaagcagtgggtgctctgtgttggggaaggaaagctgggggaacggtgtagtttgggtgttgggcaagggtgggggaactgtgtagtttgggtgttgggcaagggtgggggaatgnnnnnnnnnnnnnnnnnnnnnnnnnnnnnnnnnnnnnnnnnnnnnnnnnnnnnnnnnnnnnnnnnnnnnnnnnnnnnnnnnnnnnnnnnnnnnnnnnnnnnnnnnnnnnnnnnnnnnnnnnnnnnnnnnnnnnnnnnnnnnnnnnnnnnnnnnnnnnnnnnnnnnnnnnnnnnnnnnnnnnnnnnnnnnnnnnnnnnnnnnnnnnnnnnnnnnnnnnnnnnnnnnnnnnnnnnnnnnnnnncttgtattgatccctgataaaaaaaaaaaaaaaaaaaagaacctcactccctagaggtcacaggttgcctgaaatgacacagctaaaactgctgtcaagaggatggatagagccaggcagtggtggtgcacgcctttaatcccagcacttgggaggcagaggcaggtggatttctgagttcaaggccagcctggtctacaaagtgagtcccagaacagccagggctacacagagaaaccctgtctaggggaaaaaaaaaaaaagaatggatggccagggtacagtggagagtgggggttctcatggatggatcccttgagggagatggtttggtttctggttttctgctctgcaggagggcttaaagaagcagaggtgtcagagggcggcagcagtgaaagtgtggccttgtatgggtgtgggaatgaggaatatggaagtgctgaggtggcctgtgctgttcaggctctgcttctccacctgccctggcagcatgataggcccagggaagagaaagctgctgtgaacacaaccagaacagggggaagcttcagtgaggcagagcctttaatggggaaaaaaggctactttactgaaacctttggggggtgggtaaggactttgtgggtgagtgtacatcattggccaggcagggccagggcattggggatgcctggtttgcagaaggaggaattccaggtgctaatggacatgattttataagggagaggaagtttaacctggctactgagctgtgtgaccttctgcggtggtggtggtggggctcagggctacttacactgggacatgcaggcccctaacagggaattagcagtgccactcctgctgctctcagaatgagatttttcagagattgtgagcctctggtgctcttgcaggctatcactgatagggagttgtaatgggtcttaggatgttttcttttcatcttgtaaataagaagtattgcacaggactggagctgtaactcagtggtagaagagtacttgcttaagagtcatgtataaggccttgagttcacttcccagcatctctctctctctctctctctctcacacacacacacacacacacacacacacacacacacacacacacacacacacacaagagttgtacagaactgaacaagtaacccagtgagcatctcattcctatgggttatcctagccagcttttctcctccttagatgatctattgctgcgaccgggctgattggcacagccttggttgcttgtatagtaaagagaagtcccacttcttacagtgttccccagtaggttctgtggagttctagttgttcggttgatttgctggtggtgtttttgaatactgaggcctcttttgtctcattctccaagcatactttctcaatgatgctcaatggaatattccagatgttgaggaaaaaaatggactgggcttttaatgacacctgcctgtgaaggttgagaaacatctgcaagttcattcagtacagggatttaatcctgtcagtttattctgtgtgtagaagggaggttgggggaggagtgagtgacaagagaaaactcagtcatcacagcttgtagtttggttgctggtactgccagttgagtcccaaagaggaaacagcatcattgctgtttaaacaagccctttgtttttgttttctttctttgtttcttcagacaggctttcctatagggcactggcctctaattggctgtgtagccaaggatgaccttggttcacctcctgagtcctggattttaggcatgtgctatcatggcaggtttatgcagggttatgttaggatggaacccagggtgtcaggtatgctagacaagcattctatgggctgagttatattccagtctcaagctctttgtgatgtttatacgttttagagtgttttagggtgggatcttgctaagttagattttgcatatttttaacagtgattatttcagtaccttaaagctttagaattgaaagagatgattgttgacaggatggtggtgcagtctttaacctcagccatcaggaggcagatgcagatgcaagaggatttctctgagttcctggccagcctgctttatataataagtccaggtcaatcaggaatacagagtaagaccccccctcccgccttctccctccctccctcccttctcttcttcctcctctttctcctactcccccttccttccccgttcctcctcttcttcctcctcccccctccaccagtgaaggacagaagagatgatggtgcttgggtattatcagttggcagtggtaattggttggtttataactcattttgacatgtttgtgtcttaagtatatgtaatattgcatgaattatttttagatcctatatcaatcttatttttgtcattgtcagaggaattaatgaaacattctcagagattatcaacttatataaaatcatccatggaatgtctttataactagtctagcaattaggaatataatttgatttattttcatggtatgatttatgtttcgagtgagaagtgaatacaggtccttaaacaagatcaataaaaacaagtaagataatagtttatcataggtatcagtttttttctgaaatactgtaccattgcatgtcagtggttagggaatgctctctgtggaacccagggccttgcacatcatgtcttgtttcaaaactgaccatttccaaagcagcagcaccttccatgttgatccacctggatcattagtattttcatttcccatgctgtggctgtctccttactacttgggggacagtagtcactgcaggcaagagttgcatttggatgctaaagttcctggttgggagtgtgatgagatagagggcttgcatggtctcagagccacctgttagacaatatcaaggacactgggaggagtggtaacgttgagtgtggagagtgctatactctagccagtcaggcatgatacagtgagccctggacatctcccatctcctggtaggatacacgcactggcgcatctgttatttgtgttgatacttgccaagcactcaggctgactttgagtcatgaggaagcattagatatctagtccgagggatgatctgcagacaaaagtggccagtgttctaggtgtccatgatagccaaattggcctgggttggagaagacatgatgacttcagacagtccaggactctggaccaggaaaagtacaccagtgacggtagttggcaaaatctggatatgactgggcgttatttaataggttgtatgttgataggtctgtcctgactttggtcactgttaagtggggttctgtaagtcattagcatgtagcagagcttgagcaagcctgtgcttctttgcactatttttgtaagtttgaaaatacttaaaaatgaagttaagcaatgagaaaattagtacagcagaactgggaaataaaggctgtggtagacatgctttgtgctagcactttggatgggtcaggaacttttctttgcttcaggagtgtctgtagtggggctcactgaggattctgggtaagggatcctgaaaccagggagtggtgggtacatggaatttcagctctctgttgacaaggtcttgttaaactaattaactaattaattaatctgcttatttttgtatgggtctataattatgtattggagtgtcctgtgaccgtaggttacctgagcttgctgtggttcccagactccctagttggaaacgtagccttgtaattaacttaatggtttctgtttttattgggttgctttgaattcaggtgagtccatggattcttctgcagtgagtcatatattcagtttgatatttattggttgtggtttaggaagaactgattttaaaagctgatttattttacttaaacttgaagtattatactagatgtatgtcttattctcagaaaagacaagatttttcatgtacatattaaataccaaaatattggcttaggttctacctgggaaccctatggtaggttgtcatagatagttttcttttgctgtgataaagaccatggtgaaaagcaacttgtagaggaaagggtttattttatctgacagcttacagtttttgtccatctctgagggaggccagggcaggaactcaaggtaggaacctggaggcagggacttaagcagaggccacagaggtgtgctgcttacattactggcttgcttctcatgtcatgctcgacttgctttcttatacaactcagaaccacctgccctggtgcactgtacaccatgggcttgacccactcacacatcattgttagtcaagaaaattcccccacagttttgtctataggccatctggtagaggcatttttcaattgagggttctcttcccagataactgtagtttgtgttgattgtcaaggacctaaccaggtcataggtaataattagaatggagggattggactgttttgaccagcatggaaagaagactgtgggtttgggaatcataagacccactgcgttagataatccttcaacttttctgatttttcaacttcacatctgtaagtctggactaagtagtacatcatgtgaagttgccatgagcattgtagaagcaatgtgcagacacctcagatgcatggctgcagtttttacacggtatacagttgaaaatctgctttgtttataaatgcctgtaacaatagtagcatttgtcagtgacaaatctataaagattcagtggctttaaagtggtcatttacttattgtgagggtgcatatgtgtcatggcatatatgtaggaatcagagaacactttgtgacagttgctcttctttcactatgtaggttctagggatcaaactcagggtatcaaccaagtgcctttgccctctgagccatctccctggtttaggtcttttgtcaggaggtttgcccctatcttgttagctcagaaaaacaggttttctttcatatcttagccatgttggatatgttgcccccaatttaccagtttcttgtcaccacctgcaagacatttattgtcttcatctcaattcatttggtacaaataaacatcagatttcttacagaagaaaaatgttatgagacaaagggacgagaatgcacgtggacaccactggagatatgtgtatgcagtatccacttgagcttaggttggagtcttggcttctctgaggaggaccagatcactattctcagtatctggaagactccaagccaggagagacccctgcttttaatggcagcactttggctctaagtcatgagtgctcatattggaggtctgctgggtctaaacagtaaattctagactggcatggaatagatagtgagaactcatcttaaagcaacaaaaaataggagagcatactttctttagtctaagttggttatgagtttgctgtgtgggtccaggttaaaaaacaggtacgtgtatatattaatgtctgtggagagggaggacatgaaagcagcctcgttcaaggatagcagttggtaatttggggtgaagggtctctgggaggttgttggatctcaggccctagttatttttctggcagttttagacagagggaccgagggaaggttgaagtgggtgggcaagtgaagagggtatgtaccaagtgacccagagagtaggagctcactgtcaataacaactgttagttcttcctttaatgtaaccttttttccctgagccaggacagaagtcccactggatacaaagatctggataggtaaagagtctaattggctgctgtgaaaacctcaggaaagttctaaatgtgaaattagacaacaggtagtttatcatggaggggatggtggttgagacaggattttttaaaattataattattttttatttgtatggttattttgcttgcatgtatatctgtgtatcacgtgtcatactagggcctgaggaggccaaaagagggtgtcagactgtctggagccagagttacagacagttgtgagttgtcatgtgagtactaaaaactgaatcccagccctctggaagagcagctagagcggttgaccactgaaccatctctctacacacagacaggatttaattatatagcccaggtggcttggcttcagacctacagtcctcccggcttaccctcctttcccctaggagctgggattacagagcgatgcacttgcacctggctcagaggtcaaccttttgaagatgatgatttatgagacgtttgttacagtcagagttttattgatgtgaagagacaccatgaccaaggcaactcttataaaggcaaacaaacatttaactggggctggcttacagtatcagaggttcagtccattatcatcatggtaggaagctcggcagcatccaggcaggcatggtgctggagaaggagctgacagttcacatcttgatctggatctgaaggcaggcagaaggaggctttcatccacatggtggggtttgagcatttggagaccataaagtgcacctactacacaatgacacacttctttcaacaaagccacacctcctaatagtgccatttcccatgggccaagcatattcagaccaccgcaggtgtatacaaggatgagcaaaaaagcagaggcagagccattaggggtcctaagttctcagaactcaagtccttcctttttcctgttggggagagtcacaggttagtcaggttaacctgttccctcccttccttcgtattaatttacctttcatttactatttgatttcaaaagtagtattttctctttttcttttttatcccctttttcttttaccttcccttcctacctcttctcgctccccttcctctttgagacagaatcttatgtagccaagactgatactgaacatgctatgaggctcagactgaccttaaactcctaatcctccgtcctccactgctgagtatgggttataggtgtgctggcctgctggtatttgttttcttattgcaaagtttacattcattatcttttgctgttcaaaaagaattttctaaactacacttttttttgctaactctcattcctttttttttttcatgtgcatggcaacattgctgtctggaactcaggggccagccaaaggtaagagttctacacatgatgcttgtagaaagagattcctgtgcttattcctgaagtactggacattttcttatcaaaactgaaaattccttcttcctgccggtttataaaagcaataagctgtcatctgtctcacaactccagagctgcttattggcacagtgtgttctggccagctctgcccagtctcctagcagcctaacatgggttccttgtgtgctgtggattagcatgaaactgattgttccagactggtcactctgtgccagtccagctcatcttactcctaggcagttggggtactttgccagacccatgggctcccgatggagccctgatgacctgatgatgggctcctgctgcttctagagactgtgcttgcaacttacattggagccaaaatctgagactttaaaaaaatttttaattacatttttttttttttttaaaaagagtcaagtccttatttttctgttactatagtgaaatacctagagctgggttctgacttccttcttttctttaatttatatgagtactctgcagctgtcttcagccacaccagaagagggcatcagatcccattacagatggttgtgagccaccatgtggttgctgggaattgaactcaggatctctggaagagcaatcagtgctcttaactgctgagccatctctccatcacttaattacatttttcagttaatttttttggcgtgtgttgcatatgtgcatggtcagtagaaaactttcaggcattggttcttttcttacactacttggacaccaggtatcaaactcagacttgatggcagacccctttactcactgaactaacttgtgtggcagagttggcttctttgttttctgaggatcttaaatcttttttttttgtttgttttgtttttaagatttatttgttttatttcatatatctgagtgttttgccttcctgcatgtatgtgcaccatgggctcatggagctgagaagatgtagaatcccctggggctggagttacatatagatggttgtaagcaccatgtgggtgctgggaaccctgtcctctgaaagagcaaatgctcttaactgctgagcccccatgggtcctattcttgcaggtcttctgtcagcaggaatcctgctttaactggacagttctctggagttacttaaaccttccaggaagttcagcttgtctagattcttgagcttgttgttttacagcctgtggttgagctgtatgtaactctgtgctgttactgttctgaaatatgtgtacatatgccttttgggatccccagtgacctttgaaatggtgcttgaatgtgacactggtcttcttatgtttgtggactttttgctatggaagggtactgggttaattttgcttttattggagcagaagaagatggagaccagtaaagatgtgaggaaaccacttcacaatgttacacacttgtcatgtttcattttctgtgagctgttctcactgcttagagaaaatgctttgcagacagaaaacacggaaggggaagcctccatccttaacagattgcttcctctgggggagaggtggagttggcaagtgggagaccaacatttatttattataaaatgtattaatttattgtgtgtgtgccacatgtgtgtgcactcccacatgcttactctgtcatgcacgtgtcaagcatgtgtcaagcacatattggtcataggacagcttttgggatcacctgctgaatcctggggaatcaaactcaggtcatcagtcttggtggcaagcacctttaccctctaaaccattttaccaccctatttctattttacatttttctgtcgaatttgttaatatgactgtgtattctctgttcattgaaaactttgtgattcaaaaaactaatgtttatttagaaagaaaggagcaagggggggccagtgggagaggagaaaagttaaagcagcatatgtgtgaaatgacacagatgccagcaggaagcccactgctttgtatgttcacctaatagtttataattaaaaaaaaatggcactgggcatgtggtgctgcacacctttaatctcagccatcaatgggcagaggcagctggatatccaggagtttgaggccagccttgtctcagaacaaaaccagaccccaaaaagctcaaacttaagatatggtatggtatggtatggtatggtatggtatggtatggtatggtatagtatttgctacttataatggaaagccccccccaaacacaaaaaccactcagatgaaaggcctgcttcataccaaatctaacttccaactttaacatcaacaggttagtgcagttaatctagttgattgttgaggatcaaacctggtaccttatacatgtcagataccaagtgctaagctacactccagcccattcctacctattcaacaaattgatttctaaggaagcaaagcatattattagcaagagaagcaaacatggcctcttgaagccagtgtccactgcaccatatttgacagaaggaacagactctaaggctgtaataagctacacaaaggactgttatcaggacatatttgactgttatttgtataaaatactcattaatttggatctgtcagtggagcatgcatggatatagtgtgattatcatctgacttcatgcagttttgggctagaagatatttatagtaatttataaaattgctaaaacttgaagggagctcctcagtgtttctggtaaagaagagctactatttattcatcttcagctttgtgctcagcggtggcacttctgtaaacaagaatccctgtttctctaaaggcttctttctttgatttaagttatgctaatgttttatgtagggtttctattggtgcaacaaaacaccatgaccaaaaagcaagttggggaggaaagggtttattcagctcatacttccacactgctgttcatcaccaaaggaagccaggacaggaactcacacagggcaggtactcaagcagggcaggtacctggaggcaggagtgatacagaggccatggaggggtacagcttactggattgcctcccctggcttgctcagcctgctttcttagagaaacttagaggactacagtctaggggtgttcccactcacagtgggctaggccctcacccactgatcactaattgagaaaatgccttacagttggatcttatggaagcattttcttaactgaggctccttcctctctgatgactctagcttatgtcaagttgacacaaagccagtcagtacagctgattctttgtcatcttgatacacaaaaacatcactgttaagctacaacccttccttttttatttatctccaattaaaagcataaaaacataaataactcacattaaaaacataaataacttaaaatttcccacagtctttacaaagtcaaacacgttaaaacttcacgtttttttggtgggcagtggtggtgcatacctttaatcccagcacttgggaggcagaggccagtttgatctacagaatgagttccaggacagacaaagttacacatagggaaaactttgtctcgaaaaacaaaacgaaaaaagttttttttttccatttttttgaaatactatttattatttatatgagtataatatagctatcttctgacacacaccagaagagggcatcggattccatgacagatggttgtgagccaccatgtggttgttgggaattgaactcaggtcctctggaagagcagtcagtgctcttaaccgctgagccatctctctagcccaaaaaaaggcttttaaaaaaatatctaatctgtgtaaaaattcaaaatctttttaaaaaaagttaaaagtctttcagctatgagcacctataaaaatcaagtttaagtattttcttatttcaagagggaagaaccagggcagagtcacaatcaaaccacagcaaaactgagttccatcagtgtaaacaacacaaaatttaatgaccgggatccactcaccatcttcttgggtcacttcctatgctctgtcctcagcagcacacattgcttgtcttctaggctctggctggctccactccactgctgctgtcctaggtggttatcccatagtacatatatctccaaaattcctggggtcctctgctgcagctgaactacactttaaccaacaggttaaagtatcttcatggtatcaagtctcaacttctcctcatgatcccttcactcctgggtcttccagtgctatggaggctggaccttcactaatggcctctcttggcttctcacagtgtaagcctcagctgctctcagtgaccccttcatgcctttaagactagtaccatctgggtgactggtacattaccaagttctgctgccagcacaagatcacacttcagccagttctggaactcagtttttctgtgctctcaggaaacacttcccagaagattttatctcagtgatgctgctctctattactgctaacttcttagctcccaggaacacagaggtttcattttcttgatactggtctcttgttaattgtggcttactcttcagctcttcagcccctgctgaccagaacaacagactcttaattcaaaatagcaaagaggggtttggggatttagctcagtggcagagtgctctgtcctcagctccagggaaaggtggatggtgctgctggtggtgggagaacaaaattccaaagtagcaaacagccccgatagcgtctttaaacttccctctgaaaccttacaagccaggcctccatctcttgtactgttgtcaatattcttatctttcaggctcctgaagaacatcccactaaactctttaacactcaatggctcttctagctcaaagttccaaaatcctttcacaatcctcccaaaacatggtcaggtgtgtcatagcaacaccctacttctggtaccaacttgtcttagcccacaaaggactgagctctcccccactgatcactaattgagaaaatgccttacagctcattcctttgtaatgtctctagtttgtgtcaagttgatagaaaatcagctagtacagccaggtaagtgccggcaaacttgggtagatacttcatgtggaagagtaagagacagaacgactgagactattaagaccctgtttcagaaaaccaactagccaaacagaagaaacaaactttctttttatagctgcacacacagagatgctattgtgcatatcatctcccaggcttactttttgcttaccattatagatggttttcatgtaagatggatctatatcacacagttgtcaatgtgggactatatgcatcactgacccccactgtctggcatcaggtattggtgttttatctgaggggtgggcagctgaaacatgatcactgtgtagcctaggccggcctgaaacttggctgtcctcctgcttcagtctctcaggtatcgtcaggcctattgagtaagttggttaacaatgctatacattattataatggcactgtgtgatgttaaggtttgttctttatgcactctttttatgttttctctctaacagatctttgcttatgatcactgtttctggtccatggatgaatctgtccgagagaagtatgcaggtaattgagcagtttcctgggcacttagaagcgtggaagcattttggtgtgctctcgatccactaccatggcatcgtttggtgtaacttataaacagtgtccagtcagctgcttccagcatttgctctgaaaggttttgtgctgtctagggaccaagagacttcagtgtgatgttcttgggggtgagatgatgaatatctacgactataggatctcacaaaggccctttctctttcatctcatgggaccaggagctacatcttagtcttgcaggcccccgtgatatctgtgatgtggtctagagggacctggcataagtagagaggacccctatactggagcctaagttctattccttaaaaacctctgtgatgcttgccagttcttcagtcctgccagagagtcgctcttccctctgtaccacgaccccgggtctcagtttccttttgccctgttatactaccttcccaaagataactgtctgttttcatttctccgtgtgggtgctgagagttgaactcaggtcctctgcaagaacagcaagtgttcttaacttatgaactctctttggaccctatttccagaatctcactccttgtcataactgttatgaattgtaggttgtataacttcaaatattcataaggaaaaagaaagggagtaattgatgtacatggtttttctgaactctagtatactttgaataaaaggatggtatgtagtttcaggcacatctgggtcctaaatttaaattttagatgttcagggctggtgaaatggttcagataataaaggtgcttgtaccaggcctgatgatctgagtttagtctccaggatccacatagtgaatggtgaaaaccaactcctaagattgtcttctgacctccatacatgtggcaacacacatacacacgatacacatacaataaatagagaacattgttgaatcttaggtgttgactgtaaaataagcaactcttgagctctgtattgcatggcctggtgggtgtccttgttcaaacatgtttacagaagacagtttactgactcttcttcttattctaactagaaataatctatggttcagaaggtgttgggcttccaactttaaataagctgattttgtgtgtgtgtgtgtgtgtgtgtatgtatatatataagagagagagagaatgagatttttgttggatttcttatttgttcatgtgttctttgcccataaaatatcattttcctgtcctttaggtcaagaagatgttttcaagtgccttggggagaacattcttcagaatgcatttgatggctacaacgcctgtatctttgcttatgggcagacaggtaatgtgaactagcctatactcgcacagttgggcatcgatccatgaaggtgaagatgaagccatgcttaccgggccacactgcttacttgtcctatgttaggttctctcacaggtgataaaagtaggcagtacgatgttttctaagacagcacaggaaaattaggattaaagttgtttgtctttatttttttcctatgtgaagtttctccccttcctcccccttcctcctcttcttcctcttcttcctcttcttcctcctcctccccctttataacttgtcagaaatcaaaaaagaaaccagttatggtgctggagagatggatcagtgatcaagaacacttggtattcttccagaggagctgtgttacgttcccagcatgtacatggcagctcacagccacctgtaactccagtccaggggacccgaaaccctctgctggcctctgtgggcactaggcatgcaaatggtgcaaaacacacacacacacattaactaaaaactaacaaaaaatatttttaaaagaacacacttgttaatatcgtactagtcataactggtaaggactttaggcatttatactttgtaattaaagaaataaaatgaatttaaagtgaaactagttgctttcataacggtacgtcatgtggtatgtccaactgaacactgttcttcatagcacagtgtgtatgatagggttgggcatcatatgcatgttcaaagaacagaaattctgagccaggcggtgccaactcctctttctcctgcctctcaccagacgggccttcctgcctccttgtttcctcactgtgaaatgttgagactgcagatcctcccacaggatcggcatgatgatttaccgtgtgctcacttcaggaagggcttggaaggttgggaatagaagttttaggtattattacaggtgacacagaagcaacctgtaaagttgaaagcacacaaatatcacagagccatttggtactgggaggggcagaatatacctaagtgccatgtgttgatttaccgtgtgctcacttcaggaagggcttggaaggttggaaatagaagttttaggtattattacaggtgacacagaagcaacctgtaaagttgaaagcacacaaatatcacagagccatttggtactgggaggggcagaatatacctaagtgccatgtgttagctccgggtagtggagctgtagtagtttagtcttttccccttttcatttgtccatgttttatggtctgtccctcccctcccctcccctcccctccccatttttttttttcctgagacagggtttctctgtacagccctggctgtcctgggactcactttgtagaccaggctggcctcaaactcagaaatccccctgcctctgcctcccgagtgttggaattaaaggtgtgtgccgccacgctcggctactgagtcatctttaatgaatatttcattcttgtatattagaggcagattattgttccctgcactattacaaaaaggcagtaagctgatttgccctgaagcccatgagtacctgtgacttttgtactttgatttcagtagttaggaatatctatataatggtattgtctatttgtcttccttccttccttccttccttccttccttccttccttccttccttccttccttccttccttccttccttccctgatccatcgtgattattggagtctggctttgaactgaccctccgtcccctgtctcctgctggattagaggctcaggccatcctgcctggctgggcttttttctttctagaccatgtctacttttgttctatacaagtaacgaaaagcttatgttccatccttactgtgctcttcttactttatccatgtacatgtatatttgttatattttgtgaattttgctaagtcctaaaaattgattgtagttattagaaagaggattagatgccttaaacttctccaagaagtattaatggctgctctttgtctttcagggtctggaaagtcttacaccatgatgggcactgctgaccaacctggattaatcccaaggctctgtagtggactctttgaacgaacccagaaagaggaaaatgaagaacagagttttaaagtcgaagtgtcgtacatggaaatttataatgaaaaagtccgagaccttcttgaccccaaagggtaaaacgtggatgcttgagtgctgtgtctttctgcaagcagacataacagactgtggcttcacagagtttgtaactgaactgtagtggagagtgacctagctctgctgttcatatttatgtttatatgacttatgtttacaaggatcagctccccacggccagttctgggttgttagagctggcagagtgatgattcaggtctgcacttgtgccatgctgcctgtcctctcatcacctaaagccacagacaaaacaggtgacgaaagtggtcatttaggatgagtgtggctgagccgtcagtgacacagactctttttctttcttttttttaaggcaataaattttagatttctgtggttggtttcaggcctgagggggaagcgaggggggaggtaaatgcagagtttggaacctggtcttaaaataatctgaaagccctccctcccacttggggtaggaggtcccatgacttcatggagttgactttgaaagagaactgcttcagagtacaaggaggccctcagaatcactttgtttaccctgcagccaggagggaaacaagcagagagaggtagctgaggaacctgtgtactgcagagcagggacggagacggagacagggcaggggggagagggagtgaggagcagtgattgtggctgtggctgactcacgtgaaactgcattaacagggtcagagagccatgggattacagccatagagctgggtttggatcaggaaggtggcccaggaaagatgatatgagaggcagagaatcccagtgaggcttaagcaagagcaaacaggtctcagtgcctcacagcatctttctttggccagtatgctcttcaagctggggcttgaattggtacttgatatggctgtccaaactttacctactcactgtttatcaagtcattcttacaatgccaggcaccgtgcagttcagagaaagagcccatagtctggagagaatgagttttgctaacaagttagaggagcatgcagtctgctttttgcttgtgagggatgccaacacaaaatagagggcaaaaaggaaagatggcctctcccagagcccagagaggatcccacagaggtgcttggtgaccctgtgctgtaggagtttatcctctgagaaatgaggtgagaccagcctgtgccagcctgtggaggtgtctggttgtcacaggatgatcaacattcagtgcagctgaaggatagggtgtgtagagcaggaggccagagatgggttgccatggctcaggcacccatattttgctccctgtaaattttaattctgccttcagtgattttcttgtattttgacctctgcaaagacggccactttctctgagatctagctcagacctacacttcccagaaacagtaaactggctggcttcattgcttttcatacctgtatcacctagtgaactggcttaagtgtatcagatgtgctttgtcttgagtggtctcctgtttgttttgtatgtggcttaacgctcagcacgtgggctttggagttacagagctcaggagccaggtcctcttgtttgtggttgagcaggttcctcgcaccttctagagctatatagggaatgtgtgatgttatcacacagtggcccacagggctgttgtgaagattgagagcatgatatactctaggtctcagaacttctagcacacagtaagcacttaacacattttagctgtgggttttcctgccgaagtttcttgaggattaagaaaaaaaaacaacccttttttaatgtaaaaacttgtatttatgtgtatacgtgtatgtctgagtgtatatcacatttgcagtgcctgtggaggtcagaggagggtatggagtcccctggagctggagttacaggtagttatgaacagtctgatatgtgtactgagagcagaactccagccccctgcaaaaacagcaagcacccttaacagctgagccatctctccagagcctataaacatttttgtatctgaaaagttaaaataatggattaaaagttgtaaatcagatttcatttcacccagagtatttgagaaaacttcattcttaaaattcaagcactgattttattaattcagtgactataatgtatattaatgaaatcatgttttgcttgagacataatgtggtagatatacattgtctttaagaaaaaggggccaggaaggctggagagatggctcagtggctgaaaaagtacttctgctctttcagagaacatgggttcaattcttaatatctacatggtggctcatatcgtctgtgactccagatccaggggaagtctgtcctctcctggcctctgtgaacactgtataaattgttcacagatgtagatattgaccaaatacctgttcacataaaaaggggcatggcactgaggagacagcttaggttgtaaagtgcttgctgtgcaaacatggggacctgggttggattcctagaaatcatgttgggtttgtttttgagacagggtttctctgtgtagccctggctatcctggaaaccactctgtaggccaagctggccttgaactcaaaaatccgcctgtctctgtctcccaagtgctgggatcaaagatgtgcgccaccactgcccggagtggttagtgcttttttttttttttttttttttttttaaattgtgtgtgatctgtgctctatgcttgtaatctcaggattgaggaggcagagacaggcatacccgtgaggctaaaagaccagctggcctagccagtcatcaagattaggtcccagtgagaaaccctctcttaaaaagtaagttggaaaacatccaaggagtgacacctgaggttgacctctggcctccataggtatacctgttcacagacgtgcctacacatgcacatatacccacatacatacacatacacagttttttgttttttttttaaagggaatactgaaaggctaaaagttaatagcagactgtatcctggtgtacgagctgagcagcaatccagttcttgtgctatgtctgctggagctgaaatcacataatattacaggaccacttgtcagcatcagcattcatgtaccattgaacccaggagctgtggtccatatgctggaagacaggaaagcttttgggtggcagagccatttcctggtttccccactttgctgaactgttcgtttactcttccagtacctctgcttcattctcatacggtggatggagtagatagggttccaggttctctgtgatctgtactgtctccaagcccacctaccccttctctgtctgtctccaagctcagctgataccttgcaagtccttgttggtaccttacttttgtttctactttgttagccaagtgtgttaattctctgagtgactcttaggtgccagggattatagtaagaattgtggaccctgaaactattattaatacaaggtattcttttcttctagagcccaaagtctactaggcaaataaattctgatctatggtagggatgagcagactctgagacaaggcaatagatggggacagattgtaaaagagcatgcatgttagattgaggagcatgacccttacactgtagcaaaaaaacaccacagaatgttaagcattctagttcattatttattttgaaaagacaacccgtttctgtggtcaaatgaacacatagtaaaaagtatagataataaacaaacaaaaaactataatcacttgggatttcactattagtcagtattctttttaaaaaataatttttgtaaacagtactttcatttacagagtacagtttgggtattttgggatatgtagacattatgaaatggcttcctgtatcttttaccttaattgtcatttttctgtttttatggtgtggtatgaacaaatgagacccacccccagcaattttgaaataatgatttacacgatgactgctgtagtcaccatcctgttggtgggtcttagggtttacccctcctgactgaaacttggtgctctttagccagtgcctggacaggtgttcctaggattcgctcagaaccctgagggggccacggctccatgtgtgctgggaggtttggtttaaaaactaacgaacgtttactttttgtatttgttgaaacagtcatactttccctctttcctctggtgtgtcagtgtgataacgtgtgcagacccccttgttaggacaaccagacaaattctagataagctctccactgtgcctttaaatctctctttaaaacaaagggagagccctttgttgtctttgtatctttgttcatagctgagttaggcctgtggtttttctttcttgtgtagttaatacttacaaagcttctgtcttgagactggttctgtgatatgacaaggagattgttggtatttatttgactctgcattctttacagtagtaaatagacttcccacgcttacccttttgagcgatgtggtattttgccacattatcaagcttttcttctcagcaaggattttaaagttaggcttaaatctttgcaggatccagtgatctgctcttctgtattaggggttctctctagaagtgcgtgtgtgtgtttctgtgatgcacaattgagtctttctaaaagtctctaatggaccttgtctctgtcgtgacagaagccgtcagacgttgaaagtgagagagcacagtgtgttgggaccctacgtggatggactttctaaactggctgtcacaagctacaaggtaacagcatcctctctgtaaggtgcttcaattgattgccattttggctcattacatttcttgattttcgaatagttatttaaatttcattactttgattttatgtatgagtgttttgcctacatgtatgcttgtgtactgtctgtgtgtctgatgcccctgaggccagaagagggcatcagatctcctggaactagagttacagacagtttgtgagctgccatgtgagtgctgggaatggaactcaggttttctggagtcctctctctggttctgagctacagttttaagattaaatttataataccatcatttaataactctctttctacaaaaaacttcaaagtgataatggggactagtcagtaaatgtcagtgaggcctctggatcttcagaaccaatgatctagaatgggcttgggaaagttttagaaaatgttttgcctatgttgatatttttgaaactaatgatttttctttgagagtacttgtgttgaagtttttactaaatatcattctttttaatatttcattcttttgtcatagcaaaactatgacatgaaacttttctatatgtttggtaactttaagattgcattcaagcatatacatcataaaaaagtaacaggattttcggtttctgtacggattactacatattgtattatgcatccttagtgtttaggaagtacctgttggtgtatgatgggtattttcagtatacatatgaatgaatggatctaaaactaagcagtcatttaaaaagtgctgttctcttaagtcagtctgacataggcgctccgaggctggtgtcatggctccaagctgttgggagggacacaggtccttccctactccacagggagatgctgtactacgtgtgctctgctaatgcctcttatagtagacatatgatggcatgtgtgcttccattaaggagggtcacccagatggtctgctttatactcgagttcatcatgtggccaggctgggctgcagagacctgggaaatacagcctcttggctctgcctcagcagacttaagaacactgagtgttgggaggcagctgagcagcacttctgcatattccatctctgcttcctcatctcacacacccctggagaggactttgctgtgtgtgtgtatttattcattattgctgtggtaccaggcattagaccccgggcctcgtgcatgctaagcaattgcactgatcttgggctccattcccagtctaggagatgataatttgtgttgtaattaatgaagccaaacactaattgctttagtcactttttcagagcttgtagcttttgtggggcgagggaaagacaggatctcactgtgccaccctgaatgacctgggattgttgcatagacaaggctggcctcaaactcttagagatccacttgctttgcttcctgagtgctgggactaaaggtgtatggccttagcgcatagcatttggaaaaactgagccagccttggtgacatagccatgtctttgcagctctttaggaggctaaggcagtagtaggatggagagttcaaggcctgcttgggctgcagaatgagtttaaggccagcccgagcaacatagttaggcccagtctcaaacaaacaaacaaacaaacaaatattgagctagagatagctcagtggtagagcatttatgtagtgtgtctgaggccttgggttcaattcccagaactgcctttctccccgcaaaccatagcaatttttctagtatcccagctttatgcttttttttttttaattggtaataccaaaacatatacataatgtgtttgggttaaggggttaaactcttatattttgttttttatataatttgttttggtaataagcttgtattgcttttacaattaaaggcatttattattattttttggctctcatcttatgtcgctcagaagtattgtgtctgatgctggacatggcacacctgtgatacagtactgtggaagcagaggcaggaagatcacaagattgaggccagcctgagctatagaatgaatgtgaggctagcctgaggtactttgtaagatcctatctgtgggttgagggagtctagcttctaaacttgttgtgtcaaagcagccatgtgcttctgtatctgcagtgagtgaagctctttagttggcccttgaaaatagtatgggctcttataatttgtggaaaaacaaaatgtaacctgtaaaaacttgggtgcttgtggtagagtgagagaggggtcatgcttattcacaaataatgagtatgtgcctgtgacctgtttccacttaggatattgagtctctgatgtctgagggcaacaagtctcggacagttgctgcaaccaacatgaacgaggaaagtagccgttcccatgcagtcttcaaaatcaccctgacacatactctgtatgatgtgaagtctggggtgagtagcttctgaaatgatcatgatttagtccagtggctctcaaccttcctgatgctgtgaccctttaatacagttcttcatgttgtggtgacctctaaccataacatttttgttgttacttcataactgtaattttgttactgttatgaattgtaatataaacatctgatatatgatcctcaaaggggttgtgacccacaggctgagaattactggtttagcctattctctttgctaaatttgctaaattgtaggtctgatccagactattggtcaggactcaggacagaggatcctagcaggaacagaagttgctgtactgtagctacagcactgttggaataccccaagagggttggggtctatagcaactctaggagtcactcctaaaccacaagggacacacatagcttcattcaggaataaagaaattgcttctgtcagtgaagctgcctcttagcacccggaagtcgtagaatgtcctgaaaacttagatttcatgacttccctgatggcagaaaaaaggccaaggaagacacttcacttctgctttccagtctttagcaagagggtctaaaggagctatagtcctatcctgcggcctggctgcaagggagtcttggactagacgtagttcccactctccagcaagaggacagtgaattacacaagctgcttgacctggcccagccacagcagctgtgcactttacacccagatggctgctttcagcggagacacctttgccggtatccctgctgctaaacagccaagaggtcaaggagcagcttgtgttggggaagaatgcaatgctgtaacaaccattgaacgtgtagagcaccctttgagcgtttggttggaaccttgtgaagctgctgaggcctttggcacgttgaacatctgctggtagctcacgtgtttctcttctctcctctcctttcccctcccctcccctnnnnnnnnnnnnnnnnnnnnnnnnnnnnnnnnnnnnnnnnnnnnnnnnnnnnnnnnnnnnnnnnnnnnnnnnnnnnnnnnnnnnnnnnnnnnnnnnnnnnnnnnnattgatttctgatgtccatccctcaggacctcagtctcaattatgtcaggcagaagtaacgtggcgaggtgctccatgctagcaggcttctcctttgctgaaaaataatttttttcctccacatcaagatcaatgtcaaaaacaaaaagttctcttgttgatttcctttttagagtaaagcaaaacaaaacacataacatactaaagactttcttttcttttattattattattttaatttctttaatgtatctgagtaaactatagttctctccatgaacaccagaagagagcgtcagatcccattacagatggttgtgagccaccatgtggttgctgggaattgaactcaggacctctggaagagcagccagtgctcttgattgccgagccatctctccagtccggactttgtttttgtttttaaatcataagtatttttgatctgggaagcaaaatatccctttgtaatgtttatggaaatgtataaatgtacttttgcagtgctgagagcagaacccagggccttctgtacgccagataaacattctgccaagagctactttcccagccgaggagaacagattttaaaggaaagtttccacagtgcttgcatccatagcctctgacatcgctgtcttatgttctgttttgctgatgaggtaaagcatgaagcacgtcacatgcttgatctggtggaagaagacaccactgtctatcagagaccacagctaatgtggaaaagttaagctgatcagctgaataagataaaagtgtttagaaaatgtttttgactttttgaacaaatttgtcacacaaaagtcagattctttgtttttgtttttaatattagccaagaatgtaagtattttgtcttgggccagtatttatgaaattttaagcatagtttcaaatcatgaaactttttattttataagcacttttgtttatatctctgaaaactctacctatctctccaaaatgttgcattttataacatttttcctgaggtcatcatcttccttgtttgctcactacttggttagcaaattgtgtaagttttgtgctaggtggtagtttctgcagtgtttactgccagcacaaaataattttgcagtaatgacagatagctttggcaaaggccggagacaataagccattcgagggagtcagcctgttctcagcactcattagccttttgtagcatgtgttggttttctctgcagacatctggagagaaagtgggcaagctgagcttagtggatttagctggcagtgaacgagccacgaaaaccggagctgcgggcgacaggctgaaggagggcagcaacatcaacaagtaagtgttccaggatcacattcttgagtcactctatggggctgatagaaaaacaggggaacatctgggcttacggagtaagatgattctggaacgattgaggcaatgatgagtaagcagtttggatattttttctagtgttttctatggcctaagctcattttctcatctgtggagttgtttgatgtaactggcaagcacagccctcagtcaagtcaggacttctcaacaatggccctattgacattgggcttaaatgactccttttcctgtgggtgaaggatgttgcggaatgtttgatagaacccctggtgtccgctcactaagtgatccactgactctcttttgacccccagttgtgacaacctagtctcatccttgtgacttgctgttatccatggagcatactcatcctccactggctctcggctgtgtgaatagacactgtgccagctacattgggctgtcccttttagtctgctgttgtatttgtcagtatctcagaacccaaactttatgaagtagtgttccatttgccagctccatcacatagttttccctcaggctaaatcattacctcttcatgggttcaagtcttccctttcttcagggctcctagagatatgaggtgagacattagccagcaggtgggaactatggaacacttctttagcactagggtatgcagatgtcagcttgttatcacttttgctctaatcagtattttaccctggacacccttcttgaaggtgtctgttggttatattattatcttcatcctagttttccaggtcacatattttatctgcaaaaatgaaaaataaacagtgctaagtgtttttattgtctcaagtagctcagatggacagtagcctttgggggctcggtcttcagatcagacagcaaagtgctgaccacagcactcattacatgcagccaagggcaccttgctgctgtccatccttgcaactaatgtgacattcgatattttctggcttagataattgtgctttttgttccatgcaggtccctcacaaccctgggtctggttatctctgccctagctgatcagggtgctggcaaaaacaaaaataaatttgttccctatcgggactcagttctcacatggctgctcaaggtgagtcattttctttgtcctttgttagtgttttagttagtgatccttttgcttcaacaaaacaccatgaccaaaaagcacgttggggaggaaagggttgattcagcttatacttccatattgctgttcatcaacaaaggatgtcaggacagcaactcacacagggcaggaacccggagacaggagctgactcagaagctttataggggtgctgcttactgagtggctccttatagcttgctcagcttactgtcttatagagctcaggacacccagcctaggcatgccactgcccatagtgtgctgagccctcttccatcaatcactaattgaaaactgcctaagagctggatctcagggagatttcctcaactgaggctcttttcaatgatgactcttgcttgtatcacgttgacacaaaaccagccagtttttagcatttttcagtggcagaaaggaagaacaaacagtaggttagtctcttccagggaccttgtctccatctgtgttcagttgtatagcttttaggctgtttgaacagtttcagtttcaggagcaagtgtcattttcttgctagtgtttggcattcttgtcctccagaacctgcatgggaagtggtggttgaacacatagtggcccctagatattgaggggcagaaggatcaagtggtgaggggacagtgtggttactcacagtgtcccctgcctcatgccctgctcggagctgctttgttctgctcacagacacctttgattagcttgagtttattttccatttcattctcccctgagcctttggtttttctgctttgcaaagcttcagctaagtgtagagtagaaacacagccacttctccactgttgcaaacaagcaacagaaatgtgaaaggaaaacatccataagtgccccaagggagcacaaggaaatggagactgagcccaagagcacgaagggttaccttacaagtgtgttggtgatttcacaaaggacgggtcccctggggtcttcctgaaggtggtgtgggaaatggacatcaggcaggggattagagcttgtaataggtgacaactttgtaaaggtgtcagagtggaacaaaaacttttgcctttctcatactctccatgattcactggaaacagagaagcaggcactggagacgtggtacatggttaagaagagctctgctcttctagagggcttcagtacaatgcccagaatccatgtagcttagttcacagttgcctataaccccagctccaagggatctgacaccctcttctggctcctaaaggggctgaactcacctgctgaaagccacacatacaattagaaacaaggaaataactttttgtgtctggtgtagcttagtgatggctcattttctcattggtaaaaatgtactgtacttactatctcttactatagtgaagcaggggccccagggaacttagtaaatgttggttgccaccgttgactgaatcactgtgtttagagatcagcctttgaagtactttcaaagggaagtactttctcctgactatacacactcaggatttttctcccctgcactcccaacagggtttctctgtgtagccctgactgccctgaactcactctgtagatcaggctggcctcaaagttttcaggaagaaaatctgataatattcttctcccttggacttccagagaggcatttcaagtcatgcatagccattcccttgatgtgcctgatttaaaatcagagtctacatagtcactgtgactttagttaaaacaacaggcaatctcctctttttggtacagttcagttgctgtccataaagctgagcctgttaaccctgttgatgaatcaggggtcagacagccatgtccatgcctggctggtttatgcgaactgtgctcttagtaaagattcattgaggacctccatttgactttgcctgtttttgattgaaagtaagggaagatgtttgtaatatgtgaagaatgaatcaaagatgtaattgcagcttctttgtgatgattcagatgaaaaataaagcatgtttgttcagtttctattattttttccttaaaggcttgtattacctgttttatatatttgatgtttgcaccaagagcctaagtagggggatctaaacactttgtccagagctgtaatgtttgcccctccacctctacccagtgcatgaattcttctttaactcctagtctactcccaccccacacctgctgattgtctttcagtgttggtgtaaggttagcacaccccccgcaggacttcattgagctcataaaatggattacctttaaagagatgaatgtgtacatggatggaccagaggtcatgtttggtgttgtcttctttgacttttgagccagggtctctcactgggatccggggttaggaagttaggctcggctgagtggccagtgtgctccagtgatctgcctgtttaactccccactgctgagattacagtcctctgccaccacaccaggatttttatgtagatgcttgggagtgaatgaagcacacttgacgtttatcactgtctgaatgtggatctcctagctccaagtgtggctgtgagtgcccagctcctactttgtgagctctgaccccacttttattctttgtttcttagtttttgtttttgagacagggtagttctgagtctgtatagtttggctgtcctggaactcactgtgtagaccaggctgactttgaactcacagcaatctgcctgcctttgcctcctgagtgctaggattaaaggcttgcaccaccactgcctggcccacttttaatttttttttaaagatgtatttatgtattatgtatacagtgttctgcctgcatatatgcttgcatgacagaagagggtgctagacctcactatatagattgtgagtcaccttgtagttgctgggaattgaactcaagacctctggaagagctgtcagtgctcttaacctccgagccatctctccagcccccacttttattcttaatgtcaattctctagtggatgtcatgtggatctctcactgagctgacaaccatttcccttggaccttctttgtccaatccactcttctgtttctaaattcactggaactttaagtctttttagtaactgtcctccaggcccttagaatcaaggccaagttctttaaagaatggcttcaaaggcctttcccagctgacctctcgtcctagctgttatctgtgctctctggctttgtaggctgtaggcgagtgaagatggctgttgtgcgttcgagttttattcttacttgtcacttcctgctcctctctcctctacctgccagtctggagtgtcttctctcctaggttccttctgctcttcgtgcttctagaccctgggtttagctcttacacagcattgcctctcctgttagatggcaaaccccacaagaggggaagagcaagcaatcccagctctggtctgcattagtacgctgaccttcatttggtaagtctctcggcttttctgggtctcaatttcctagcagcacaatgaagtaattcgattagatgatttcagagttctttcagcttgaaaagaaaaattctgacttctaaaatgaaatttcttcccagtgtccatttaatttgcatcgccacatttgaaacaaagcttgtctgatgtgcttaattaaggagtaaacaagaaactgtaaactttctcttggatgcctgcccattcttttgttacattttcctttttgttcaagcaatgtgagcatattgttgctcacattggtcatttggtaaatcaggcatggggtgtgcccagtttccttttctctgcctacgcatgcagtggcagcttgctttcacccctggtggttatggttacaagtcctgtttgtcattcttgtttgctgtgcccatgggtagactgtgcagtaacccttagggggatgtgtagcctcgctggtaggtggaaccgcagtccttgagactttcctatcctgtctgaatgtgcatgggctcctcatgacaaactggagcactgacaatgtgaaattagtgtctaggagtgaaaagagaatcaagaagtcctggctgtacttctcgaagtccagattggttacatttcttgcctttctatacttaagagcatattttcttcaatataattatctctctctttttttttttgaaaaacaaaatttttagtaatggaagagtaagcatacatatatattgtttttgatcatattgagatattgataccttgtgaattattttgtttctaatgtcgggacagaataatttgaagtggtgtcaggtgatctgactcagcctttaggcctgaagttgtggttgcctggtgtgcttgttgtgggtgtctgtgtgggaagggaggggggtttgaagtcaaggtggaaaatcctggggtggagtagtacccagtttgctaggtctagattcttaggcatgttgttgatgggtttgtttgcttgtttttgtgttttgttttttagaacaaccctgctttcctctctaatagagtggggcttctaatagttgaattcacaaaaggcagagaaatgtataaaactacaaaattctctaaaaaatttatatgtgttaaaattggaaaaactatatttttaaaattaagagttttctaaaggtgaacattggccaaatctaagtcagctttcttgttatgtagtgaatatctctaaattttaagactttgttgttcattgtggtcgcatttctgaaaggggatattgaatctttacgtgttcatgtatgtgggtctatgtacatgagtgtgtgcatatggaatccagaggacaaccttaggttttgttcctcaggctctgtacacctttaaaaacataattttagaagttttatttgtatgtatataatgttggcctgtgtgagtgtaaatgcaccatgagcatgtaggagccggcaaagggcatcagaatccccgacactggtgttgtaaagcaccttttgggtactgaggactgaactcaggtcctctgtgagagccgtaagtactctgaactgctgagcaacctctgtaggcccttcactgtttttgagacagtctctcacatggagctcatctagtaggtcaggcttgcccgcaagttctggggatctacctttctccatgggattgtaggtactactatcaagtttagctttttacatgtatttgaagcactgaattcaagttcctgcatttgtaaagcaagcacttttgtgattaagcattctctcagctctgaatattttttatgcatgtgtatgtagtgtgtgtgtacatgtgtgtaattggaaacatgtgtatatgggtgtgtatgcactttagttggtgttggatttttttcctgtattgctctccactttatacactgggacaggctctctcacctgaacccagaacttactgatttagcgtgtctagctgtctttcttcagggagccctgcctttgtgtcccatgcgctgggattataggtaggctgctgtccacttggcttttacacgagtgctggaagtctgctctgatcctaatgcttatatggcatgtgctttccccactgagccatcaccccaggcctgactcttttatatagcttagtttttttttataatgctcccaagtgttgcatggtatggaactactgacctgtaacatcttactccacaagcagttttaagtgcttggagccagggccctatgagctgtagtttacgtataagccaaggctgtaatcatctagaggcctgaatcaggtgggagagtgttgtcacttccatgatgataggcagacttcaaggacctgcttccattttcactcctatgggtctcttcgtagggccaccttgctcctcctgagagcaagaaggagtgctaaacagagagcatcatttgcttttaattcgatatcagaaatgacatgccatcatctctgtcacctttgctgttttgccagttagaggccagtctataaatgctgaccatccaagggaagagccagcactagttaggactcagcaggctgtgatgcctaagagtctctgctgaaatggggtgacctttaacatcttttgcatggtcagtggagtgggagttgatttagtaattttaaattttttgagggtggctaaggaccagtctcagcttggagaggggttctgagagaggggtgtttgggagaggtgaaaacaaaccgctgcaagtcaaatcatgggtcgaagctggcggcctgtgctctgtggcttctcagcctgcttgcttcttcctgttctgctttcttcccctctgatctgctttctctctctctgtctgatctgcttgctctggagatctccagacagctctctctttctcttttgctcttggtcttgctctcactcttgctgttctgctggagacatttctccaaacacttctctcttgctattctaaaaaatttctgttagcttgtctcctgtagatcataagcccagtcttttattttacatattaacccagtcatttactccaggtttccttttaattatcctatgaatcaccatcctgtgaccccagccccttaattcttaggagacagtaagctttaagtcttaagcctacagcagccattgacactcctggaggcccacatctgctggtcctgtcaaaggggtacaaattatgtcattttgtccccaccaaggccatgctggaccaacagagaatttctctttttcttttcaggcctgagatagatgtatgtaacctagagccctgtaagcgctctgcagagtcacatagctcattatttttaatgtcctgactaacattcgctttcctgactgttggaaacagttactgggcctgcagatgaagagcttctttagtactttgaatgagctttgggagccattgtgtagagcatgtgttagtttctagaatgctagcagagggaagaaaacggagcttctggaactcagcttctggtgggattagattagattagagggctctaatcctcccttaggtttcagagccagacaaggttcccaagaacttgtttgtaccatgaggacaggcagcactgtggaggagagtgtaggtaagcctccttggggctgggagtgtggctcagtggcacagtacttgctgagtgcagaagccctgggtcccatcactagcactaccaaattccccaaaggaactgacactgtgcatgtccagtacctctgaggttggttagccattggagtcttttcattgtgagcaaaactgctcagaatggtatcacattgcttattaaatgggatatactatctctggattaatttttacttaaaaaatagactttaatttgttgggttttgttattctttcttgaaaaaaaaaagaaaggatttgtggttgtttgtggttccttttgtttgttaagaaaagtaggtagagctgagcatagaggtgctgttagttccagtgccctggaagcagaggctggcagatctttgagattgaggccaacatgatctatagagagagttcctggacagccaggactacatagagaaaccctgtctctaaccctgccactgctaccacccccaatccccttcaaaaaaaaaagtaattggcagagaagagacagttcagggttgaggctcatgggggtctgcatgtgaacccctattttgtcttaaatgtgtttggtcttggactgtttcactctttcagattttagctttcttatgtgatgtcttcttccaatttaaaagactcctcactgttttcttcctggtaggacagtctgggaggtaatagcaagactgccatggtggccactgtgagccccgctgcagataactatgacgaaaccctctcaaccctgaggtacgcagatcgagcaaagcacatcgtcaaccatgctgtggtgaatgaggatccgaatgctcggattatccgagatctgcgggaggaggtggagaagctccgggagcagctgaccaaggcagaggtaggaggagtactcgctaggagctcttttttctttttggctgttgaaaggattgtataggagagaataaagggagtaggaaaagtttgtctttccatttttgtcgagaccgctgacagactagaatgtgaagggagaaagagaaacagtagggaaatgtgatttaatttgtgcagaaaccgactgcgcttacagtcatggggagggaattggattcctcccctggttcgttagcctgcggtcagaacagaagacatcctctcctttacagctcaccccttcctgatttgagtgtgttatgtttgtagagcagcagtgtaactctcaggacagaagtagagaagtcgccagcgtggcgcagtgtccttctgtggcaggaaggagatgcttaggttctggagcgaggtttgaagatcacagtgtaggcatgaagtgccacactcagggcttgagctgtgcttagtgtttctgtcccagggacttgtctgtggagctggcaccatggccctttcctgtctcattactcttgttctggtagaaaggcaagaggctttgattgacatggtcacagcagttactgtaatcatgtttgggtttttttttttttccctactgaattttatcctgattttacagttctttaagaatcttggggctgaggtttctgtatttcctttatttacgtcaccatctggttgtttctctgtcttaagaccaagtgttattaacactgtccagtttgcaacatgttcacatctaacttacatagctttgagtaaattcttgaaatcaacattagacagagattgagatgcagcatgcttttgagtctaggtgtacaacctactaaaattaaaatcattagttctttacaagtagcttggaacgtgtagcttcttaaatgtaatgggatcttcacagtaggttggaggaaagttgtctttctggatgtgccctagttgctttggtaggtctgtagtcccccagcacaggctctatggaccttgaggactgccaccttgctggagtggtggagggctcagtgacaggtgacagtccccgccctttcccatccagctgattgttctttcccggcactgagcagttatgccatgaggtgacactttgtttttaggcaatgaaatctccagagctgaaagatcgtctggaagaatcggagaaactcatccaggaaatgactgtgacctgggaggagaaactaaggaaaactgaggagattgcgcaggtttgtgttgggggcgattggctatgggactaaggtggtggtggagattgaatttgagaccccatgcatgctaagcaagcaccccactactgagctatgtattttcattaagaattcatacatgcatacaatgtattttgatcataggcacctcccacttcttccccctaactctgttgttcccatactagtagatgtgtgatcattcactgggacatgactttccttccctcagcagccatcagctgtcactaatttagggtagagggattcctaagcccctacagcctccattctggaatgttgactgacttgatcctgtatggagtcaaccatagctccagtgaattcaggactacagtggccctgccgtgacaaggacactttctcctcgctccttcccaacccctggctctttcaatctttccatctctacttccttgatggaccctgatctcatcggggaggggttagaaatagatgtccatttttgccaagccctaatttttaacttttaaacttattttcatgttttaaatgtacactgttgtggagctggccagtgactctgctggccatgacctgagaggaggcattaaactctgtgtaattcatggtggcacaggaaggaatgtgagtgtgataagatgtgaaggagaagacggggcagcttgaaaagccttgtgagctttatagaggtgaccttcactctggcaaactggagctgttttatacattttggaaagaagagaaaaatgtgatcatctttacgtttctcaagaatactttatttataggtaacattgaaggataaagatatgatggtcttctgaggctgtcagatcctctgtgtcttgctgcctctgtgctgggaatcaccacttctctggtgtgtttgcaggagcggcaaaagcagcttgagagccttggcatatctcttcagacttctggaatcaaggttggggatgacaagtgcttcctggttaacctgaatgctgacccagctctgaatgaactcctggtgtactacttaaaggtgaatgtcctgccttcacagagctggagcactctgtgagatgtggagaactgtggtccttaccaattgcttttagttcatcaattggagtgaagggcagtcttgggttttggagatcagttattgttgcctgtctttgaatgatgtcattgaactacttttataaaaagaatattctgatattatttctagcaagttaaataatgtaccaccattttttaacataatttataggaagtactttcttaaacataagtggaaataattaaatttcttacttagcaacacttgataggagattggtatttctaatattttttaggaaaaatttaacagttaaaatatcaacctattaaaaaaaaacaaaaggagagcagatcacctagacactcggaggatcagagtatgaaatggaaagccaaacatagtacacactgaaaactgaaaaccccagagactgaagaaccaggcctttccacatcaaccatcagccaagagcatgccccatagacacgcctcaggcaatttgatggaggtatcttctcagttaagaggtttcctcttcccagagggctccagtttgcttcaagttgacaattgataaacaaacaaacaccaaccaagcagcacagcttctcattgaggaggtgctgggataattgcttagtgtcattttgacaattccccctttttactgagtgtattatatgatgtttggcaatgctgtgagttaaataatgtctttacacaaacacaaatgtgtgtggatgaagtgcagagtcaaggcttttctggttctttacactggaggaggttgcctctggccagcttcctgggttcatgtgaagattgaatatataggcaaattttatagacagaaacactgcacagttctaatgaattccctattctgcttctcccacatgctatttgggtgtgatgctcataaaaaacctttcctccattgagatggtgtctctctttggtctgacattcaccaattagtcaggattgcccagcaggtgagccccaggaaccctcttgtctctgccttcttaggacttaggtagcaagcatacctggagtttgtaagtgggttctagagtccaactcaagtcctcatgtttgcaagacaaagaatgttctctctctttcctagcccagcatcttaagttagaacagaggctgcaggtactatggacttcaggaatatgcacagtagaatgggactgaggcacactgacctaggttaccagagtctggaattagttctgtttcagagatgatacagtccaaattataggatgaacagaaaacgcttagttcaagaacgatctctttttagaaaatgccactatgtgggatgtgggaatctggaggctgcactttaagtcagtttgtgtggatgcgacttcagatgtgatgaccttacctctaggtgactctccccacatcatctctgatatccttcctgtgttcaggctataggagtttctcctctacaacatgcccctccatctatattctgctatacctcatactgtaagcttttggaatccttacacagatagagacacagtccctcactaactcaccctattttgcttaccttgtatcatcttaatttagctttaggtactcattagataaccttttatgtgggggtggggtaggggaggagcatgtttctgaaacttggtctcaggctgaccttgaattaacaagcttcctgtctcagcctctcagtgctaggattataggcctgtgcatacttaggagatagtctttgagaaatttcatcttttttctgctgttgcttacggcacacactgttgacttaaacattgagcattaaggagttcacatagttgagcctttgaagatagtgtctgggatcctagtgtacctccaaatcactatagcctcaagagagagactgagtttgtcctttaaaatataaactctccctggaactctacagtttgtgtctctagggatcagtgcctttctgatatttggtgctcagaatatttgttgaaaaaatgaatttctttttctaaaacggattatacttttgtctgtttgagttggtgtcttgtgttcctgctgacttgtaattcgctctgtttacaggtaccactgtagactgtgtcttttgttggttgtaccatctataagagtcttggataggttacagttcaaacagaggaaaatagcacttgcaaaacagaaactcagtaatgactggtttttaagtgtcctaagggctcagagcaggtagaaatcaggatatccctgccttgtacagtttctgtgctagttgtgatggatgtgcattaggtattttctctcctctgggtgacataaatatagaccagaccagactagattaaaagcaaataaattcaggtttattaggcgctgttaccggggaaggttcatctttcccaaaggatggggctagggaaatcttgaaccctggctaaggcaaggaggtttttagacttttgttgtgtaagccatgaactgggactgtacccaggtatgatcagatgctgggcacctgggcaggcacttaggcaggttggctgttatcagaatggagggttgcgttggctgccagggatacagaactaagcttttggagccattcctttcttcggttttttcagtgtgggtggggttgggagaaggaggcagacagggtttcccagcttatacaggggagagcagtgggctccagcaagaagctcctttccgtgtcagggtaggaattgacctgggcagcctgacggtaactacagttctgaagatatgacactaacagctgaggtcgagggattggagccatgattcagtggttaagatcactgttgctcttccagaggacttgggttcaatcccaagcactcacatggtaactcccaactgtctgcaactccagtccctcaggactgcataggctctgcctgcccatggtacacagacatacatgcacacaaaacacacatatgcttgaaaattaaagaaaaaatatcttaagaaaaaaagaaaaagactctgaaatgaggcccacatgtggaagtcgtcagctctctttcatccatgctgggtctggggattgaacttaggctgtcaggcttggcacaagtgcccttacctgctaagtcttcttgcagtccctattttcttctttctttctttctttctttctttctttctttctttctttctttctttctctctctctctctctctctctcttttttctgtctgtctgtcttcttctgtctgtctgtctgtctgtctcctgaaagagtctcaagtcgccatagccggctctgaggcagtcctcaaactcctgatccttctttctccacttacaggggccagctctgaaactgtagtttccagaccttattttgatatattattgatatatagcttaaactctgagagtgatattaaatatttagaatcaagatggtaacaaatagcaaatgtaaacagacgtggatgcaaacttttatcttgagcttaagtaagacagtatgactggagggatattgctccttttaaggaattagagctcatgtaatgaacttcgggggtcaccatccatttgctttcagagtgcatggctgaggccgctgagtgaagctggtcttagcagtattcacaatgaactctgcttctttcttaggagcacacgctgatagggtcggccaattctcaggacatccagctctgcgggatgggcatcctccctgagcacggcatcatagacatcacgcccgagggccaggttgtgctgactcctcagaagaacaccaggtaacatgcctaagttagtgtgaatacatgagctgcagggggactgagggacattggcctgcttttattttcagccttctaaagtcacactgtcacatgcaacaccctttctatttaatcttagcatctatcatattcccactgcccacccccacgttgttattttaaaaaaaagatttctttactttttaattatgtgtatgtatatatgtgtgtattatgtgtatgtatatggggatatgcatatgggtgcagatggttaaggaggccaaaggggtcagattccgtgaagctggagttataggtggttgtgaccacaagtgattataagccacctgatgtgggtactgggaatcgaactcaggtcttctggaagagcaatatatattcttagccactccagctccttcactgtatctttatgtgaaacttgtctcagctgtttccatttcctgccctgctggtaggctcacctttggtttgggtagaagtcactagacttctcttctgctctgccattcttttaacttgtcacgtcccatttgacccttgggagttacctgttagctacactttaaatgatagaagtaattccccagccctctctcatacagtcaaagcccagttctacccaggttatcctgacaccccatcattgccacaagcagtcattccatatactgtccccaagtctgaaagacaaatctaaggagttcagcttaggataacttcccagtggcctttgggtggaggatatggacaatagttttccagaacttgaagttcttattaaagatgcacttttgctgccagttgttctctttggcaatgggctccctctttttactgctcaccaggaagactgaaggctgctttgtgtgtgtcagggcatctttggcataaagcagtggcactgcctggaaacttgtcatcttcttatcagttgtgatagtaaaggtgttctatgcttaggggtcagggtttactcagggtttggacagtgccatactgcttggtcctaggacagtccagtggaacatttctctctgatgagactgtgtgtgcagcttcagcaggccagctcaagggttatgagtgtcagcacaggggacaggctgctgatcagtgtgatctatatgagttttagacaggacagcagtcagactcataactggcatagtctatatgaatgtcagctccacctcctgtgtttctttcttaactcattgtgtttgaagaatggtaccataaagccttaggtttgagcttgtgctttgaataaccacacagacagaagcaaaagggtcagttttagtgtttatgaaatcacacggggagcaaggtttgaatggaaatacgaacttgtgtgcttggaaatgcgtaggatatcatggcggcataaagcgaggtaagagcgaagctttgtcagctgtggtgcctagtactgaggaagctgaggcaaaaggatcatgagctcaaggcttatatagtgagagcctgtctcaacaaaccaaacaaggtttatagctttacagagcttaaagaaactcaaatactgagttcagcaggctctgcagaggaaatggaatccagagtagactaggattgtgaagaagactctagaggctggagagggtgggatcttgtctgctgatgaagcaataaacacttcccccgtggaggaagagttgatcatgtttagaaaaagaaatctagtttcagaggagctgagtttcactggaagagagaaggaggagaaacagaggatgtccttgtgaaagaaagggcaggccttccatgtcatgttaaggaatttgtacttgacggcccacttgtcagcctgtgagtcacttggcaggaccgaggcgtggggctggtatcctgagaatatgcacagatgtagtttgctgcttgtttcctgtgcttccaaattccttccgtgctagtgttctacccaccacgtcttctgtgggagtgtgctatggaactaagcagcgtggctgggaggatgtgaaggtggtctctgccatgcgcagaattccctgcaggtctcatgttgcatccctggtctctgcctctgtttctagactctggccacttggctgactctttatccagctgggctggctgggctttgtttcattgctcagtctttcagtattatctgtcttggctccatatttactccttactgtctaaggtggtcagagttttgagaaacagattgattctgacagtgtcataagtgaatatgtagaatgtttaagactcgaatagtaatgcttaatgatgtcatcagtatctgaggtaagtgagtgaggaaagatgtaactacagatatttacgttcaccaaaggcaagttttctttgaggaaatcaagggcagtggaagcagagagtgtggtaatcctgttcatgctgtcttctttcccccacagaacatttgtcaatgggtcttctgtctccagccccatccagctgcaccatggggacaggatactgtggggaaacaaccatttcttcaggtatgacatagctcacatccctgaaaaatgggagcccattgaaggtcctgttctgaaacagaagagtcattgtaagtgtgaacatcgtaaaatgacacctcattatgtgtgttcatgttcgtatgattatgttgtatacatagcttatgtgtttgttcatatatatgtgaaccctgggggcttaaaatgtcaagtctcatcatcaaaagttctaagcttttgtacatttctttatttttcttcccagtgtaagatcccctaccccccaaaaaaatctggcatcagaatgacttaatgtttttttctgatgggtttgctctctctgtcatcagccgtctatctgtacacactgctgtttttccttctgtctgaaagcagtagtgaaaagctagatgtagtttccttctcccaaaaggaagctggtggtttctttcagctttgagtttcagcacaccagacactgatggctttaagcaggtcgtatattctgagacagaatgaaaagtcctggaatggtggctgctagagtgagctgtgcccctcagaaagaccatggctgtggccaaccgttttcttggcatttcccccatggcttagctgtgcccctgcagctgtggaagagccattcagctcacagggacaaaagggctgcaaaggatgtagcattagccttacagtcctctcgtcagagcactagaagtcttcctcttagttcccttgggtggactctgtgcagtagctgcaagagaggctgcaaaggaaggttctcacctgtgaccacaacactgtttcccaaacgtggctgctgttgtgttggtgaggcagactggccactgtagaattcaaaacctggtctcttttctttgtccttggccaatgtgctttagctgtcaaatggactttcctcataactgtcgctgatctttacctgaatgctacttgctgtttgactttagaggaaaggttagatggatgcaagcttatggggaatgcttttctgcttttcgcttttcacactaaagcattgctaactggtcttgaagcccctcagatgttgctgtatggcttttgtgtatactgtggtgttttacttctaaagtctctggaaacttgttctccatcctgaggtggtcctcaggttttctgtatcacccagcttgcaaaagctgtgtggactctgctgtaaccacatgtacacacatggatgtcttatgtctactactagaatttgaagctgtgccattcccttggcctcgagcagatgccagtatgtaaggaatagaatcagtaagtatccctgttaatttaaaagtaatgtctcttacttcactccaagactcaatctgccaaaaaagaaaaagaaagcagagcgagaggacgaggaccgtgaggcatccctgaaaaacgacagtagttctgagcagctggatgccgacggcgactcctccagtgaggtgtccagcgagatcaacttcaactttgagtatgcacagatggaggtgaccatgaaggctctgggcagcaatggtgagcacaggttgtgcttgcaggaggggctgagtgtgtttctgatgatgccttccccggatgacctctgaactctgtgcccttggctataattgattatatttgcagaacattcactttctctgctgcgatggacaaatcactgcaaacttgtcctcatgagtggggtttcctaggtttcaagtgtggctgccattggcttctacttatatttctggagcaattgccacaacctaagtttcacgcagaacatattttagccctgtcttttttctgcagacagtgtgaagtttatctaaagtgtgtaacacaagtcactggcagtaagaaagccagattgtctcagatggtattgggttatggcagtttgaatgatggctgtctgaagtatatcattctttcccattcattatgcttctttttcttcacacgtgttcagacccaatgcagtccatactgagcagcctagaacagcagcatgaggaggagaagcggtctgctctggagcgccagaggctcatgtacgaacacgaactggaacagcttcgaagaaggctgtctcctgagaggcagaactgccgcggtgtggaccggctctccttccactcgcccagtgcccagcagcgcttgaaacagtgggctgaagagaggtaggtgtgcaggacggcctgatttgggtagctcttgtccccctaccagggaggttctccgtggggatgctggatgatgcctgggaagaagaacatttctgagagtgtaagcgccaggaaacacttaccggtctccctcctttcctcctcccccttgcttcttcccacttctcccttctctttacttcctctccctttttcctctttcacttttctttttcttttttgttattttgcaacagtcttatatacatgtataagttggctttgaaatcactctgtagcctagactggcctggaacttagaatcctcctgcctcagcactcggagtactgtgattacaggtctctgcttatgtgctgcctctctgtcttttctcttctctctgtgtctctttaacagcaccaaggattgaacccatggcttagagcatggtaggcaggcactctaccaccacactgcagtctagctcttatttttcatttttggaaagatgggaattgccagtagattcacgtttctttaaaactgcccatgttatctgcgtttgtgatgcacgcccctaatcctagcactcagaagactgaggcaggcagatctctgcaagttcaagaccaccctggtctcagggaaagttccagttcagccagggctacatagagagaacctgtctcaagaaaaccatcaccaacaaaagaccattttagatactgcccattttcagactgtgtggcctttggctttgaataaagactactttatcactgtatcatgctttagattctgaaggttggtagatttttctttttaaagggggaaagaaagttgatatctggactggtgaggtgaggtaggtacagcatgatgccgatatgatggggagtaccagcttgatctcttatggcctaattagcatggcactaaatgctacctcccatggttcgagagggcagcactaacctcctgttactctgatctgcatacaggcatcatccctgtgtgctggaaactgacaggcatgttgagtctgcagtcctactgcgaggatcttgacttgatcaggatgctttgttacatatgcagttgagtttgcagagtcctgcacctacctgtggccagcttgctgtgcaaggaatgctgtgcttgtgacatggtccagagaccagtgtgtgcatggggcggtgtcactaccctgttcctgtatgcagaagagagttgtgaatgtgaccatggtctcccatatgctgttttgtgtgtgattgctacctgcctctctaccagtcctgtttttattttatcttaaagagaagcaacattgaataacagcttgatgaggctgagggagcagattgtaaaggccaacctgctggttcgggaagctagttacatcgcagaagagttggataaaagaaccgagtataaagttaccctccagattccaacctccagtctggatgccaataggaaggtgaggtgtccatcctctacacagcagggataccatcccagaggctgtactgggctctaccctcgtgatgggattagtgggaagctatttccttctgttttctgagttttctgtgtctgtgtgtgtgcatgcttgtgtctgttagctgctaagcatgtactccttgctccttttgggccaatcctttcttcatacctgctttttgttgttatttgagacaaggcctcaaatgcaaggcaatcctcctgcctcagactcctaagttctgggagtataggtatgtgctaccacaccttcttggatttttaaattataatttataatagtttaggctggccttgaactccccacatcctcctgcctcagccccctgagtgaagtattataagtgtttccactacactggaaacatcactggtctagaaagagtgctgcagtggcacttagtacttatgcagtgttggactggctctccccgattgtatgcccttttagttgtttggactaggaaacttatgacatgttttgccctcaaatgagtgactggggcaccctagataatttactcttgaaaacattccatgcggctactcttaaaagtttacctttctttctttctttttttctttttttaagatttatttatttattttatgtatgtaagtacattgtagctgtacagatggttgtgagccttcatgtggttatcgggaattgaatttttagggcctctgcttgctctggtgggccctgctcactcagtccctgcttgctctggcccaaatatttattattatatataagtacactgtagctgacttcagaagcaccagaagagggcatcagatttcattaaggatggttgtgagccaccatgtggttgctgggatttgaacctaggatctttggaaaagcagtcagtgctcttatccgctgagccaattctccagcccccttacggtttttgttttgtttttaagatttgttttcttaagtattcaggtgctttgtttgtatgtatgcctgcagaccagaaaaagtcatcagcttgtaagctgccatgtggttgctgggaagtgaacctagaacctctggaagaacagccagtgctcttaaccgctgagtcatctctccaacccagagtttactttcttagcattaaaattctattcatttaaacaaacaaacaaacaaacaaacatcatcagtttggggatgtttggggcaggatggctcattgggtgccttccactgagcttgactatctgagtttaatctacatgttggaaggggaatgccagccagctcctgcaagatgacctctgtcctatggtgtgcacaagcaaacacacagggtggggggttatatagtaaaaaaaaaagaaaacaaaacccacaattttgaaaaagtttgttagtttggagtgatggaattactcctgtaattccagcctttaggaagtagaggcagcaaagaagagaggaagatcaggagattgaggctagcctgggctacatgagatcctgtttcaaaagaaagaaaaaggacaaagttttataactatctcagctaactttgccttgttgacatctcctgtctgcagcgaggctctctcctcagtgaacctgccatccaggtgagaagaaagggcaaaggaaagcagatttggtctttggaaaagctggaaaacaggcttttggatatgagagacctctaccaggagtggaaggagtgtgaagaagacagcccggtaagcagctgaggaaccccttccctggtagtctgagaaggagccataccatctgcccagctgtgggacactgcatgctttcccaagattgtttctagttttaaagtaaaatttctgttaatccttaagttgttgagctaagtaagtcgttcaatagttgggcatgtgcataatttcgtttgtatctcctcttctctttggattctagcagaatttcccctttccatctgtcagtgagtgtgtctgtctcaggttgctctggggttctctttgaggtaggggccaggccttctcaacacactgcagacgattactcctcagtcgatgggttcacactcatcagtgcaccctggtgttcgcactgctaggaaggtccctgaaggcattgagatcccagagtaagtgtccagctctgtcctggtgctgctcctctgccgacacgtttcctcgttcccttcagccatgcagttgtacgtgcttaaaacaaacacatgtagcttgttgtttttgtctacaagtttcttttggacacggtctctctgtggcccagcttgttttgaactcaggctctttctgactcagcctcctaggcgggatcatggtggaacactactacagcctgctacctataccagtgttttcaatcctgttgggcccgtttccacttggagttgctttctttcttagctttttcttttatttatttatttatttttagattatactcaatagaaatggctttttatggttaggtaatatttttgcctaaatttgtaattttcttcagtattcctctccttctttgacttagagataggtataaaaatgaatgccaaaaaagttcagctgctgctgttgctgtcctaatttgcagtagtgtatttagcaactcaggatcttcttgcctaaaagatcagtgaagaggttagtgctctcagttgctgcttttcagtccctgaggcaggagaatctctgtgaattgaagacagctgtggcttgtatagtgatttccagattaaccaatgtcatgcagtgagacccagtctcaaaaaaaaaaaaaaaaaaaaaaaaaaatcaggatataatggtaaaagttgttgttcagatgattctttttttttcccctcttttgaatttgtatgtttggaatttcttttaggttagccggtcctacttcaagcgtgctgacccattctatgatgagcaggaaaaccatagtctcatcggtgtggccaatgtcttcctggagaccctgttttatgacgtgaagttacagtatgctgtgccgatcatcaaccagaagggagaggttggctatcactgcctcagtcagcagacagctcaggggacagtgaggggtactgacaggacacttgttgttaatatctttgttttaaaccagtcctaactagtgataaatatttgtctcatgggcaccctgggtttccattgggctgtaaggaggactttcctgttttactcagattgcaaagcagctgttagaaactcacctttagtgcctcacacattgttaccctctggctttatcaaggaagacaggtcctggcaggccgaaagaactcaacccagaaaccagcgtttgctttgcttccttcttcaggtggcaggccggctgcatgtggaggtgatgcgactcagtggggctattggggagaggattgcaggaggagacgatcctacagaggtcagctctgaaaaggaagcccaggagaacaggctggtctgcatggtaagccaaagacctcgtctagaaggagcccaggtgggaccatcagtgagattgtaggttatacaataaactcattttcaacaacttataaatgcccgtcttcagagaagtcttttagtgttcagtatcttggggattgtgttttgacacacttctgggaagactcactcagcacttccagtactttttctctgtgggcttggaccagtcacctcttctctgccactcattgtcagggtgagtgagctgcttacctgtccagcccgtgtgggttttctattaccggagctctccagctctgcctctctatggtcctgtcccttagccatttcattttcacctggcctagcttctctgtacctccctggttactcagtgcctctgcatgtgccattcaagccaacagtttccagccctttctatctggtcttcctgtgcatgttgttcatggcaaaccgtgagtgttatgtcaaaaagctatgtcaggtaccagggtagagatgaaagtgccaggttcctgctgtccagtagctagagatatgtgagtatgagcagaagcctctagcgcaagatccattgctgtgatactgcaggtaccagatgtgcctgtgtacagagaagcttgaattcagatgataggtgctgagggagactgaggaatattctgggagaatgagactgtaagaaagggtgtcaggtagcaccagatttacaggcgctgtggtgtttcctggtgaataacatggagggtctcatgttctctggcacctgctcctcttccctctttatgctgcagtccttgtctgaatctccagatgccccctagtgggccagtgctgctagtggttcagaatcctgacaggatttggtgacaaaatcagcaagagtctttagtttaaaggatatgactaaaagatctgtgaagaagcaagcctaggtcagctcttagttctaaactcatcctaggtcaagcttttgctcagtaagtattctacagttgaggttgtcgaaaggagtaagttagcacacagccataggaagggggaagctggtgctgctgagagctgagctgctttctgcaactgtctgcatgaggaggaggcctgcagtgctctcatcaacagtctcgctcttgctcatttgtacttggcttcacaacctcctccttgaggccatgtgcttgctcatcagaggttgagatgtaagttttttggctctatgtggccatttctgagatgacagacagtgattacatctctgggaggtcggctgtcacagtgtaaaatatgcctggcagtggtggcatacagccttatcccaggatttgggaggcagaggctggtggatctcagagtttgatgccagcctggtctacagagtgagttttagggcagccagagctatgtggagctaccctgtcgcaaaaaagaggaagaatggaaatttgtcactgaaaaaaatgtgtgtctgagataacatggctatttttaacaaatgttaagatttaatggaaaataggaagcatgaaagcaggaaggaaagtggtgcttccctgcccacctgctccacagtgtccagccgcttagcgtggctcggtcatgcatgctaccccaccctgacccctaccccaggagcaccttgatgccaccctcgtatcagacttcacctggaagcagcatgtggcttcaaaatatgggtacttaaagaaagaggatcatctgggtgtggtgacacacgctttgatcccagcacgggaggcagaagcaggcagatcttcgtgatttctagggcagccagggctacacagagaaaccctgtcttccccagagtgttgagttcagttcggggcaccttccctgttctgttaattaagctttgggacattgacactggctgaggaaaaaaaaagattgaatagagagtattactctattcatatacttcctagcctacacccaannnnnnnnnnnnnnnnnnnnnnnnnnnnnnnnnnnnnnnnnnnnnnnnagagagagagagagagagagagagagagagagagagagagagagagagagagagagagagaagccctgtcttgaaaaaccaaagaaataaaaaataggaaaaaaatttaaaaatcagtcaatcaaaatagtaattcctttaaggccataagccgtgtagtcagcgttcttaagtgtctttggtgggattacccaggtttcttttatgtccagattctctctctcaccttgagatctgcttgtcgtgcctgtgctgtcctgttgttctgttcattgtcattgcatgtcatgctcagcggtgctaggcccaggttgggagtagcaaggcataatgtaccatagagtaggaaagcaagagtgtgatatgggtggtggtgtgtttttatttcaaaattactggtttgtaaagttgtcttcatgtcataatgaactcttagatttaagactttgactcctgggtattcattacttttatcaaagctccaatgttcctaaatttgagtggtggcagtcccttccgttgccccacgaacagtagacattttgcctcatcttgtccacatttccttttctggacccagaatccaccatttcttaagaagcagtgttcatttaagttagacatacttagagaccaagccctagctgtagaggctcattgtgtaaaaagacaagggcagataagacatcacacggagagaagctcctgtggaaagtcaaacgtggggatagtttcgattccatgagtgagggagatgattggccctacagacatctgcgtttgttttcccatgatgaaagattatgcccatatttctgttttcagaaacattgcattgaaagctccaggtgtcatcaattcctgccagttcactttggctctttcatgtagagctgcaaattgagcgctatcctgacaccttgtggtgatttcaatttttgttgtaaaaaattaaaaaacaacaacaaaaaaaccaaccaaaccaaaccaacaacaaaaagctcagcctatgtgcttggtatgttttcctcattcatggtctttattcctggcagtcttaaccctcaggagctcctgtagagggcaggtcagcaaatctgatcttgccttttgtttattccagccctagactgaggttcatttctgtaggagctaactgctttcatatggaatgccatcacaaatcagcatgcgtgttacgtctgctcagcagcacctggcccagccaacattcatctctctgctttcagtactgaggcctcacctctgtaaaggcagacataaatctctgcttggagaaagctaagcttaagcctttaatttacaccacacacagactagtaagtgacaagggtccttttaggaccttgtgatcaccctcacagcacattgcctcttcaaagatatataatagatattttataaatatttattttattttataaaggtatataataataaataaacaaacatgtagagagtctgaaaatatttcctggaaagtgtatcctagaatactgatggtcagtttgatatggagagagaaaatacagcttgtcagagcctagctgcatgggtggttcaagcttgttgatataacaggaagaaatgacatgaaatgacgttgatgttcattgttgatctgttttgtctatgttatacaggaaatctgcttttcaggatttttgtgtcctcagagtccctaaatgccacatttatagttgaggttgtataactgtgagaacatatacaccacacagtccagtttattcttactaaatttatttactagatatgaagtgactcagatgacataggagaagcgagcagctggaaagcgttaactttctgaccagctcagttttgtgaaaatcctcctggtcagactagatggcccagattaaaagtggatttttctccctcaaagatccagatgagaagtgagtcttcccacttcaaatgatttattaaggaaaataaaatgccttacaggtgtacccagccattttggttttagttagttccagatgcagtcaagttggcaatgaggagtagccagcacatataccattagaatgtagtgtaactaaaaattctagaatttacttcataattctgtggttttaacgccatcacaagctatcacagaaactccaaattgagatccatatactgctgcgaaaagtatgaagagtgttaggctgctttgagatctggcatgggcagctagaggcattgctcagtggttaagagcatttgctgctcttccagaggaccttggtgctgtgtccaccagctccttataccatctcacaactgcttgtaactccagctccaaggggttcaatgctctcttctgagggaatctgcccacacatcacattcacttatacagacacacaaggtgtgtgtgtgtgtgtgtgtgtgtgtgtgtgtgtaagtggggctggagagatggctgagtggttaagagtacttgctgttctttaaaggactggaggtcagtttctagaatccatgtcaggcagctcacgacttcctgttattccatcagatcagatactttcttttggacttcacaagaacctgcactcacaggcatacactcacacacagtacacacatccatataactaaaataataaaagtcattttaaaaaagggctcagatgcagacattgtctctggggtcttggtcccattgggcatgtgtttgtggccatactttgtaatcagagactctggggtccttcatccagagtttcctttgagtgtttgctggcattcttcaaggagagggtatcagtgtgtcagtgtagaaaacagaaactctgtggtcttcacctcctctgttctcccctccgcatgctcatagaaattcccaataggagtccaataaaaacaaagtgataggcttgtagcacacaatgtgtgctgtttcagagctgagctcctccctctgcttaacttatgataaagtaagcgctgtcctctcctgaaggtttgctgcttactcaggcagacctggctttgtgctttgctcactgtgctgaatggctttgtgctcccttaggaaatgctgggtgatgttgattcccagaaccaccttctgcagaaatgatgacggtatcctacattctgacaaactagcattcaaatgctcttgtcagcttacccagcattcactctagtgtctgattgttgtcaccctgtgtcaggcctgtgtccaagtcctgggcccacactgaatgacacatgcctcacatagctgaatggttatgacagccagggcaggacctgactccttgaggcctactggttgagacttgagccttctttcctttcaggttaaaatactccaagccacagggttgccgcagcatctgtgtcactttgtcttctgcaaatatgacttctgggatcagcaggagccagtgaccgttgcccctgaagtggatacgtcttcgtctcccaccagcaagcagccacagtgtatggttgtgttcgatcactgcagtgtgagttctcttcagtctgccttggtgttcaagttattcatgtaaacacagctaaagagcgagggctgtgacttggctagttgtgctagtgttcgtgttggagtattttctagtcgtagaccagagtgttagttcatacagcatgtccacagtcaagagttaacttctgttcaatgaaaaaaaaagcttgtgtacatgtatgtatgagcattcttctccagagggagtctgtttcataaaaaggttaaaaaacctttaaaaggaaggtagtaacaagactagagaccaccctgctgggcacccctgctctgccatgttggtttggttactcttttggctggtcctgacctgttattattaatgataatttttttttttttgcgggctgaataaactaaaagtagtgactatcactttgcttttggctggatactatcagagcttggactggctttcgctatttttgacccacaacaaaaatgaaaacaggctctcaaaacattgctaacaaaacaaaataatttgctatttttatagatgagtctttcaaagtgagaagctttaaatttcaaagtaatagctatatttgtgtattttttattttaaaagattgattttttttttttgaatcatgtgtttctttgtgtgtgtgtgtgtgttgtgcacttgagtccaggtgcccgcagaggcaagtggcacagtctcctggacctggagtcagacaggtggttgtgagtcacctgaagtggatcctctggaagggcagtgcgtggagccatctctccagtcctttcagggggtagtctgtgttcacatcgcagttaatgaccatctgtcctctgaggagagtacgccactgtttctgtgtttccttcctggtatcattaaggatgtgacagacacctgatttaagtggttgaaagaccaagcaagtgtgtgctgctctgtaatgagctgttgtgtttcaggagttcagtgttaacatcacagaagacttcattgaatatctctcagaaggggccctagccattgaagtatatggacataaaatgaatgatccccggaaaaacccagccctgtgggacttggggatcatccaagcaaaaacaaggagtcttcgggacaggtgaatcttttaaaaataattatctaaatcattaattaatttttaatatagcaatgctcagtctgcatgtacatctgtatgccagaagagggcatcagatccttttacagacggtcttgagcctccatggggttgttgggattgaatgcaggacctctggaagagcagccagtgctcttaaccactgaggcacctcaccggaccagacaggtgaattttttgatatccactggatttccatttctagatttaaaaatactgctggaaatgaccatcatttatttttacattattttgctttcccttgtgtatgtgtggtatgtacatgtgtgcatacatattttcatgagtggccgtgtgggtgtgtgctagtgcctgtgggagtcaaaattgacatggaatgttttcttcaatcactcttcaccttatttattgaggcacaaggcccctcattcaaactcagagctcacttagtaggtctagtctggttagccagcttgctctggggatcctgtgtctgcatgctgtaattataggcaggcgttggtccatccagcagttgtgtgtgttttagactctagtgggtcctcatgcttctgcagcaaacactttaactattgaatcatgaccattattttatgaattaatggccaccttttcccaagtatcaccactctagggctgtagtctaccagtaaaatttccttagtgcaccaaactttatagaacagtggaagaaagtgtgtgcgtatttaagaagcaacagtgaaatgaagttcaggagacaggccatttatcacagtgacttttgctgataagccagccatggagagaaggatggcaatctgctgtagcattcaagttgacactgcctttagttcacaggtgtttgttgatggtcacttgtttgattttgtgctgctgatgtttgaacccagggcctcttgcatgctaagcaaatgctgcacagttctgcatccctagccctttccagttttgagtgccattagtgatgagagaaggtagctcatttgaaggcataagcaatttcaaagggaatgactcaaggaggcgatgtttttgctgccatctaattatagatgagaaccacattttctcttttagcaaatcctaaattagaaggtgagatattttttccccttaattttcttattaattgacctgagagcacaagtcatggatgacaccttcctatgtgaagaccatcctgtatttggcttctgagtactgactagagtatttcaatcattgtataaccattttcaaatgtatttgtcatgatacacccccacccttgagtgttctcccccgcctctgtctgtctgtgtgcacatgcatgcatgtttatgtggatttgaactctgagctgttgttctaacttcacattataattgtcattttctaaacaaaataaaagtgcaagtgaggtgtagctcagtggtagagaatttacttagcacatgaaggccacctgaatttagtcctcaaaactggaaacaaaggaaaaacaaagagccatgctgggttgatgctgtcagtttgtctttcgggtcacattatttgtcattgtgtgctgtacatttctttctgatctaaagatcattgcactgggcttctttgtttacagtcattctcactgttaagactagaaggtcctaagctgtccgtattgaagtagagaggcatggattgggggtttagaggtaactactcagttggcagggggcttacctagcatgcatgaagccctgggtttggttcacagtactgcataaattgagtatgttggcatacacttggaatctcagaagtatgaggcaggaatattgaaagttaaagggtacctttgactgtatagtgagcttgagcacaacctgctatatatgaaaccctgcctaaaaaagaagtgtaatttcttaagacctgcatatatttcctaggtggagtgaagtcaccagaaagttggaattctgggttcagatcttggaacagaatgagaatggtgattactgtccggtggaagtaattgctgcaaaagatgtccccacaggagggatcttccagctccgacaggtaccagcattgtgacatcatagtaaattcctcgacactcgatggcttatagtggattcttttgaacagaacttttttaaaaaagacttttttatttatttattttatgtatatgagtacactgtggctgtcttcagtcacaccagaagagggcatcagatcccatcatagatagttgtgagccaccatgtggttgctgggaattgaactcaggacctttagaagagcagtcagtgctcttaaccgatgagccatctctccagcccctgaacagaacttttaataataatgatgatggtcaagcccatttctctgaaatagttaaatgtattggcatttgtttatctattgtgtatgtttgtggataggtaatgccactgtgcacatgtagaagtcagaggacaacttgtgagacttggttttctcttttccttcaacatatagtcctggggtttgaaatcagggtgttaggtgatagtggaaaggtcctttatgtagccatctccctgacctctttctaggttttcattttcaatcccatttttttatataaaaatattctcttatgtcataggcattttcttctattgttaaaagtctcactacttaatgatgttttaaaagtagtttctaaaagggttaaaaataagccttttgaaaaatatttttattattttgtatatgtctgtatatgtgtgagtttgtatgccacaggatgcagtgcaagtcagaggataacttggaaaagtgagttctctctgctgtttgggccttgacagttgaactcgggtcattaggcttgaagcaagcacctttactggctgagccttcttgttgggttgaaaacgagaagtgttccaggaaaacttagtattgaggagtgggacttaaggcagacataccaggcagcttcatgtgctcatgaacatgagttcaaagctgcacagagagagagcactgaatatgcaggggaggactaccggctcactgctggccctccaggggcctagcagtgtacttgtgagctccttcacctggaacacggagaaggggttagcaccagtgttgtgggtttgcatgagaattaggagagtgttgtataattatagccctgtgcttgacacatggcaggagtgtgtgtggctgagtccatgcaatgtagactatggatccctcactgatcgcccaggtgagtggccatctgtcagtctgtgctgctgaccaacagtgacagggcaggtctccatatgtaattaatctgttcagtcttcactgtgaaggttttctgtgtatgtccacataccctcctcttgctgatccttccttttcccaaaccgtcttctcttctgctttcatgtcacatatcatagacagtggaaaacctcagagtaatcggtacacataattggaagtattctttttacgacactgtgcctcatttcaaaaatctagtaggctgttctctagcgttttcatactttaagatataacactagggggctggagagatggctcagtgattaagaatactttcttctctgccagctctcaagtttgattcccagcgcccaggtcacatggctcccaatcactagtaactccatccctaggctgtctgtgggccctccatcatgacatctattcacaaaggcacacacacacacataaacaaaaagaataaatctttaaaaacccatattattagaattgctttcgaaatgaatgttaaaagcattcagagaaaaacatgaatggctgaaggaaagagtgtccacttaaatatttaaatttcagattaatgtagaaggtggaagcaaatgagtttcttctgatgccttcatccacaggtgagagacttagagcaaaagggaaggattctcagctacagtattatgcagagacatggcactgtagggagacacagacgaatttctgagggtgaagatctttccctaggcgttttccttggcggccttaggaagtcatcttaggaagccaggctcggtgccttttctgaagcttactgtcagctggatgtgtcagtgtcagttgtacctcagacccttgacggagagtgtccagagatgccaggaaggcttcagcgaaggacgagcatcctcacctcagtgctgagaaagacactccagcttggtaaagggttcctctctcaggtgacagcgtaaggactcaaggtggggctctgcttgagcgaaggcccttgtaggagggaagtgagatgatagaggctgtcacagaagcagggtaagggatgtttgtaaccatggtgagatgctgcaggaacagaggggaccacaatagcaggaatgggattcagagtagtggctgagagaatgtcccaatgtgttctctgagacagtaagccttcctctgtcttccatattatgtttcaaatattcaggataggctaaagagacagaaggcagctacctgaaatgatgaagtggccttagacttaataaagtgggtaaaggtgcttgccacataagcctgaagacccacattcagtctctgggaccctagtgaagatgaaaggtgagaagtgactgtaaagttgtcatctgacctgcagtgtggaccatggcatgttcaccctcatatgcacacacacaagggtaataataataacaatgaaataaaacatgtttactgagtgacttttcccataaaatatcagatgcatactccttggaaatgttcagatcagtgactgtccatcagatgttgttagtccgagcctgtggctgcttgagtggatgttcctggctgtgcaaaactcttgggagcttaatttctagatgagaggaaaagtaattgacttaaaattggatgtttaagttctgttgcttagatgctcttctctgttcctaccatgcttggggataccaggaacccttcccagtgtctgcctaagtgtgcggagtcacagggcttgttctggacacccaagcagggtcagttctgatcacatttgcagcttgatttctttaattctgtgaaaagggcattgtatacaggtcagttcttatcttttttgttatttgtttgtattgattgattgattgattgattgattgattgtttcaggatagggtttctctttgtatccctggctgatctggacttgctctgtagatcaggctggcctagaatgcacagaaatttgcctgtctctgcctccctagggatgggatgaaaggtgtgcatcactactgcctggcagttcttatctttaaaataagactgaatcccaactttggtaccctgtgctttaacatatgtaggctgcaagtgtttttctgcaccagttgcttagtgacagctataggacatcacactttaaacagttgttcacattccatataggtctactaccttgttcttcatggcacttcagagtacttatccatgtacttgattgtccagttgctggggcaaaggtgacttacagtttagcccttgaccaagcttggccagtttaaatccctgtcccacaggattgacattatttgtttcataaccatgatctctgttggaagtaacttctcacttagtaggttgaaataaaagctctcatggttgccttgtctggaagttgccctttttcagtctaggtctcattaggtagccccagaactctatgcagcccaggataacctcaagcatggagatctccctgccaatttctggagtactaaagttacagtgtgaaccaccacacctggctcagttcaacactttttattagacactgtttgcatttcctttgcttgtaagttttcatttacctggtgttttgtcacataccagcaccagaattttccaggctgagccaggaggattgccttgaattcaaaattaggccagtgtaggtaggccagagctacatagctacatagcaaagctatatagcaagcccctattgttcattaaaataattttcttttagtttctaattatttaggaattatagaaaaatatgctcattttgattttctgtctatttgaaagaaaattcattttcctgactaggttagaatgtatgctttagtacttaacagttatgaagtagatgaaagccaattgcatttttctatatcagcctataggggtctctctaaaccagagttttgaaactcatgaagctgattttgtgtgtgtttgtgtatatgttcccaaatctctgtgctgcaggggcagtctcggcgagttcaagttgaagtgaagtctgtgcaggagtcaggaactttaccactgatggaagagtgcatattgtcagttggcattgggtgtgtgaaagttaggccactccggtcccctaagatccacgagaatgtccatgtaagtttctgggcctgctctgtgctttttgaaaggcaacagcagagcagaatcgtttgagactgccacccctgccccaccattggtgtctccttcagtgcactgtcttgacaagagcacctgtactaggctgttactatgctttgtcctgttgtgtggtgaactgagagttaaaacctctcagcctggcaaaccaccaagcctagcagtgattaacttcctcccatggcccacccctctaaagaacccccactggctggtaaagactctttgccagcgggtgtttgatttcccctggagtagggggtggtaagcccagcagggagatcattgtactgagtctgaaaaggtcaggggagcctcttcactcccccctagaagctccaagtcttaccagcttcgacatgggatggctggtaaggctgggtgggaggccaaggtgtgatgtatcaattagacaagaagacaggaactgggggagaacatagtggttgtggttggaggcctgatgtgggggtaaataattgttttggttctacataatacgttgttttcttttaggaggaagaggaggacatggacagctaccaggtaattgagcacctgttggcctcatcaaatcagcttgattcaagtacttaattacacaggccaggatctttctgcactgctacttgataattaaacaattctgcttttcccaaaaagtcaaacaaagtatggaaaggctgtgtattgtaggggttcatgggctaggattaggacaccctgtgacaaagtcctttcttaatcagggacactgcattggcctatttacaaagccacctcccagctaccttgcctgggattcccttgagctgagtcacccatgggcttagggaatatatgggtgtgtgcgcgcacatgcacgtgcacatctatttctgcgtcttacatgtgtgagactaggtcaccctgaatgcccccttccttgagctgtccattagttttggaggttttgtttctctgtcgtttcttttcctaatgtgccagattttgtttatgtctgtgaagttgcatcttgttgtcatcatttagaactgcccaggctctttggagcctgattatgtcatctgctgtagtcactctcctggctttgcatcatcctaatttgatagaaatgtctgctttcctataagtcactgattaaaagaaaaaaaggcaagagaaaaacctcaccatatcagctgggttgaactcagagtatgaactaagagaatggagccttcttttaaacagacattatcccattcatcactgctttctggatgtggtatttgaggtccctgtgattgcacttagaggagatgcacagcacgttttctccatcttgtccacaggaatgtcataggctatttggttaaatgtgctgttgaaatccagacactgacatctgcagcattcctctgaaccaccagcccctaaccatgttactaaaggaagtgaagtcagactggcgtgctggcaggtgctgactggtggggttcagtctgtcagtaaccacccctgttgtcttgcccactgctacctcccaaatatgcccaaggagtagacgcatgtgctattggaggtggctagacacttgaaagcttctttctggtagttctgaggagtgaacatttgaagcttgttaagtacagtttgtgtttctagtccagccaggcagcctcacagaagatgttgtttctcatgggtggagttaagcaagtacaaagagaaccaattcctaaaggcctgtccactctagagtccactaatgcttcctgctctgggagtggtgatctgaattgtaggtagagtcacttgttggcccttcgtgctgggctggcccgaagctcaggtggtagactgcttgccttgcattcagttttcatgtcccgattattctgggcatggtgacagaagcctgtggtcatccagcactcttaggtgggaacagagactcatcagattgacttcatctttagctccatagtggatgagttccaggccagtctaggttttatgagacattgtctttgaaaaagaaaagaagggaaaaaaaatagttgttgcgtgctgcttatgtcttggagttaggagagcaaagttaatttggggagtgtctagtttaagcgtgtggcctggatattgcattgagtgtggcttcttctattttctttcaggatagggatttagagcggcttcgtagaaaatggctcaatgcattaaccaaacgtcaagaatacttggatcaacaactgcagaagcttgtcagtaaacatggtaggaagaaaagttggacatttccctctcccccattcctccctccctctgctgcatgcacatatactcacacagtactccctgccctgcactaaatctgtctaaatgtgggaacagcaagcagaattgctagacctaaccctaactctgctcttctagacaaaactgaggatgatgctgaccgagaggcacagctcctggagatgcggctgacgctcacagaggaaagaaatgcagtgatggtgccttctgctgggagtggcattccaggggcccctgcagaatggtaaggtcctacagtgtgtcttctgaaagcttcagggatgaccaggcacctcgattcccacttgtattttgcagtgatgttgttaatgaatggattgttcataatgagaactgagatattgaaagactgttaaattattttcatgagttggatatgactatggcttgaaacttttattaaataatattgttattggccaaggtaattaggatttctgagaacttaaatcaatatttagtaccactgcacttagcattaaaaaatagttaatatgttaattacttggatcatttgttcccttaaaagaatgttaggtcattatgcagttagaaaactgcatctcaaccagtttttggttttggtgcttaagctgtgctgtcagcaaatgttctctgacacttgactggaattaaagatagcaaagcaagaagccacaaggatcccttaagtatgtcatttgtcaagaaagcaagctttagacgggctgctggtgaagtggtgagtctgtgagagtgagctcctatgccccagcactggacggctcctgcagtcaatcacgagcctcgtcacactgtcttagagggacatcattgctcaggccattgtccccaagggtacatgtgatcctgagggactgctgtgtctcaggtactgtatataacctgttcttcatgttttaggaccccagtgcctgggatggagacccacattcctgttatatttcttgacttaaatggtaagttagaggtggcttccagaggcttaccttgacaacacagtgacagggtaatcctttatacatctagccaatcatgtttcggggtgtagtcaccctgatataggctcagtgctctgtgtgtggtgttctgatgctggacaagggctgtaaatctcagtatcagtcttgctgtggtgtgcagcccccacctcttctcccatttctgtccatctctttccatcatttgagccttatgcatgctagacaagtgtgctccagtgagctgcagcccagcccagcagctctggctgtggtgctcacatctccctgtggcttcctgcttctctgagtgagctttatttccctacccacttaggggatttgtccacactgatctatgttcgacttcagtgctctgaagaaaatgtctatctggaaaggaccaacaactagggatactgttttcttagcattatttaatgactttctcagcctttttgtgagttcctgtgaacttaaccttacttgcttatttttctttttacataactgttgttttccccagcccccgcacagccattccaccagtctctgtctataggagggaaaatagaaaatgcaaaggtaggttagggagctaaaaataagaagtcagcagttaagctccacgaaacacctgcagaagtgtgtgttaccacaaacttccctaaatagagaagcctgggcatcctcaagtggttcccttcactgagtggaagtgtgttaggatgcctgaggggcccagcatctgtgcccctgagggctcacatgtgcacaggttagagagacacggggcacccatgccagctgtccatcctgggaggtgagagctgttccagagctgtcacagggcactgtcttcctgtgctcttgagccttggaggctgagacgctctggcctgatctcgtgctgggcttcgtgggcagctgaaaagcaggcctccaagggactggggaggattgaagttcaggaagatttcttagttgtgcctttgttttgtcctcagaatgtttttgtaagcataggaagtcctggatgttgccatgacattttcatgtacatacattatgctttccttctctgcaccctctcacctatcctcctgtctctgctgtaaccttttcatgagtccctctcttcagccaagccattctcctgcattcacatcatgtaggtaggaaggcagaagaacagacagatctagatttgcaaatgagaaagaatgtagcatttgtgtgttcccccccactactgtctttttctcctcttcctccctcccgttagacaattcctgcccctcccccagggtttttccctgttgcttttatactgttatggggaaaagatctatgtcttgttgtgtttggcttatttcacttaacaggatgagctcttgatcccctcattttcttggaaatgacagaaagtcatgcttctttatggctgaataaagtccattgtgtagatatatcacattagctgggaatctgcagggtcgtcagagctttgttcagcatgccacactagcacacatgcacaagcacacctcctttgctttgtaggcacaagcctaagggatgggcactgggaactcagactcggggccgagcgaccacagggccctgtgcagttgccaggtccattagccagtctgcacttttgttaggcttaactgtgaggaatcgctctcgctttcttcttgtttcttaagtgcactaaagggtggggagattgggctgtgatcccatcattaccatttatgagcagacctctcataacctcttaggtatcttggctccgtttgccttccatgtaaaatacgacacacggggagcagcttgggtaatttcttgaagcactttctggcttttggatctgtgaactattaaatggttattatcagtgtcatgcgagattgcagggcagaaagcaagtgaagtttgaagcagaattttaataataagcgtgttggttcagccagtggggctgggatgaggggtgtccttgaaagcagcctggtattaagtgaaagctgtgctttcagcggatgatttcagctctcaggataatctcgatgacccagaagcaggatgggatgctaccctgactggggaagaggaggaggagttctttgagctgcagattgtgaaacaacacgatggagaggtaagtcagcatacccctggagagcagacaaggagcttagatgtcagcaatgagtggcctccacagtgtaagggaaaactctatcagtacttagagtgaagtttgaccctcacacccggttccttctcccttctcccttccggtttttggtgagggacccatgtcagtgtggacagcatccactggtgtggctgtactctgttctcaaccctgagtacaagagaggtggctgtggattcctctgaagtacatagcactccaggctggaaggatgctgactttggtatttgctctgcagttccttcataagaatgtctttattacagggcctcactgtgtagctctggctagcttagaactgtctaggtagccgggcgtggtggcacacgcctttaatcccagcactcaggaggcagaggcaggcagatttctgagttcgaggctagcctggtctacagagtgagttccaggacagccagggttatacagagaaaccctgtcttgaaaaacaaaaaacaaaacaacaacaacagaaaaactgtctaggtagaacagactggcctcagactcacagagatctactacctttgcctcccaagtgccaggattaaaggtatggaacaccatacctgactgaagagttctttttttttttttttttttttttttagatttatttatttactatatgtaagtacactgtagctgtcttcagacactccagaagagggcatcggattttgttacagatggttgtgagccaccatgtggttgctgggatttgaactctggaccttcggaagaggtcgttgctcttaaccactgagccatctcgccagcccctgaagagttctttaagagaagaaaaagaaaggcctagtggtaaacatctatagtgctggcatttgggaggctgaggcatggggatcatgaattcaaaaccagcatgagctacatagtgaggtcttgtcttagaataaaaaaaaaagaaagaaagaaaaaaaaaaaaannnnnnnnnnnnnnnnnnnnactgtgttcttccaaagatcatgagttcaattcctggcaaccacatggtagctcacaaccaactgtaatgggatccagtgccctcttctggtgtgtctgaagacagctacagtgtactcgtatacataagataaatctttttttttttttttaagcaaaagaataaatgaaggcattgaggcagactcatggtctcgtggttgaatctgtgtgatgagcataatcctggggctttatttcctaattttgaatatgcttgacacatgatatcagcagtatagtatctgagaaactcagaggtgacctgagatatctactgttgggcattagccctgttccccttgttcacacagtgccctgccttagccctgagcctgtttgtgttagatgtgacaagacaggcttgggatcagtttatgtaaaagtagactatggggccatgacagctactgcagtttgcaattgtggactgagaacatggacaaaaccaaatcaggtaccatcctgttgattgcctggatgtgacacttacctacagtttacttgaaagtgacagggcacaggctaaaatagacagcgttttcagtgggtggccaaggaatagtacacgaagtccactgaagctttttaagctttcttgatgtttaaacatttttttaaaaacaaataatttaacagcaagaaggctaataaagtagtgtcgcagctcctgttttgttgctgtaaagagacatgcccaaggtcgcttataacagagaacacttaattgagagcttgcctacggttttggaggattagcccatgatcatcacggaggggagtgtggcagtaggcagacaggcatggcgctggatcctgatccatgatgggatggggagagggagaccgggagaaggagacagggaaagaggatgaactaacagtaaaagctgggcccagtagggcttttgaaaccttaaaacccacctctagtgccacctgtccaacaaggccacacctcctgatcctttctaaacagttcactaactagaagccaaatactcaaatatatgatcctatagggaccatcccagtgtatgagcacgtaagtatcagcacaggtaccatgccaaatacctcccatgacagcaactctcgctcacatcctggcaccacatcagggcagttctcgaaagggagccttcacatggagaagaaagtgaagtgctgccttaccttctctgcaggtgaaggcagaggcctcctgggactctgcagtgcacagctgtcctcaactcagtaagggcacacctgctgacgagcgagtgttcctcatcctgcgagtgactgtccagctcagccatcctgccgacatgcagctggtcctacgcaagaggatttgtgtccatgttcatgggcgccaggtgaggctgactgggccactcacactagaaagttctttccagacgtgctctatggaaccctgagcctccccttcccaggtgcctgtcactgtcctttatcttgctgtcagtgtgtaactcacaggacctaggaggcggagtcccaaaggagccctgccatggggaagtccagtggctttgctcctttgtgctcttctgaagcaagcagcttgaggaggttccctggtggctcagttgtggcatctgttgttagcctggagtactaacaacactgttgtcagcctggagtactaacaacactgttgtcttagtcagggtttctattcctgcacaaacatcatgaccaagaagcaagttggggaggaaagggtttattcagcttacacttttcacactgctgttcatcaccaaaggaagtcaggactggaactcaagcaggtcaggaagcaggagctgatgcagaggccatggagggatgttccttactggattgcttcccctggcttgctcagcctgctctcatatagaaccaagactaccagcccagagatggcaccacccacaaggggacctccctccttgatcactaattgagaaaatgccttacagctggatctcatggaggcatttccccaactgaagctcctttctctgtgataactccagcctgtgtcaagttgacacaaaactagccagtacaactgtcttttctagaagcctttgattctcagtgtgactttggttataaaacattgaataggcaataggctgggtctttatgtttttaattctttagtacatctgtattttgttttgttgttgattttatatacatatatataaacatatatatgtatatacatttatatatatgcataggtgtgtgtgtatatatatgtatgtgtgtgtatatatgtatgggcgtgtatatatacatatgtgtgtgtgtatatgtgtgtgtgtgtgtatatatatatatatatatatatatacacacacatacatgttttatataaatttcttcttctttctcctcttttgttcttttcttctccctgaaacaaggctctcttatagctttgcatgtcctggaactcactctgtagtaccagtctgcccttgaactcagagacccgcctgcctccactccagtgctgggactaaaggtgtgcaccactactgccctcctccatgtgggtcttcaaagaggcaaagcctatttgcatttcaaagtacctgagtgggccaccttctattgtgtggtgtgctggctggggtagcatcctgccaacagagctgtgaggaagagccttgcaaaggaggtcaactctgagctggcactttatccagggctgggcaggcaggggaataggtggctgtgtcctactgaagaggtagtcagtgagggaggaaccttgacagatggagtgttctagaaattgtctaggtaagtttaaacactgtgttattggatttataaatgtgaagatttggaagatgggctctggggctcctcattcactctgtcaccccctttttgtgggacatttaaacacacagacacagatggaaagaaatctcatttgaaagaacacagtcgtggttgacagacttcaagatgtaatctccatccctaaaaattaatctttagttctaaatgccacactgatgcaatctctgaaacaaagactggtgtaatgctgttaaaatcacagctccttagctctccagtccaacatcaataaaattgaggtcaggggttagctgtagagtatttgtgtgtctcatattcactcctcctgtgcccctcttctgggaagtctgaagggatggagagaggcctgctgcacgggggagcttcatgaagagtgtttccatctgcgtcagctgtcctggccacctgaccacagcattcccagaagagatggcagagtgtggaggaaccaaccatttctcttcttttatttttgagtaggaaaaacatgttattccatttcttcccatttggagtgacttgatggaagtatttaaaccatgccacttccccgagtcgcagatacttcattcctttaaattgcttcttcatataggacagtagcaaacatgtggcagacacatcattagttcatgcagatagtaaacaccatcaggtggcactgccttctaccacccatgagaagccatggctatccctggaccatttgccttgcagactgctacaaggcatggttgaggccctgaaaggatgaaggaagtggatgacctctttccattctgagaggctctgtctgagagctggggctggggggcttgtgttggaggagggtcagaggttaacctcaggtatcagtcctcaggtgttctgagagactcttttaaaaattagttaacaatcaccaaatgtgaaataagtcattattagataggattataaaattacgtgtttttagcaacagctgattttcagttttcctttgggtttttgcatgcttctgcctcatcttttgcctcatgcctgttcactgttctctctccttatctttattcaattgtattccgccctcatggctgctctcttcaacctctgcagaatgttcaatcttcgcagcttctctaaatgagtcatctatgcattaattcaacagttcaatttctaactgtgcaaagagcgcagtcagcataaacaatgaccaggcactcttaaatcatccttcataacgatcctgctttggtcaagaatttaatgcctgaacttgtcaatattcatggtcccagacgtctatctatcgtgctggaggaggaaagtgtaagcgtcaccagtccttgcttccatcttccttagaaggtcatctggttgtatcttctgtctcctgagtttattcagatgcttggaggcagcttcgagatcccaggtctcacttctccctaatcaggtgcaggacccaaggcacattataggtcccagtccattggtgctgtgcttaagtgaaggagctatgcccggtgctcaggatctcacatgcttgtggcagatgcctcttcttatattagctctgagagaacagtgccctttgttgctctttgttacaggaaacaaagctagcaagtttggaaataatggtctatattttatttttctctagggctttgctcaaagtctcctcaaaaagatgtctcaccggagctctattcctggctgtggagtgacctttgaaatcgtctccaatattccagaggtattctgggaaatttgacctggaaataaacatgtaatgctaactcctcaaaacagtcacccacccaagaaataccatagtcaatgaaacgggctggggatgctgagcaggcggagggaggggcttgctgccaagcctatgacccgagtctgtgccgtccctggaatccacgtggttgaaggaaataaccctcctgtgcaagtttcatctgactttcacacaagtgcagtggcacttacacgctccctactacaaataaacaaacaaacaaattaatgtaaaacaccaaaccatctactgagaaaaatgtatacaagttttgatgagtcctctactgtaaacttttagtacaatgtatctgtggccgtaaaagttgaaattttagtattttgtttaaagaactctcttgttttaaaaagttgtttatttattgagtaaatgtgtaagagagggtacgtgagcaaggtgagaagagggaagagtaccatggcatgcaacagaggacacatttttggggagttggctctctccttctagaatcttcctctgtcactgaccattgagcttcttgcaggttctcctgtgtctgttcccattttgccttatgagtcccagactcacagatgtgtgtctctgcatccagcttcctgcaagggttccagggatcagagtcagctaaaaggcttgggctgcaggtgctgctacccactgagtgagccagatttctagccaagaactccaatttgaaaagcaattcaatggcttcttattttgaaacacaacaggcaatagcaatatggtgttagtcacagaaacagtccagtgtagagatttatgtctgatgtagaaccagacttaagtccagtctctgtctcttgctatcaagtgaatctgcatactttattctaaaccagagactgatgttcagacacaggaactagagacttggggcctccccacaggttgtcagtactgccttgtagtcttcattccaggtggtagaatttgtggattgattctgctgagtgttttgtttggatagtaggtagataataactcttttttttttttttttttttttgaaacagggattctctgtatagccctggctgtcctggaacttactctgtagacccggctggtctcaaactcatagagatccaactgcctctgcctcctaagtgctgggattaaaggaatacgccaccactgcccaggcaatccctgctttaacagtctgtaaagaaagcaagatgttgatgtcacctaggctttgtttttaggttttgtactgttccagggagtctaccagagatgaccattcagacagtttataaagtacttattttagctgactgggactacatccaggtactcaggaacctaggtgcaacccagagtgtttggagggtttttaaagcccaaaccatgtgttggcatcttgccttgaagcttcaggggtactttgcagaagcaatcagtttaacaaaagttaggtggttaattgtagggggttcccgcacaaacagagtaagataagttagctaggacatcccgacctttggttactagactggaattgggtaattttccatgggattctgcatcaaggagatccaattctagttaaacttgaaatgacctcagctagaatacaagatggaggaatctttgcgttgtcttgccttattacattatgttgaaaattcttatcttcaaaagtgtccaatggtaacttctttcctgggttttaaagttggtctttcatattgaacattaactatttaagtacttgatttgaattgaagcctcttcagcatttgagaattaggctgttggcaggtttgagtatgtgtctataattctaggactggaagactgaggtaggaggatggtgtgtgaggctgaattacttagtgagaccccatcttaaacaagctcctgcccaagcccaaagccaagggctgagtgtaactgatagcaccttgtatagcctgtgcagggcccgccatgcattctcagacattccaggcagtcagcaaggaagctgtttgcagtagtgactaattacgagatcttggactagaaaagctgactctgtgcttcattcattgttctttctaagagttaaaagggaagactgtaggggaatcagcttaagactaagcacccttgtgtcactggatggctggtaattagctaggcttccagagttagcaaacattgtttcttcatcctctcctgacccataagttgtccatttatgagaatgggcatctcagttagtagaacagggtggggattcacctctgtttttcagagccttaggccactgctgcccgacagcagctagggccttgccggcgtccactcccttctccacactgcatcggcatctcacgtggatattggggatgttaggtctccacttttgtccagtggggtgacccagctcacaggggtggaactgtcttacactgccgtcacagtggtacttctaacgtttctgtaggtggatttccagatcacctgcagaatcctttccaggtggtaattagtagtgaatgtttgtgaaatgggtacaactgtgttgaatgtttgtgaaagctgccgttgaacctgctttccaggttaagctgttacctaatgatgggtcgcgatttctgggagagagtgcattttgagttctaaaagctgattttaaaatggaacttggggttccattgaaatttgtcaattcagagtcctgtgtatgtgtgtgactgtgcatgtatcagtgtgcttgagcatgtatgtgtgtgagcatgtgtgtttacatctgtaatgatgtcttcaatgtagttttaacatgcaccctttagttcaggatgagtgtgtgtgtgtgtgtgtgtgtgtgtgtgtgtgtgtgtgtgtgtgtaaagcatctgtaatactccctttttcagccttttggtattttttttctgtgcatcattttgttcttcaggatgcccagggagtggaggagcgagaggcactggcaaggatggcagctaacgtggaaaacccagcatctgctgactccgaggcctatattgagaagtacttgaggagtgtgctggccgtggaaaacctcctgactttagatcgcctgcgtcaggtgagcggtcaacagcgctgtggtggactcccatctggcctctatacttgactttctggagtctggcttgaagagtttactctcacaaaaaccactgagtgcaatggggtcattctgttttgtcaagtcatggctggtatttagaatgtagcaaaccttgaaccgtgtaagctggagtgcatctctcatatggacctctccttggtgtgttttccaattcccaggaagtggccgtgaaggagcagctgacggggaaggggaagctgagccgaaggagtatcagctcccccagcatgaacagagtgagtctctcctgccgctgctctagaatggtgtctgcgccctccttcctgactactcgttgggatgcctttctttctgcctactcttgtcacgcacggctgtgcccgctgttagacccaggatgcttgcttgagtgtcatggccacacattgcttatttgtcgtcaccacctgccctgtacaggatgggaggtcacaaatgtatgtggagcttaaaccccagctttgctgtacagaggaaggaaatcattttctgggttttaattatttttaaattaggaagtttggtatatgtttgcacaccaatcacttgaaggccatttagggtagtataaacgagtaaaacaggttgtattttatataactatggctaagatatgttgatttatatatatatatatatatatatatatatatagagagagagagagagagagagagagagtttatgtgcatattgaacatggagataattattgacaaaaaatgagccagcagctctttatctgctccttatttctgtgaagatgtgggtatggagagtaggtgcgcttttgccctcagctgctctgctttggaggaacgagcagctgcctcaaatctgtaagtgtgaatgacaggcagggcaggtttccccctggagagtctgtgggcgcagaggtgcaggaggcaatgtctgcccaccgcagacctgaagtgcggggccactctcaggcatgtagaaatgccactagttccaggtcccttcagaaagttattaacatactggcaaatgcagagatttggtatctggggtactataatctgccgaaggccaccttcgacaggtcaggttcactgagaaggggcatggagtttgtgattaatcactaagcagactttactccgagggagtaaaacttaactctctggggtgggggaaaaagtctctggggctggagaaaaaggtggaaaatatcacacacacacacacacacacacacacacacatacacacgcacacacacgtttatacatacactcacacacactctcacactcttttatttggtggataaagcaaagcaactcctactgcttatatcccccagcagaatcgctcaagcagtgcaaaaattacaatgtggctatattctatttttctttaagcgaatgattacaatgagtaaaaaattgtatgttccctaatgcctttacatgactaaatgtttcatgtaatacagataaaaaaccaaattattcccaagaacccacatacagtcgtatctaagcaacttgttatagattaacaaaatgtaagcaagcaagatatttctttcttggccagtttctcttactggtaggctgcagtttgtagttacagagaagggatcaattgtttcattatttatcttaaaaaacaatcattaaaaaatttttaaaagaatcacaaatctaaacttttatgtaaaaaaccagtcagtcattactgctttcaatcatcagggtgcacacctaccaagttttttttatcaaatcacatcaggaagctgagggcaaaaaatgggtacaagaaaataatcattgccttgatcatcagaccaggctcggcaagaaaggcatgtcatctagtgttagctgggctgtcattgttcttgttccctgacctcaaaaaatccctggctcaactattgagggtgtgactttctgaacattaaattgtcccccaagattttctgtatcaaagccactagcaaacacatcctaacctaacttttccaacagtccacacctccagattctttctaggggcgatggatagcactaacaagctccatctctacgttctttccgggggtggtggttgaatcattaatctgtgcagcagcaatgctggaaaaagatcaatcactgttattataaggaccaacaacactgcccaggaggggctggaaacccccttagagttttcatacagctcactgattaggaggggtgtgatgactcagggtggagggcaacaagcagagcgaaagaaactcccaacagcctggagtcctcaggacacatagtcctcagagctctgcctctccacagcacactcatcgtggttggttgtactgaccggtggacctcattccatgagtcctaaagctgtttgctgtttctctcacatgagcctcagcagtaatctaaatagtttattcttagacaaaaggctcaggccatggcaggatccagtgacattagagtgaaatgttttctgttcaggcccagtgaggtgtcaccccagtgtttagtggacatgaaagcctagggaaactacccatggaaagtttctggaaactgctcagtggttttcacatcccagagactcactaatctgcagtattggtcttggttatgattttgtctcactgtctctctgactgggaaacaggataacctcagatcactgtgatcctcctgcctctgcctcccaaatgctgagattagaggcacaggcactcaggccctgcttgatttgattttcaaagcaggctctttcttgatgctctcatgcttttacattaatctcttttatctcttcccagttgtcaggaagccggcaggagcttagcccatcccacagtctaggcagcaacaaggtgagttggcacttaggctcctcgcctctttcatcttctcaaacctctgtacttgcatatgtctgaacccttcatacacaccttggttttgcaacatttattggacagagtaccacattggtttttctgatcctgccgttgaggtccactaacacccttttattagaattaaaaagttagggtttgtttggagctaagacgaaaggatggaccatccagagactgtcccacccggaggtccatcccataatcagccaccaaatgcagacactattgcatacaccagcaagattttgctgaaaggaccctgatatagctgtcttctgtgaggctttggcagtgcctggcaaatacagaagtggatgctcacagtcatttataggatggaacacagggcccaatggaggagctagagaaagtactcaagagctgaaggggtctgcaaccctataggtggaacaacaatatgatctaatcagtaccccccagagctcgtgtctctagctgcatatgtagcagaagatggcctagttggccatcattgggaagagaggccccttagtctagcaaattctatatgccccagaataggggaaagccagggccaagaagtgggagtgagtgggtaggggagcagggcggggggagggtataggggacttttgggatagcatttgaaatgtaaatgaagaaaatatctaataaaaagaatttttaaaaagagttaggttttgctaaaaattatctttctggttataatattccatttacttatgaagaagaaatttcaaattgaatttataataggaaagctatgctatgatataaaaatatttataattgttattatttattagaaaaaaaagaaaacatgtaaatgccagtaacagctttatgcaaacagaaatgcactattgtttgcttaaaaaggccagcacttcttgtagtagctgcctgatctgggtcttacccctcacagtttgtttttgtcactctgaggtgcctggctaagtgttggcgctgtgctgacaggatgaccctagagtacactaggagtctgcattgtcatagtggcagtgtgttgtggggggagttgttcagaatgactcaggggtatgtagggaaatagagattggctgattgatgataattgttaaggccaagtagtgttcatgaggctatttctattcttgctaattattctgtatttgtgtttgacagaaggaggcagatagatcatgttggaacttggatagcatttagggttgcttggaatggtactgggtgactacacctttccaggccatttctgctgagcactgggagagatgagactgagtctctcgcagcctgtttgctgtcttgcttgaggtggaggaacatcacatgtttttgttgctggcctggcagcttctcttttctggatttcttggggttcctgaataacttggagaaaatggtgctgttatttccagttgctcagatttggcttgtgtcatggttctgtcttggtgacttggtctttttagtctttcctataggctacagagagcttggtacagtttacagtgctcagagtttgacacctaccccctcctccatcccttcccctcccccacacccgtccccaatgctgtggctttagatagcctgattttcatggttgtcagttctaccatggagacatctttgcatcctcctatgaatctcgcagtaagcaacctgtaagtgccaccttaggctgttgcttttgcccctgggccaagaggagacctgctctgtcacagatgtctgtggtaggtcaggcagatggcagcagacaagaatattaacagaccatgtgaatggaaaaaaagaccacaaaatagctccccattttcctgtgcaggggcctaaagcaaagcactataaaagatgatcagcacatgaatatttcatgtcatgtctctccccagtgagaaaagaatcctgtttccctcaaaatcatccctgtagcctgttaaggacattgcctgtgtcattttaaatgcataaaatgggttatgaacatttataggagagttcttaagatggacagtgtttagaaggtcagaggacctgttagactcttaaccacagccgtgcttacagtggcttggcacaggttacagggtaatcctgatggtggcagaggaagccaactgcacactgtgctataaccacagtactactacatacatgcacatgcacacaggcacttgggcagtatgctccatcttgatttctctacaaggaagtagttaatggtcagggagttggtcctacagatttcaacccagatttggtgatgctaaaagtgctagaaaatatattttgaaatcatcaaaaattatcctcatgttagttatgtctatcttgcaggcattcatggggtcagttctagttttctcttactctgtttgctgcactcagctctgctacagataacgttgttggttatgctgtagatgagtgctgtaggctagagtgtgaagtgttttatcccagagaccacagcctagccagagtactatggtttgtcaaagaagagtccatgagccagccccagcctctctccccctgttttgctctcttgtcatgagaatagatttcgttcttgggagcaagtggcattaaggaggtgtaagaaggcaagagcgggagaggctgattgaactggggttgatggggctatgagaacttgttgaattcagttagcagaatgtatgtgtgcgctcatgctcgctcatgtgcgtgtgtctttgagcgcatgcacacacacacttatttattatttctgatttactcttcccatgttaaaatcagaattgtttcaccaaaattaagttggtaaagtaattaaagagctgggttattcccatccccttagaggctaaaggaaatcctcacaaaaagtcttccaattaaaattataagatgtgaccatattgaagtgctgtttttacttacagttacaggatgctttgcctctgttttagagacatttttaatagatgcaatgaaaacagattctctatgactgtctacttgtgggtatcccatgcagaattaatttcagcttgttgctggccttggcactgcaaagctggcgatgtatagagaccttctgtaatacaaggacagctgtcaacaagtctgttttcatacctaaagccactttagagatggcatttgtattaagttagtaaagtagtgctgttgtcctctgaagtggttttgttgtgggatgctttttgggacctcatgcatgccagggaagggctctacaactgaggcatattcccagccttcctcagaaactcttggcagagttcaagtcagctggtgtcttgagcagggtcgagctaacgcagcttcctggaactgccatcagctcaactttggttccagagatgctaagcgtgagtcacccactcttcagctgcatcagagctgcctgtgggctggaaatgacataggcacatcttcttatttactgttttgtcactttcctgatcaaagtcaaagtcttatacagaaagccaaaaaattatatttggtggaagagcgggggctgatgggaggatggctggtggacagggagtgtacagggacctcctagacttgttggattggctgtgcctctgagtctggggccactcctaaaatcttgaaaggttattttttttttttctttttcttttccgttcttctctttctttctttctttctttctttctttctttctttctttctttctttctttctttctttcttccttccttccttccttccttccttccttccttccttctttctttttttttttttttttgagttctgccttttagaacaactagtctcagtgtgtggatccaatttcctagtatcttcatggctgaatcttaagctcacaaggaagcagatattaggaatagactagtcagtctttgggaagtgccatgtggtgccaggtactatggcagaaggaaggaggtgccatgccttttttccttcaggtctgagccgtctgagagagctcagaaaactccagagcaaaaatctcaaagtcccctctacccacagcctcaagttcactccctttgaagtacatttaactgtactttgttttgttttgtttttggttctgttttctcccccagcatttcaatgaagggagaaactagcatagccaggcaggtccagtttattgcaaagtcagcacttgtcttgtccagccagggacgggggtgggggggggcacacaaccataggcagccctaccctggatgctccattcatctgtggtgagttgtgcagggggaggagaaccacatggaaggaggtttctgtgcatctctaggggctggcagaaagggaggcccaccttgctcttcctcagatctgtccctaggaagcagaaccagatctccaggtactcggatcctgactctgggtaatgaggctgggaacaagtggctgtaagggtctctgtctgctctgactacagggacctgtgttgggtgctatggtggtctctctgtgccattagctcataggcctgcagtgtgcttaggctgtgtttgggtgttgcctggaccagtcatttatttatactcagagtcttggggtgtgaggcaggaagagccactgctcttgttcagcctccatgggacattgtgcactgggtgccaggagtcctgattgtgccccagggaagggacacctccttcagttgttattggacaactctgtgtcacacagcttggatgctaagtgcaacgcagctgctcagtttcctaagatacacaatgtggttgtgtcagctgccagacaagagagcctaagatattagaataaatttactctctaatgaagtaagttgtcttcagaacaaccttgtatgaacttgacttcgtgaacagagatctcaacacctcttccactgctactcttgaaactcctgaccttagtgttcagatcctgacgtgactccccaaggaacctaaagtgggcagcatcccaagaaggataattaagttagaatgcaaaaattaacaataaaaattaacagaagaatgcagtctgtaaggaagtgtgttacctgtgggggtgtagatgcccagcgggagctgcgtttcttccgccccaatcatgtgcctggagtctgttttctgtctgtttcctaatgactgctcagagagagcatcagtgttttttgttttgttttgttttaatgccatcaagtgctgagtgagttctctgtggtgaacacgattggatcacttagagcttattgattttatgatcagtccttcagctgccgctaaagcagatggattcctactgcatgtaggaagttgtgggctctcccctcagtgttgagccttccaggactcacatttccaccctgcttctcagcagccctcaggacatcctaattaaccctgggtcctttgtctgtagcacgctcagttaaactaacattaaaactgttacttaacctcagtgagaaagacctgagttatcacagaacaaaagagagcttaagatctgctcacaacttgaggctcagtaccaagctacctcccagaacggtgggaagaggaggccccgccccattcttgggctccagttgaggcataggagtgagggtgtcatctccagccgcaggagccagggcagaatttgagggcatttatttctaaaggagcctgtgttgaggaggtggcaggatgcagtagattttgggattactggttgtcggtcacaggttgtaaagtggagaggagtctgcagtgaacattcatctatgagggactcagccccatgagcacatggaagcttaagaaggagtgatacagtcagacttccatcccagagaatagcgttttagtaatgctagtaggctttttctgcagtgttgaataattttttcttaaatgtagtttttaatttgaaacaagatgacttacttttgtccctgtgcttaatagggccggtgggaaagtcaacaggatgtgtcccaaacactagtttccagaggaatagctccaggccctccagctctctctgtttcgccccaaaataaccagtctcctgatcctggtaagtttttttaatctgccagtcactgccatgaaatttgagtatctttcagaaaaaggttcaatcagaatgtcctgctaggtccacacacagactattcatgtccatcagaatgtcacctattcttagcatgttgggtggcatggtttggaagggtggtgacgttaccctgtattcttctgataaattaccctgtgaccctcttgtcttcttactgctcagcttgtttgttaatacttattgtccatttgtggtccatgatgactttcagcttttacgtcctcatatctgctaagttttgctatcaagattgtgttggcctcacacagtgctttggaaatctgttctcctttcttttgtgcatgggtttctgtgtgattggtaatacatactccttaaatgtttgacaggattacttagtgatgctgtctgaagctggcattttctttgtgtagaagattttgaattatgactcaagttttctttagtgtggagtgatctcgacttttgtgttccttatcagactgcttcctaagtcctagttcccaaaaagtttttggtattgtctaggttattgtttattcttataaatgttacagtatttactctcactgttcttgttaagattcatagtgaggtgtgaggtgcacattttccatcccagcactggggaggtagagccggaggatccctgtgagttcaaggccagcttggtgtttgtactgagaccctgtcttgaaaacaaaccttcaaaacaccacaagcaagtgagcacgcagaaccaagcacacccaaaaacagagttctccttcctctagagcagaagttagtcctcaacactggcaggagccatgcacactggagcatcacggttgctttagttactgctgtttaaattggtagatgccagctgtggtgatcttttcctactaatgattttagtgatgcctgtagtagtttatactgtgggatttgcttccaagtggctcttggcaaatgcagagcaagtgttatgtgccattgttttcacttttcactccgacaggactgggaggcgtggcagcctcttacttgaacccagtgaagtccctggtgccacagatgccaaagctgctgaagtctctcttccctgttcgggatgacagaagggggagacactcatctccccttgcacaccaggtgaggaagccacagtgaatgtttccctgagctgttgtggttctgaagctggaggtagaggaacagacccgtgagggcattggtgcagcttctgaccctggcagagcctgtcataatgcctctcccctctttccagatagcagctgtttgcacatattgacaccccatcctttctgctctaaacaaaactgccaagtctgctactaatgtgattcatgtgctatcacttagtacaacaatcgtccaatttatgaaggtgcacttagtgttgtttgtgttgccaagtagaaaatgtaattctatttttaattcttgatttcacttttcaaacaatcttgaatcataattcaccccaccctcaatgtccagtggacaatcagttctttgactcaaagtagtcacttgtcttcctcctgtttaaaacactttgtgtggcagtggagcgttagagaaaatgttctaggatttcccaacaagcaggaagctcctttcatacggtggtgaaaggaacccacttggagatgcagtttgtagtcatggaggctttatctcaacagagaatgttaaatgagatttatttctactcattcagaaacataagccatgcaggtgcagctgttgaagtgggtcttaacactagctcctccatatttcaaatgtcccagtgtcaggaatgtaggtcaggagcgtcggaggcagagcgattcttaagggcttctatgaaggcatcttcaggagagattgtgttggcatcaataagttattctgtatgtagagagagcttcctgcccagtgtgataccaacttgcacatcagcacacagagcagatggcaaagtgaaacacagtaattttgaaaatgttttcaaggacatgtagctaggcaggtcaaaggtcatttgccgttattgagatgtgtctgtgaatggagggcgcaggcaggcaaagctgactttcccaggggctcatcactgtgcatgctatgcagctttaaactggtcattgtttcatcaagtatgatgggagggtctctgcattactaaagtatatgtaaagaaattgcccttccccaatctgctctggtgacccaaagcccatatgggacagccaccatgtcttctgccttctgtaagtactatggtgacattacatggagcttgatgaccacagttccagctgctcttcactgcagtagttgtctagatggcaggggaggagtcatgttgaagacaagcagcttttcttttcagtgatcagcgaacaagtccaagccctggctgcatggagagctcatgagagtgagaggaacagcagcctgtgagagacaaacctgatgggaatagagaggcagtctgtcatgtccaggtgacaagaaatgtatgaaaatataaattaacactgggcttggtgaccgtgccttgtggtgtagctaaaacattaacagtgatttgtgaaaacatctccctggggcagatgcttccatatcctcaaggttgtagtctctgtcctcatatgcataaaaccataagccttgtatcaccaacagcaagtccttcttggtggcctgtcctaggctgggtgtccgggtaccttcgtggccttctatatttatccacatttaaccagtttcttcccctgggtagctcacttcattctgtttttaaactgttcatatgaggcagctggaaatgaaaccaaagtctgcactcttactgtggcttatagcaccctccagcagtgagtaccctcctttagtctgtgtatgctgcctgccagctctgtgccattctaagacatcccactcccattttatcccacgaacacaccagcacatgccattcagtttcagtctacctcttcttccagtgctggtggccaccctgtttctcctgctttggtttagagccatactgtcatggaggccacttagtggaagcacagttaagtgcatcccagccctctttgtgagccaaataaaaagagcaaaccaccccccacagatacacatgcctttttttcctgggagcttctaggtttttgtttgttgactgtctccctgtggaatataactacagtgggcagggctcatttgccctggatcatcctcataagatggagatataaagttgtctcattgtctatttgtatgcagatggagatgtggccctgtgtggacctctgtcacatgtgtagaaagcactgtttgtaggttagcgatgagacaggcacaactgagtggggtcttgcggtatcaagacatatttgtgaactttcctaggtggatggacatgccattaaaacaaattcctgaagctctgatttttctcctgggattcagttacccaaaatgcactgcctcctctgctgctccatccaacccctgagctactgcctcagtctctcaccttcccccactgcctgctaaagctctgtgggatggaaattctaattgcaagtgacagcgtcaacattagttttcttgcaacttgggtcacttgaaatgtgctctgtgctgctgctccctgggtgtacacccttggatggggcttcagtgccagcgcgcctggctcctgtatgttcctcttccattcttcactctcttggaagtctgattgcatacctggtggttgagattttgacttaaaaaaaaaaatccttccatgtggtttcttcaagaactgggtcatctttttttgtggccttggcctctgaccttttgtgttctgctggtagaatccagggcaagagtggtccatgctcttgaaggcctacccagtcttagcagttctgggttagttggcccgccgcctgtggcaatgccttcatctttgtgttgtcttgtaggggcctctggggggcgggtggggggggatgggtggaacagtaaggtgcctgagcccgacagtagtggagccgacttatctcatttaaannnnnnnnnnnnnnnnnnnnnnnnnnnnnnnnnnnnnnnnnnnnnnnnnnnnnnnnnnnnnnnnnnnnnnnnnnnnnnnnnnnnnnnnnnnnnnnnnnnnnnnnnnnnnnnnnnnnnnnnnnnnnnnnnnnnnnnnnnagctggtgccgaggccagggaggggtaggtacttcttaccggcttgttccacagggcttgctcagcctgcttacttacagaacccaggaccatcagcccagggatgacagcatccgctgtgggctgggccctcccatatcagtcactaagaacatgccctaggttcagtggttctcatcctgtgggtcgagacccctgtggggcagaatgaccctttacaggggtcacccaagaccatagaaaacacagatatttccattatgattcataacagtaacaacatcacagttatggagtagcagtgaaatggttggaggccccacagcatgaggacctgtgttaaagggccgtggcatgagtgaggttgaggcttacctacagagagattgatggaacattttttcagttgaagctctcctctctctgacgactctagtgtgtgtcaagttgatataaaactacccagcacagcactgagtaggattagtccccagttcctcccggcacggctgctggattctttgtcctgtgtccacccttgtcagtgtggtccctctctctattattgtattaactacaaaatgtacaacactcaaaagggaactttagggttcccttccaaatatttcttttaaaattctttttaagttgtttgctttttaaaacttatatttttgctatgatctgccatacttcttagttatagggtgtcagcatgtgagtcacaagcacagtgttggctgtttaaggcctaagacagagccctggcacctgaagaagccactcttcggccatcaggcatctggccagcataatgcatctccatgttggtggccgccaccccgtctcccctttaaggaggactgagtggcatcgtggtgctaacgggactacataccagtcacctgctctgtgtcaccaacctggtaaaaactccatgaccaatgtttgatgaccctgcttgccacctggctccaccatcactcttgtgtagatatctgatgttggtgatggtagtttagctaggcgtgagcaccctgaggttttatttgctgccagtgtctgttcagatgttccttaagtaagcaacaaactgatgttgagatgtttagaacgtgacccaagatgaaacctagaaaaagcctgtcagtgaacatgcctcacaggacctgtcccgtctccgaggcaggaagcgtggtccagcggttaatgttgtgggacttagaaacggcccgtagagagagagagagagcagcactacttagttacttaaggctttcagtatggacagaagcagagatccagatggaagcctgtacaccatgttcaggggcacgggcctgttaattggaacccactttcacttctttcttaagaggagaggaattgagcggcttcctttttgatgatcacagtttagtttggagcttaacacttcctttgagaccgtcccatgttgtgagttctctggaggctcagtggccaacgagcatcagggcattcaaggctgccaggaagagcagcacagggtggctctgcagtagagtgacatgaaacactctgtgagaaaggactgaggagcgggtttgctgcctgtcagtaccctggtactgacgcctcagaagaagaacgacaagaacaatttctctgaagtgttgtctcagagaactgggattcgagttagcagagcatagagccagctatgagagcgcagtaaccacagactgctctctacagcagcccattcctgcatttgcaaacagtgttttctagaggggatgctaacctggatgaggcccgaggtagaagaggctcagagtcttctcatggttctatcactaccccggcagggcagatgagttgggagagaaatgcaagtttgtggtgtgagaatgagcactgccaggaaccctttcatcggtggccttggcatttgcagggcaggagcagtctctgctgtccctcatgcagggcagggcagggtgggaacagtttctgctgtccctcatgcagggcaggcagggcactggaagatatgtgcttagtgcgtctgagccagagagtggcccagaggctttggttcctggctttgattcaggattgtgtgtggctcatggtcttcttttgtgatggaagttcctagttcctgttttacaaacaagattctcataacttgtgtgtcgttttctttgtgtgagggtattcagaaagagttgggcttctcattttcacagagggcagttctggttgtaatcagtttctgtctgagttccagaaatgcaaagatattgcatggaaagaggtggcagctgacaaaattgctgtctttgaccttccgaggcacatttagtaacgaatctggaaaataatgaactacaattaatgaaacccgcacccgtgttcaagtgtatttctcagacagcacatacagtaattgaaaggacttcctgctctctaattagtcagattgaattaatttgccatgatagctctcttcacgtgtctggaagtctgtgttcctatgaagttgttggtgttcttcagagcttgagattccaagtagctgcattgattagtctggggaacgaaagtgttaaagtcagattgacttcccaccagcacaagtgagctcccttctggcctgctttcctgtttctgccctcttgggtagtatggctgtattggctgcagggacttttgcttcttctgcactgtagcctcaggtgcagcaggccactgtcacttagtgctgacctgttgaggaaactctcagatgtaggtagcgcctccattgcacttagagccttagagttagttcacagaatgagctgaataggttcagctgagtctgattaaaaataagtaatagtgttcatagaattgctgaatcaaggaagtctttgaaggagccaaactagagagaaaagagcctcttcaacccatatttccttgtccctcttgttcctgttttaaaagatgtccatggacagggagattgtaggctgcttcagaatagggagttagaatgtcaggtctatgtgttggagtacttaccccccctgggtctgcaaggaagattccagaaggaaatgggcagactattcaagtatgcataaagccctcacagtgattgttgtgtttgtcagaaattttgtcccctcctatgattgacagttggatcctgtgactgaccaggacctgtaatgatcaactcacccccaccccacatgtggtcatctagagaacacatatgactggaccaccaccttcatatatgtaccttgtgctggtgacaggtaatctaagggtgctgtgtacgtcagacacccacttttccatttgaaatatagccaccagacgggtaaaaagctggcttcatcatgactgacacactctactcacattagcctgacacacagagtgtaaagcagaaggcagcttggaacatggtaataccaggcactgaggatttcaacgacaacatagcttcagatacccctggcaaggccagggccttccctgagcatgcctctgccctcactatatgaacatagtccttgacacaggcctctgttgatgagcttatgggtcaggcttggtcctcagtagcatgtggctattatcccatcagaggctctacttttatcagacttgttaaagctagccatttctaatgccctgcatctagactctgcttagaattttctcatatcagaaggtgagatgttgacttctgattatttgtagcaaaaataaaatttacaactcttataaaactaatttctcctacttgggcctaaatagttgactaatattcatttaaataaaagctgagtattaacttggccacaatttgatcaaattcatgatagtaggtagatgttagaaaaggtttataaatataaaaaatgtaggtgacaattcagtattgtttaaggtaattaatgcttcctttgtccagcttctcttgttccctttacagctttatgctaaaatttacaaggatccatcttttcccactgtctgttttattctttgtgctgtttgttaaatgactgatgtacgtgtttatttcttcagaaaacaccaagacagcacttattagtgccctcctaagagtggagggcaagatgttccttctgaactccacagatagaggcacagccagtgcagggtcccagcaggtgctgccaaatatgtttgtggcatagggaagggagtgggtattcatgaagtctgagtgagatgtgatctcataaatgactggcaccattttcctgaaccgttgccaggttgtggtggctgaacatgtgtctgctgggtttcagcagtgctcagcagaccacacaaaggctcctgagcatcgctgactccactcagtgctgggctccctaagccctggttctggagcaggaaacagataattatattcacccttctcgcgggacttcttaatatttatggttgtgaaatactttgcagtagcttttattaatagttaccagatgtgtcataaggattaatgaatttacgatgtgaagtgtttagagctcctgaaatagaggttactgtgcatggaatgtgcaaaggagtattcaaatggctgagcttggagggtggagctgttgtgtgtgaaggagcagtggcttgcagaaggtccagcttagtttgtatctggtaccttactgcttgagcctctcccccagccccatatgtggatacacagtgtgttgggtactctgtccacctttctcctctccgcctgggtaatgcctctaacttcttcagcctccaaacattcatcgcacttcttgtttcctcttctttctcttcctatccaagtttaggccctcaggaactctctgtggaaccactgcaataatgtcttcattgatctctcatcctggtgtcttccctccctaaccagtcttccaaaggaagattctcctctctgtcatcacacaaagacttctatgccccaccccttccagtttccaccccttcactgcactgagcctcttcccttactggggctgttcaagatcctggggagacaccagttccctgatgccttctgctcaggctggtcccacccagtcactcggtctatctcttctcccctgagttccctctgccttaggaccttccagtctgggatccatttctcactcttcattttagtaatttggcttacacatccctccctgcccgcaaacagaccacctctcccaaatgagagaagccaaatggacattgagacttgctgagtctggagagcggtttcatggtagaaccagggcttggtctgtttgtgccctcggttaatttttgcatctgttttgttagggagccaccgagtcatgttagggagctgctgagtcatgaggaagagtgtgcgcatgcttccctgctcaggatcacgtcagcaggagtccatgtttggtggccaccattccctcctgctaggcttctacatttccttccttccttccttccttccttccttccttccttccttccttccttccttaaaaaaagatttatttatttttatgtatattactcataccagaaaagtacatcagaccccattacagatggttgtgagccaccatgtggctgctgggaattgaactcaggacctctggaagagcagccagtgctcttaaccactgagccatctctccagccccccaggcttcaacattttaatgccatgcattttcagtaaagaatggaacttgcagcctgagcacgagagaaagaaacccttttactgtctgtactaagaaaatgccctgtaaaccttcctgtttgagggagacttcggtctgtggggaagagagcagaggcagcatcaggtcccttggacttgaaggtggagtggcaggcatagaggactgctccatttcagtgtcagctgccctgggtgtggtcagaggtctatgtgctgggggggggggtgctaaggacagaatatttttttttttgtggtaaaggcattgaggaggtggctggagtcttggagttcaagctcttccgacagcacggcagtagggctgctattacgggacaccctcgcttgttcatcctctcaggcacacatgctcctagctcccctggagtttcaccccagtgtctgagggtggaatgtaaatcctttccctactctggtccttctgtcgcactccttctgcattctccccagcacctatcctgagccgtcctactaccctatgagttagaacgggtctcgggtggtgttatctcccaactagtagccctagtggctacggtgtcatctttgccctaatatgtgtttgttatcttcaattgagggatggtgaacagtcatgcttaggcttgaaggccttgtgtacacagtcagaaccacttggaattctcagggcctgggaactaggagagagtggatggtggcctatccaggtcaggtttctgctgtcttggatacatgtggtcactgagcaactggccctagtccttgacttttcttccatgggatcctttagtaagtctttcaacctttccaggtcagaatggtgacatagagtcagtagcagagctgtggccagctgcacaggggatgtgaagcccaagctgtgcctgccctgcccgtgggtccttctctagtgctcagtgagcagagggagagaagggaacactgaagccaaaattggcatgagctggagaggcagaaatggtgggctcctggtttcttccagagaccttcacactactgtctgcctctgtctagctgctgttgacctcatcataagatgaatttggttcctgctccctccttctgtcttcatgttcttacccagattcttagcatacctctagcactccttgaatcacgtgtctgtaagtcaagccctctgctgggtgcttcaccccttcttcaggctcttctcccctcacctgctctgatgcagggcttttattactgcaatgcctgcctgagcttctgctgcctctccagagggctccgcactgtcagtgagatgctttctggctcttggctgccttctgcttgctttgctcaggagtcaagttacctctcttctttttcatagctctgttagtttcagatgcccaaggctgcccctctgtctttgtctgcttggtgctccagccagaaaagctgccttcgtcctcagtcctgcagcatacgatgggctccacgtgcttcctggccacccaggctcaggccgactcctgctttctgtttcagtgacttcatgtaaacacttgtgctcacagtccagtattgaccagcatgtgtctgtgaccacagagaagaagcatgacaattatatatgtgtgttatatctggctggggccagcctgtcttgtgtggtgtagaaccctggcaccctcaagcctagttggcaggaatgtgttggagttcctgagagttgtgacggtctccttgtggctcctggcagctttctgctctgtgcccctctaccctttgggccctcactcatgtacttgtctcctcagcccgtgccccgaatcttggtgcagcctaccttctcagatacctgggcaacaaggacagaggaggtgagtcaccaggttggggctgccccacttgcagaggtggccctaggatcctttggtcaattcctgcctttctgtctttgcttcccactttaataattagctacaatgtaggtcactgccttctccatgcacaggctccttgttacactttgctattttcaacctgctaatcatatgattgctaaagtttttggtgcttgactgctaatgtagtctgtgctttaatagcccactgctaggcagagggggtttctataaacagaactatctttttcttgtgagtgtttgcttaattctcagttttacagttcattctggtccatgttatcaacgtgaaaagcctaatgcaaggctgggagagaactgtttcttctggtctcccacagcttggcagtgcttgtcatcctgctagcaggagacccccctagtcccaccatgccttcagtctttcagaggatggctcatcttcataagggaagtaatacattcagacaacagcaaacagggtctgatgatctgagggacaattgaccctttaggtagtgccctattgtgaaaagtcccatcttagccatcccaaggcccctctcctgggagtattgtcggtggtcaagtggtcatgtggtatttaggctggcagttttgaccagaagcagcactcactggttaggctactgtgtgcctggctcctgctgctcatcccagtggctcacagcctttggaaattctacaggcagcaaataggtttcaagtgataaatttgaattccagccaagtgaaactgtttacagggtgctgggatggagctggaggctgtgtcatcttccttttgccatctttagtctgccttcactctacctggcttgtcccttccatggggagcatgcacatgcccttcagcttctctgggcttcactgtaaatgactgtttgtagttcccgcacccctttcccaccagtgatccaagtggggcattggaacacctgtcacctgaggtgctctgtgcctctccttcatgccactctggctagggtggaactagaggtgactggatctcactgatgggtgagtatggaaaggccacaggtcatgtccagcttctcttgtagctctgtgcacttcccttgcatctagcaataagaaactcgagtaggaaaggaaaggaaaggaaaggaaaggaaaggaaaggaaagggaagaaggaaggaagaaaggaagcaagcaagcaagcaagcatgtccaagttgcagaagaaaaatgattgaaagatcgcctaatctttcagcatgtttatggcaatgacagttattgatctgctggattgagtaagttttcagtcagagccccatcacaaaaatgggctgttaatctccagaggtaccgtgaattccctcccccacaaagtgtgccttgtgggcaaggaaggcttctggaagaaagcaggaatataaatgacagttcacgggaaaatgcatgatttatcaaaccactgagttaagccaagtaactggaagagacttatagatcttagctccttcccagttcaaataaatcctgtgtttcaaatgaaaagtgaccatctatgcataaatattgggatacatctttacttttctgcgcagtcttccatcttgttcccatcctgtcttctccttccccagcaccgcgggttcagaattgggagatagtgtttgactccctcagacagcttgttatctaatagaacatcctgtgctcactcccaaaaccctggggctagcgggggctgccgtcactgtgaactcctggcttcgtgtctgtgccttctgtctggtaactcagacagtgatgtgaaaggccactggctctgtccttgcttagtgacgatcccttggcatatgtcccagaatcagaggcccttaggccctgacaggacactaggagccgaaaagcaagctcctagggaaagagccctagctataggcagcctgcgccccttccttgtccctgcctcccagcctgagcaccccgccagcactgtctggggtcagagcctcatgtgcctacattgcttgctaaagcacttgcagattgtctggtgaggtcatcctttggattttgccagagaaaagtgcttctctgctctctttagtgcgtttcagtcctcctctgaggacagtggaggttgagggcatctgcttccatgggaacagatacctaggaccaggggagctaggatgggtggggtgaggtttagtgtgtgctgcttcttcctggagtgggggcctttgcctcctgtaatgccctcctgtgcccaagtgcagggatgagcatctctgtagaagatgcagatgcagcggggtctggtccattgtgctcagccacacccaaacacagacgtacagcacagtgttcacctggcatttggttcctggaccaaggcaagctctgactaggtttgctcaggtgtgcactgcaccgagccaggaacagctcctacctggctcagcatagatctggtagtgctagcccggtgggctttgatttggtgggaaggcctttccaaccttccttagtatgccttctgtctttctgcaggctcaacaaggcagccctgggcctagtggggctttggaatccatggtgaagatggcggcccctgcagtaaagatctgtgacaaacctgtcaaagtgtcttcccctccatctcccatggtggttactcagcccccagaaggacaggatggaccacccagccctttgagtgaagcttcaagtggctacttctctcacagtgtctcttctgccaccctgtcagaaacactcaccttaggcctggacaccacaggcctcggcagccagacgcctggttccccccctgccctgtgtcaggtcaccccagagcctgagctggctttcctctcctgcacactaagccatcctcctgccccagaggaggcccacgtacctgcagctcctactcaaagcacagagctggaggttcccagagcacctcttctttctgaacccgcgtctgctgtacccacgtccccattcagaatccggaaagtgcggacctcagagcttaagtccttcacaggcatgctgggtggtgcctcctccggagcagaggaggaccccctggcttcagaagaccccagcaatgctaggggacagactctggggaggctagaagtaacatctgactctgaggatgccagcgaagtccctgagtggctcagagagggagagtatgttgttgtgggcaccaacaagacgggcattgtacggtatattggaccaactgatttccaggagggaacatggattggtgtggagctggatctgcctgcaggtgagtagactgcgggtgcccgtgctgaacatggccctgctgagtgtggactggcaggaagggaacatgggatgtgctgtggaccggagcgcatcagactccttgagcctcctgacccttcataaccagaagctagcttatctaaactctcagaatccatcagagctccaaggtagtcactgaaaactgctataaactcagtaatactttaaatgtttttctcttgagtccttaccagctgtgtggcccaggctggtttgaactgacttgggcccagtgatcctccagctgtagccttctactatctggggctacaattaggtgccaccatacccagtgttctttgtaaagtcacagcagcagctctgtctcaggccacattctgtgctccagagacgccaggacacttaggggtgagcacgagcgagatggcttaggtgaggtcaggtgagagtggtgcagactcaagtcagactgcagagctcagggtgggcaggaagcgggaggccctaaagaagcatgtgttgcgacatctgtagctgtttttccagtgttgttttatcctttaagactaggcttcccttgaggcccagcactaggccctgtgtctgacccagcctgtggcctcttaggcactttgatcccttgttgtaagcacaggccaaatggtttgcttgggtacccatttccaacctgggccatgtggagcatgcttactgagctaccctaccattactgggatctgtagtatcttgtatttgtcacctcacagggaaatcccatatccactggcagctgtgccctgctcagccctgggtcacagttaatctgctttttgttcccaagtttatggagggccatgatctggggttgggtggaaggaaacttctgtgcctggcatctttcctaacatgtggcccgggtccctttgtgtgcagtgccattgcagctcttcctgtttctgactgaggggctctgccgcttgtgtctctcatccagcctgtggcctcaccagtccatttatccctggctgcagacacaggccaaaatgacacccttgtccccgatccgagtgcttcctgtgtattcactatctttaaaaataatctggcagagaataccttgatttggaagtggttcaagatgttaactgtagtagaggctggaaaaaatttcaaatctgcttttcccaaagtgcaggaataagtctgtgtctgcagatgaactcaagaattaaagagaattaggaaataatttaactcacctacaggaactaagtacgtgcattgctgtgctaggttcgaacacgctctggtgagcaacatctcctccttgacttgtaattgtcagaggagaaatgctaagggaataaatacattttgataagaacaagtgtgctgagggatagaggagggtggctgaccggaacaccacaagctgtccagacacacagagggtccaggaagcagggctggcaagttgggctgtcgccagggtaaggccaggcagtgtctcatgctgctgaggggggcccagctttctgtgtttgaggactagtaggaaagtggcctcagaggcctgcggggcaccaggtgcccgtatctgagagtcttgtggtgagtagtgcagtttcatcagggactgaaaagatgacccctcgcagagcacaaatgggaggaatgggaacaggaagaccgctttgagggttgcagatgtgtgagtggggagggctgaggttgaggtagtggtaggtatgggagcaatggtcagggttcgggaagacgtgtagggcaggtggaaggggaccatcaggaggagtgtcaaggtgacagctaatgtgtgctatcagaacaggccacgaacacaagtccctgagttggaaaggctgaaaaattgccgatcagtgtaggatcaccgtctcaggtgatccagagtcacagagatgataggtgccctgggggccaagctgtgggacagtcatacctggactgagctgggacatgggacattaagccagagccttgcttgcatttaggaaaggagctggtgcccctggaggagcagcagccagctctgccttgatggctcccaccttgctgcttcatccttcagactacaggctaggggctgcctgtccctgataacgactggttgctgtcctgagaggctactgttctgggcactgggctcactggcctctgggttgggtggcttggaggtagcagcatgatggatgaacacagtaaagaagatgactgacaaggcggctccatgatgcttgtttccttccttccctgcaggaaagaatgatggctccattggtgggaaacagtatttcaggtgcaaccctggctatgggctgctggtgaggcccagccgggtccgcagggctgtgggcactgggcgcaggcgcagttcagggctccagcctcagggagccccagaggtccgcagaagtgctaccatctcgggctctgccaccaacctggcttcactgacagctgcactggccaagggagacaggagttacaagaatcctgagaaccggaagtcctgggccagctaagatgcacctcccttgtggactcgaacaggaagggggagacctggctcctccatgggagcagggccatgaatgctttttgcacgacgcagggatgctggacaatctggttccctgttccctctgggaagctggaagctggatttccttcctctgcttggcagtggcagaggccccttagctatgctcccctggttaggggtggaaggttccaggagcccagagactcgtgggatggagccagcccagctcctccctgcctgcttgaggatgggggagggggttcccagccagatgtgttgggctcccctttccttattctgctgacttcactaatgtcttaatttaagcaatgatcctaactggtgacttgccctcacagactggacttcccctgcctgggcccagcacacacactaccctctccgtgcaccggagattatcagcctcccctcggccacacctcatcctgctgcacggctggctcacagggtttctaagaggcatctttgtgggtgtcccggtgtctttacattcaaaatcttttctgctggccattcatttcctaacaggatgcttgaactatatttatttaatttatttttccaaaagttaaaatacttcacaatccacaatcgctgtctatcccaacatgcctgcctgtgctttctggcctctggctggccagagctgcagcctctatcttggatggtggttgctggaagtggcagccatcaaatgaaaccagctgcccttgtgttacttgattggagacaccatggctttactgaccctggtgggaaggctgacccagggttggcacggatcgagccttcagtaccttgtctggatctgccaggcttcagggagctggaaaatgttttgactctgcctgtgcctggggccagcagctggccaggcaggtagtgagggcagaaccatctccatttccttctgtggatctgggctggagtcatggtatatcccagggcattaccaaccacctgtttgctgagacgtgcatggcctttgagtcccagagtgttggtggagggctcagtgggtagatcagagtcacctagtccctgttgtcccaggccctgccctgccttccacctcaggctgtatcagtacacaggttatccttggcagtttgtttgaagtttgactctcagattctcgaagaaccacagctaacaggtgtctgtagaggaattggttctgtgaggacttaagccttttaaaggaagtagctcctgccaggtagcttctcagaacccctcagcctcctctggccattgtggcctgtgctagtattgctgacactcagtctggactgtctgcattgtctgattagcccagtataaacttcactaccatctgcttgcccaaaccctgaccagaggctgcttagagcgctaggaggatgggtggccttcctggcacaggtgcagactctgcctgcaccccagcctgggagtcaagtgtcactccacttgtcaccacaatctgccaggagagacctgcctctgttccattcttgaatagcacagatttctggagctgccagctagaggcaggcaccaattcagtaactcctctccctcagctggcatcttgggatacgcaccaggtgagttagcagtgccagtcctgcctggccactctatggaagcccacagtgcttctgactgtgttctagtgagagcttttctcctgtcagcatccacagtgtcccctagagagcagtgtcccggagtcccatcctctaggatggccatgcaatggctgctagggagagaagtccctgaggatgtaatgccagtcgtgttaatgctgtgggaagggacattgtgccacctgtcactcggatggtgtaaaacgggagaaagttactattgacttcatctcgctatccggagttctcaggaagtcctgaggatctcacttggccagctgtcatcccgtggttctgggaccactgtctctctcccagcacccccttcccttccctccctgctcattggatctgaggttccctagcctttctatttccaggctgcctaagaaatccccctgcctctgaaagtaataccatttccacagagccttgcaggatactcttcatgtgaagcgctccagcttcacaggcaactggccaaagcacatgggtcctccagtggctggagggtgttttgtgagggcagtctgtctgtctgcacagaaggctctgctctcatgcacttggtgctcaatgtggatgggatcttttgggatctcatggcacacatagcaagtgtgctagaagtttatcctcgtgggtgttccttatgagttgttcctgtggccgagaggaccctgtgttcctgtctgctttgagggcagggaggtgaccttgggaaagctggcactttcgggtgggtccgaagagatggggctcaggtgcttgctggtcttctgggtttgctgagcacatattgcactctgaccttcatgttgcctgtgggccggatgaagacagtgagctgtgttcttcctgggctctcatgccagaagaggctagacaggccagctgtagcttcagctctccactgactgccttttggagcagactaacactaacttgcagctggaaacgtgatgtataggggctgtggttgttaaaatgtcaggtagtggagggtaggtggtgggtgtggggttaggtgcccatgtataagggcagagggccagtgtttctgggctgtgtttagtggcatgtcccctgaggagttgcacatggtgtttccatgttttcagttttctcaaccacttatcatgccttaggggttctgtgtgggaagcaggtgagtgacccatgtagcatttacctgtctgtccaagctgcctttgctacgtgttgcccatggatggtaacttgaagcttctagtgcctcaaggcccaggccacctcaggtcagagaccatagggccatctctagtgccttccttgggaccagtgtctagcctgtgcttctagtcccagacactgcccaaaacatcttagtctatatgctgccttccttttgtgctgtggacaaaaattgggaaaagcacggctgtgtggattgtgtaaatatgagctcatatctgtgatgttgattccaggaatccagtgatttggtacatgttaaatgggaattaaaaatccaaagaccctgtaatgaatagtaaagatgatgatttatgttgtatgaggaaccaaactattgtaattttgtaccatacatacctttccatcaagtgaccaacagcttctaaataaatccaggtgatttcttgcttatgtccgaggtcaagcataactgttcttgcctatcctcaccctgggcttcagctgactacactgtcccttggtggtggtcctggggtttccagagagcagcaagccccagggcacaaacttctgtgacccccctagatgtggatcaaagaccctggaagtccccattggcatcttggtccctgtctccagtccctcactcatttcagccccttatagaagccaggcagcatcagaaactcctgggggactgagactaaaaggaagtggagcttcagggctaagaataggtggctctgtgtgtgtgtgtgtgcgtgtgtgtaggttccctgatttcagacagggatttcaccatctgctttgacctatgattgacataggccctattatggactaaactagagaacaaagtctttctactgctgcacatagatatacactggaacagtggttctcaaccttcttaatgctgcgactgtttaatacagttcttcatgttgtggtgacctgcagttatttttgtaactgttggtgcttcataaatgtaatgttgctactgttttgaatcatgatataaatatctgtattttccagtggccttaggtgacccctctgaaagggtcaagacccacaggttgagaaccactgcctcagaacaaggtgttttagaaagaggaataagttagggctatggaacctgcctttagacctgcctagcaggaagcctgccctttctgggtttgtgctagggaagggacctcctctgccacccatggggccccactctcagccactctgctacagtaaagcattgtttccagggttcaggactcatgtttttctccctacaccaaccatcattttgcccttgtctcataaataaaatagcctgagaatgctgggtcaagggcacctgnnnnnnnnnnnnnnnnnnnnttttcagactgcggttatctagatactccaggagaggtctagtctgtaccaagccctggcatgggctgtagtgggtgtcactctttgcttactgagtgactcaagggatgtgggttctgatcctgggcctagaggagcccaggaagtcacccttggatacagagaggagagagtaccccagggagatgcttgaaataagggtttggggtcaaactctgcagacctgtgaggtagggacaggcctgtcctagcctccatcctgatctgagctgtgctgtctgaagcatgtctgagcatgcataccatgaagggaaatgattcgcagtcatctaaggacaggtggagagagtccctgcctgggcgacagggaaggctggcacttggccttccctctgctcaccactgaaaaccagaacagggcgcacggagctgccctttgcttctgctcctccagatacagctttcagagttggctcctttaagaggctcagggtgggcaggccgcagcaggaaatggagagagcaaaagcaagctacagatccttaagcttggctgtggtcctggggcggagccttactggatgtgtgccccccagcccccaacatgaagtggtgatgggttctgctcagggtttggagctgtgatctcttcaactcccctgtcccttggcaaagtctaaaaggcagagctggggcctgggcccttgcctgcaaaaccaaaccaaaccagaaactgccagggagggtgcacagacagacccctgtgcccacttcagccaactgggcacaaacaccatccccatgaatatctggacccaaagaaatcccggacagccttgctcagttatacattttattctctaataggtacaatactaaaataaacacaaattaaaaaaaagttttattaaaacaaaactgtacaaaaaagcagtatactacattttaattacagaacagtctactgtccaaaaggcactaatccagaataggagatacaatgaaacaggactcattgaactatttaatcaatacagtagagcacttgtttctttgcccatttacaccgagaaacaagggcttcttgctacagtcatcacacattgttagaatccgagtcctactgggaaggtgcagtatcactccttagagcaggctccaccaggggccaggagggggctgggagggggtgggcagcggtgggtgcccaagcttgtcttggcctctggtgggttggttctggccatgattggcagctactctaacccctctcctgtttagcaccggcaaagtgggttctgagatgctccaggtaatgaattggacctctggtgacagctccgataggggaggcatctggtgaccctgtctgaaagggcagcagctacctgggagacatggcccagtggcagccaggggaccgggagctacaccaggcaaagctacctgggcaatggaaagaagtctccccttgctccctgggtctgtgagtatccaacgatcttgtctgggaaattggtttctaaagagggagtttgcttcccagagccgagtcagactgccatcccatgcctggccttgggggtgcaagcctggccctgtctgttaggtggccacacagctccctgagcccagactctggcctaaggaagaaggatactgcagctttccaaacagtgtcacacagagaagacgaagacaggtatctgatgttaacaaaaataagtcacaaagaaatggggttaaaccaaatctcttctcacagcgccctatactacaccctccttctgcttagcagaaaattgtacgtacacaaaaatacaaatacacaattttgtagaacagtctgatttttaatatatttatatatatttatatttatacgagtggcaggttagttcattatatagagctttttgcacttttggctcatatgcaacaaggcttataagttcagctttagctttcattcagattttatagcttttgaacagatttttcacatttaaagcagcatccaatttgcactaggagtctggtgattatggggaaagatggggttagcggttatgggggtggggtggtatacattccagtgtgtgtggcatgtaaggaggattccatgtggacagagcttgccatgacgaccccttgaggtagactgaacaccttacagcagactcagacacaggtgtgattcaccctcagggacacatggcacacaagatggggacagagaccagagaagacaccaaaggggaacacagagactaagacacacaacggccaaggccaggagggcgccctgccccctctccgactcatctggcaggatcctacacagccattaggctgaatacctgcaggcaacttcaagacatctggtccctggtgtctggtcagaacacgtaagcctgctttccacttcccagctggccatgccagcttgctcccagacccacggtgaactatacacatgctgccctcaacaggcgtgcatttggctcttgttaggatgtccaagtccagctagggcccagcatcctggcctccccgatgctctgactcaaagctgtcgtccctcaatttgcatccggttgacattcctcaattacaccgggccggagaggtgcttggtaggtagaccatggacactgcatctagagggtgacacattcctcaggggcagcatgggttttgcatgtgccactgcctcccttttgccactacttggccattcaccctactgtgttcccctctctaggtgaggcagggtcatctgcacctgttacatgcaagcacccagtgtttgcattactccactgtctgaacaaaaatcctggatcaatgaaaataaggtgcctgcgtaatagattgttcctttctacttgtcactgttgtaccaactgagcacagcagtccatgacctgttctatacctcatgcaaataaaaggcccagatctagctcacactttaattattcctcaaaagaaacagtctctcactcattttaaagaatgcacattggatcttactacgactctactgctgatggcctccggctcctcgtcatctgggctgtggatgcggtcagggctccagtacgcacaggtttttcagtcatgatccctgcctgctggctctcttagaactctgctcagaggcgactcactcctgttcttcactcagtagccaccgagccctagctaagtagattccttaaaacttcctctgacccaaggtcatagtcacatcaacagaaggaacaaaggaaacagtgacaaagccagccctctccccttgcctgccctggtgaccactctgcctgcagaatggcagggacactgggttggggagcagggatgtgcatcacacctgtcctgaggcgaggtgcatggtgggaaggacagggcacaggccgactctcaggcaggtcccagaggtctataacttgcttaggcacttaaacataaatgagaagtttgctctagaaagtactgcagacccaacctaaccatggccatggaggagaggctgagcccatggggagattggagaaggctgtaggctcttccagggcagacaactgccacagtgttggcaccttgcagccagtgaacttatgtggtggctcaggagccagtttggcatccgtggtccctgatctgcacctagtgaggtacagactgccctgacacactgtttagggtcattgtgaggaaccactaagaaagaagagagctttcagagtggaactgtggtagaaccaaagagcataaaggagaaagcttgccagaatggccagtgcttggaaagaaagagctctacccaccctgagaactttggttttgtttttctggtgcccattttcagagatgagtgatgagatccccactgctttcagtagagtcaatgtaggcatcaaggcaaatgataaggggatgctttctgaaagcagccacaagtgctcacctccactcagcacacatgacgcacgcacacacacacacacacacacacacacacacacacacacacacccctcaagcctgcagatggggcccaggaaacatcagggagtggctgctgtttgcattcatacagctctaatgccatttggttttctagtctaatggcctcggagagccttggagtggacagatggcctcacaggtttaggctgggctcttaattccagtaaagcaaaatgggaggggtttctaggctaaggatgctacaaacaagactggagagattcaacctggaggtgccgggaagcaaagtcctcgcaggagcaacaaaccttcacacaagtccctgggaccggtctgtcttgagccctgggaggtgacaggcactgatttcatcactcaatttccatggcacctttggctaccaacaaagatgcaaaatcttgattataccaaaatgaaaggcacccatactctttttttcttcaaaccaaggcgtttggggcaaaatgaagccattgttaaggcctcgttggtcagccagtgtcacacagcatcagcagccccacaagccaggctgcccagtccttcagccttcctcctcaggtgcgcttacttctcttgggctttaggctacccatgatgtgacagatcaaaaggggacagtgacctggccaactctcagagaacctaattttgtaagaaaaggaactagaaatgatggtgatgatgatgatggtgtgtgtgtgtgtgtgtgtgtgtgtgtgtgtgtgtgtgtggtgtgtgtgtgtggggctggatgaaggagtgtagcaggtcatttggaagatgtccctagtctggtgtcactgaccagtagtcattaaatggccacattaactctgaggcagcttgctccattcttggactctggatattaaaaacttttattctacgtgtaaatttgaagaaacatctacttaagggcctgtcagtgtcgataaggagcaaaggaagccatggcagagtcacgtaacaccagagagccagagccttgagctccacagtgctctccttcctgtctatggtagagggacagcagggttcgtaggcggattcaacacaaaccccctggaactcaagcagggtgcctcaaagtccctggagctaagcaccggaagaactgaaaagagcaggctttggggaagccactgcagggcaggtggtgagggctggagagcagcaccccacagtgatgtgctgtctgaggatgcagctgcagagacaagaatggaagtggctgtggcacaggagtgaccctgtgtgcctgagaacagcaagtgggttggcagtgacctcagcagagtaagactacacattctcagataccagcatctagattcttacaacaatcacttctggggtttttctgggagggagggaaggagggagggagggagggagggagggaacaaagctattcccaggcaagtaccacctacactgtccttgacttgagggctagttttgtgttttgaggtggggtatctgtggtatgcagggtgtgtttaatcagagtggcccccttgagcactggagcagataagcttgggaacttatggctacacgccaattccattcctgtgagtgctcacaggtgaccataacatgctgctgatgtgcagtacatgtcacacaagtcacaaaattagctccaccagtgacttttcagaacgggatcagaaggcggccctgacctctaatggacatagcagttgctcagcagctggaaaa

SEQ ID NO: 498 - DNA, 5536 bp, Mus musculus
acagcccccgcccgccgggttggcctcggagagtttgtccggtggccgaggtagacggaggtgcagtgagaaccccggcggtagcacgatgggagactccaaagtgaaagtggcggtacgggtccggccaatgaaccgacgagaaattgacttacataccaaatgtgtggtggatgttgaagcgaacaaagttattctgaatcctgtaaatacaaatctttccaaaggagatgcccgctctggaatggacacagtttctagtgttgccttggaccttgtggagactcaaactgaagtgagtagtgagtacagtatggacaaggccatggttgagtttgctaaaatggatcaagaactaagccattatgttaaggctgtccagtctacaatcaatcatgtaaaagaagaacgtccagaaaaaatctttgcttatgatcactgtttctggtccatggatgaatctgtccgagagaagtatgcaggtcaagaagatgttttcaagtgccttggggagaacattcttcagaatgcatttgatggctacaacgcctgtatctttgcttatgggcagacagggtctggaaagtcttacaccatgatgggcactgctgaccaacctggattaatcccaaggctctgtagtggactctttgaacgaacccagaaagaggaaaatgaagaacagagttttaaagtcgaagtgtcgtacatggaaatttataatgaaaaagtccgagaccttcttgaccccaaaggaagccgtcagacgttgaaagtgagagagcacagtgtgttgggaccctacgtggatggactttctaaactggctgtcacaagctacaaggatattgagtctctgatgtctgagggcaacaagtctcggacagttgctgcaaccaacatgaacgaggaaagtagccgttcccatgcagtcttcaaaatcaccctgacacatactctgtatgatgtgaagtctgggacatctggagagaaagtgggcaagctgagcttagtggatttagctggcagtgaacgagccacgaaaaccggagctgcgggcgacaggctgaaggagggcagcaacatcaacaagtccctcacaaccctgggtctggttatctctgccctagctgatcagggtgctggcaaaaacaaaaataaatttgttccctatcgggactcagttctcacatggctgctcaaggacagtctgggaggtaatagcaagactgccatggtggccactgtgagccccgctgcagataactatgacgaaaccctctcaaccctgaggtacgcagatcgagcaaagcacatcgtcaaccatgctgtggtgaatgaggatccgaatgctcggattatccgagatctgcgggaggaggtggagaagctccgggagcagctgaccaaggcagaggcaatgaaatctccagagctgaaagatcgtctggaagaatcggagaaactcatccaggaaatgactgtgacctgggaggagaaactaaggaaaactgaggagattgcgcaggagcggcaaaagcagcttgagagccttggcatatctcttcagacttctggaatcaaggttggggatgacaagtgcttcctggttaacctgaatgctgacccagctctgaatgaactcctggtgtactacttaaaggagcacacgctgatagggtcggccaattctcaggacatccagctctgcgggatgggcatcctccctgagcacggcatcatagacatcacgcccgagggccaggttgtgctgactcctcagaagaacaccagaacatttgtcaatgggtcttctgtctccagccccatccagctgcaccatggggacaggatactgtggggaaacaaccatttcttcagactcaatctgccaaaaaagaaaaagaaagcagagcgagaggacgaggaccgtgaggcatccctgaaaaacgacagtagttctgagcagctggatgccgacggcgactcctccagtgaggtgtccagcgagatcaacttcaactttgagtatgcacagatggaggtgaccatgaaggctctgggcagcaatgacccaatgcagtccatactgagcagcctagaacagcagcatgaggaggagaagcggtctgctctggagcgccagaggctcatgtacgaacacgaactggaacagcttcgaagaaggctgtctcctgagaggcagaactgccgcggtgtggaccggctctccttccactcgcccagtgcccagcagcgcttgaaacagtgggctgaagagagagaagcaacattgaataacagcttgatgaggctgagggagcagattgtaaaggccaacctgctggttcgggaagctagttacatcgcagaagagttggataaaagaaccgagtataaagttaccctccagattccaacctccagtctggatgccaataggaagcgaggctctctcctcagtgaacctgccatccaggtgagaagaaagggcaaaggaaagcagatttggtctttggaaaagctggaaaacaggcttttggatatgagagacctctaccaggagtggaaggagtgtgaagaagacagcccggttagccggtcctacttcaagcgtgctgacccattctatgatgagcaggaaaaccatagtctcatcggtgtggccaatgtcttcctggagaccctgttttatgacgtgaagttacagtatgctgtgccgatcatcaaccagaagggagaggttggctatcactgcctcagtcagcagacagctcaggggacagtggcaggccggctgcatgtggaggtgatgcgactcagtggggctattggggagaggattgcaggaggagacgatcctacagaggtcagctctgaaaaggaagcccaggagaacaggctggtctgcatggttaaaatactccaagccacagggttgccgcagcatctgtgtcactttgtcttctgcaaatatgacttctgggatcagcaggagccagtgaccgttgcccctgaagtggatacgtcttcgtctcccaccagcaagcagccacagtgtatggttgtgttcgatcactgcagtgagttcagtgttaacatcacagaagacttcattgaatatctctcagaaggggccctagccattgaagtatatggacataaaatgaatgatccccggaaaaacccagccctgtgggacttggggatcatccaagcaaaaacaaggagtcttcgggacaggtggagtgaagtcaccagaaagttggaattctgggttcagatcttggaacagaatgagaatggtgattactgtccggtggaagtaattgctgcaaaagatgtccccacaggagggatcttccagctccgacaggggcagtctcggcgagttcaagttgaagtgaagtctgtgcaggagtcaggaactttaccactgatggaagagtgcatattgtcagttggcattgggtgtgtgaaagttaggccactccggtcccctaagatccacgagaatgtccatgaggaagaggaggacatggacagctaccaggatagggatttagagcggcttcgtagaaaatggctcaatgcattaaccaaacgtcaagaatacttggatcaacaactgcagaagcttgtcagtaaacatgacaaaactgaggatgatgctgaccgagaggcacagctcctggagatgcggctgacgctcacagaggaaagaaatgcagtgatggtgccttctgctgggagtggcattccaggggcccctgcagaatggaccccagtgcctgggatggagacccacattcctgttatatttcttgacttaaatgcggatgatttcagctctcaggataatctcgatgacccagaagcaggatgggatgctaccctgactggggaagaggaggaggagttctttgagctgcagattgtgaaacaacacgatggagaggtgaaggcagaggcctcctgggactctgcagtgcacagctgtcctcaactcagtaagggcacacctgctgacgagcgagtgttcctcatcctgcgagtgactgtccagctcagccatcctgccgacatgcagctggtcctacgcaagaggatttgtgtccatgttcatgggcgccagggctttgctcaaagtctcctcaaaaagatgtctcaccggagctctattcctggctgtggagtgacctttgaaatcgtctccaatattccagaggatgcccagggagtggaggagcgagaggcactggcaaggatggcagctaacgtggaaaacccagcatctgctgactccgaggcctatattgagaagtacttgaggagtgtgctggccgtggaaaacctcctgactttagatcgcctgcgtcaggaagtggccgtgaaggagcagctgacggggaaggggaagctgagccgaaggagtatcagctcccccagcatgaacagattgtcaggaagccggcaggagcttagcccatcccacagtctaggcagcaacaaggctcaacaaggcagccctgggcctagtggggctttggaatccatggtgaagatggcggcccctgcagtaaagatctgtgacaaacctgtcaaagtgtcttcccctccatctcccatggtggttactcagcccccagaaggacaggatggaccacccagccctttgagtgaagcttcaagtggctacttctctcacagtgtctcttctgccaccctgtcagaaacactcaccttaggcctggacaccacaggcctcggcagccagacgcctggttccccccctgccctgtgtcaggtcaccccagagcctgagctggctttcctctcctgcacactaagccatcctcctgccccagaggaggcccacgtacctgcagctcctactcaaagcacagagctggaggttcccagagcacctcttctttctgaacccgcgtctgctgtacccacgtccccattcagaatccggaaagtgcggacctcagagcttaagtccttcacaggcatgctgggtggtgcctcctccggagcagaggaggaccccctggcttcagaagaccccagcaatgctaggggacagactctggggaggctagaagtaacatctgactctgaggatgccagcgaagtccctgagtggctcagagagggagagtatgttgttgtgggcaccaacaagacgggcattgtacggtatattggaccaactgatttccaggagggaacatggattggtgtggagctggatctgcctgcaggaaagaatgatggctccattggtgggaaacagtatttcaggtgcaaccctggctatgggctgctggtgaggcccagccgggtccgcagggctgtgggcactgggcgcaggcgcagttcagggctccagcctcagggagccccagaggtccgcagaagtgctaccatctcgggctctgccaccaacctggcttcactgacagctgcactggccaagggagacaggagttacaagaatcctgagaaccggaagtcctgggccagctaa

SEQ ID NO: 499 - protein, 1826 aa, Mus musculus
QPPPAGLASESLSGGRGRRRCSENPGGSTMGDSKVKVAVRVRPMNRREIDLHTKCVVDVEANKVILNPVNTNLSKGDARSGMDTVSSVDLVETQTEVSSEYSMDKAMVEFAKMDQELSHYVKAVQSTINHVKEERPEKIFAYDHCFWSMDESVREKYAGQEDVFKCLGENILQNAFDGYNACIFAYGQTGSGKSYTMMGTADQPGLIPRLCSGLFERTQKEENEEQSFKVEVSYMEIYNEKVRDLLDPKGSRQTLKVREHSVLGPYVDGLSKLAVTSYKDIESLMSEGNKSRTVAATNMNEESSRSHAVFKITLTHTLYDVKSGTSGEKVGKLSLVDLAGSATKTGAAGDRLKEGSNINKSLTTLGLVISADQGAGKNKNKFVPYRDSVLTWLLKDSLGGNSKTAMVATVSPAADNYDETLSTLRYADRAKHIVNHAVVNEDPNARIIRDLREEVEKLREQLTKAEAMKSPELKDRLEESEKLIQEMTVTWEEKLRKTEEIAQERQKQLESLGISLQTSGIKVGDDKCFLVNLNADPALNELLVYYLKEHTLIGSANSQDIQLCGMGILPEHGIIDITPEGQVVLTPQKNTRTFVNGSSVSSPIQLHHGDRILWGNNHFFRLNLPKKKKKAEREDEDREASLKNDSSSEQLDADGDSSSEVSSEINFNFEYAQMEVTMKALGSNDPMQSILSSLEQQHEEEKRSALERQRLMYEHELEQLRRRLSPERQNCRGVDRLSFHSPSAQQRLKQWAEEREATLNNSLMRLREQIVKANLLVREASYIAEELDKRTEYKVTLQIPTSSLDANRKRGSLLSEPAIQVRRKGKGKQIWSLEKLENRLLDMRDLYQEWKECEEDSPVSRSYFKRADPFYDEQENHSLIGVANVFLETLFYDVKLQYAVPIINQKGEVGYHCLSQQTAQGTVAGRLHVEVMRLSGAIGERIAGGDDPTEVSSEKEAQENRLVCMVKILQATGLPQHLCHFVFCKYDFWDQQEPVTVAPEVDTSSSPTSKQPQCMVVFDHCSEFSVNITEDFIEYLSEGAIEVYGHKMNDPRKNPALWDLGIIQAKTRSLRDRWSEVTRKLEFWVQIQNENGDYCPVEVIAAKDVPTGGIFQLRQGQSRRVQVEVKSVQESGTLPLMEECILSVGIGCVKVRPLRSPKIHENVHEEEEDMDSYQDRDLERLRRKWLNALTKRQEYLDQQLQKLVSKHDKTEDDADREAQLLEMRLTLTEERNAVMVPSAGSGIPGAPAEWTPVPGMHIPVIFLDLNADDFSSQDNLDDPEAGWDATLTGEEEEEFFELQIVKQHDGEVKAEASWDSAVHSCPQLSKGTPADERVFLILRVTVQLSHPADMQLVLRKRICVHVHGRQGFAQSLLKKMSHRSSIPGCGVTFEIVSNIPEDAQGVEEREARMAANVENPASADSEAYIEKYLRSVLAVENLLTLDRLRQEVAVKEQLTGKGKLSRRSISSPSMNRLSGSRQELSPSHSLGSNKAQQGSPGPSGALESMVKMAAPAVKICDKPVKVSSPPSPMVVTQPPEGQDGPPSPLSEASSGYFSHSVSSATLSETLTLGLDTTGLGSQTPGSPPALCQVTPEPELAFLSCTLSHPPAPEEAHVPAAPTQSTELEVPRAPLLSEPASAVPTSPFRIRKVRTSELKSFTGMLGGASSGAEEDPLASEDPSNRQTLGRLEVTSDSEDASEVPEWLREGEYVVVGTNKTGIVRYIGPTDFQEGTWIGVELDLPAGKNDGSIGGKQYFRCNPGYGLLVRPSRVRRAVGTGRRRSSGLQPQGAPEVRRSATISGSATNLASLTAAKGDRSYKNPENRKSWAS

SEQ ID NO: 500 - DNA, 215974 bp, Homo sapiens
  misc_feature (1)...(215974): n = A,T,C or G
gggaggggccgtgcaaggctttgaaagcaagagctgttgaaggctgattgcaatgggttcaggataagtggataggagagatgtggtttttgaggtacacaaactcacttgaactttttgcatggtatgcccctgaggctactctctgatgcagactagcatttctttcttttgcctttggtcctctttatttttttgagctgacatctcattctgtggcccaggctggtgtgcagtggcacaatcatggctcactgcagcctcaaactcctgggctggagcaatcctcctatctcagcctcccaagtagctggaatcacaggcatgcaccaccacacccagctaatttttcttttcttatttatttatttttgagatggagtttcgctttttctcccaggctggagtgaagtggcgcgatcttgcctcactgcaatctccacccactgggttcaagcgattctcctgtctcagcctctcaagtagctgggactacaggtgcctgccaccacgcctggctaagttttgtatttttagtagagatgggttttctccatgttggccaggctggtctcgaacctatgacctcaggtgatccacctgcctcagcctcccaaagcactaggattacaggcatgagtcactgtgcctagccctggctaatttttttttttttaagacaggatcttgctatattgcccaggctagtctcaaactcatatcctcaagccatcctcccctctctgcttcccaaagtgctgggattacatgcttgagccaccacgcccgactcttttgtcttctttctttcctcagctgcccacttttttttcttttcttttcttttctttttttttgagacggagtcttgctctgttgcccagattggagttcagtgacacgatctcagttcactgcaacctccgcctcctgagttcaatcaattatcctgcctcagcctccccagtagctgggattacaggcgcccgccaccacgcctggctaatttttgtatttttttaatagagatggcgtttcaccatgttggccaggctggtctcgaactcctgacctcaagtgatctgcccgccttggcctcccaaagtgcagggattacaggtgtgagcccccgtgcccagcctgcccacttcatctctagctcctctttccccaggaacacctgaaggtccttagctttgccttccacgttctcccccaggccgagctactgagcctcctccttttcaaggatagtgtccttaaagggggttcccactccgtactgagcagcaaagagcagcaatacaacctgaagaagttaccaaatttccagaaatctgaccaaacctcttagtccttaaagaccaggcgtcttttaaaaatctttgtatcccggctgggcaaggtggctcatgcctgtaatcctagcactttgggcctgaggtcaggagttcaagaccagcctggccaacatggcaacaccctgtctcaactgaaaacacaaaaattagccaggcaaggtggcacacgtctgtaatcccagtaactccggaggctgaggcaggagaatcacttgaacccgggaggcggaggttgcagtgagccgagatcacaccacttcactccagcctgggcataggagcgaaactccgtctcgggggaaaaataaataaatctttgtatcccaggctcctaacatagttccaagcctgtgataaggaagtgttttaactaacctaatatattacttaaaacaaggggaaaagagccatgtcatagaagccaagggaatcaaaagtttccagaagcggatgctcaataacaccaactattacagagacatcaaatgaggaccaaaaaccacgctcctagatttgcgaagggaaggtcaatggtgtgctttgtcatgacagttttagtgcaggggtgaaggcaggtgaaagcgtgattgaattaatcattggttgactaatgacaggtggagaagggaagctggtcagtgtagactattatgttgcggggagagctggctcctgaggaggtaggaagacttcgggaaattgtccttgttttttcttatagtgttactgtttgttcttgtttttccatgggaggttctcagctgaggataaggggttaatggagaaggaaaggttgaatgtatcagagaacggctaatagaacaacagtgccatggaggtggtgtgaagagtatggaagagcggccttagccttgagatgaagacacatctactttggccactgagggggaagttagtgctggacgcagtcacagaaaaaactgtgggggtaggaagtttagggaattttcacctgagagccctattttttttttaaagagataggggtcttggctgggtgtggtgtctcatgcccgtaattctagcactttgggaggtcaaggagaggggaatcacttgatcccaggagttctagaccaggctgggcaacatagtgagacccaaactcaaaaaaaaaaaaaaaaaggagagagagagagagatgaggtctcgctatgttgtccaggctacaaagcagtggctattcccaggaggtgcaatcacggcttagtgcagcctcaaattcctgggctcaagtggtcctcctgcctcagcctcccagatagttgggactacaggtacgcaacaccatgcccagcctgagccctaattttcgcagggatgtagaagcaaggtgatctggcacagagggtggtcatgttgggttgggcttgaagagaatggtgatgatggtagaagtctctggaggtgtatgagcaggaaaaatggtttggagtgctactgaggaccccactaggatcaaagatcacaaactcttcagggtaccatgtgcatggatctgtgacttcctccagctgagctccctgcccaaaatgagagtcttggagaaaggagagtgatgacataggtttagggttcccagggcatgagtggtgttgatgatacagtcaagacagaggtttagattgcagatgtattaggttggtgcaaaggtaattgtggtttttgccctaaagtaatgccaaaaaccacaattacttttgcacgaacatataaaatgaatcccggagaagcctcggtgtgacaaagggggtaagttgaggcattggaggcttaagagcgatgtctggatacttgggagtaggcgagtgagtcaggttggatgaggttgaggttggataagaatgactgcttttcatttcctaggtggagcagccaaagatcatgacaaagtccaggtgtggccctgcggcggctggttgctggggagtgtcagtaaaggctgtggacccaggagagcaccagacactacatgaagaggcagggcaagtagtggtaatgatcttattgcctggacaaggggaccagggctttgcattcaggtatctcttactcaggtcagtgtgcaagttcaccggccccaggaagtctgtttcctctctgtttctttttgagacggagtcttgctctgtctcccaggctggagtgcaacagtgcaatctctgctcactgcaacctccgcctcctgggttcaagcaattctcctgtctcagcctcccgagtagctgggattacaggcacgcgccaccatgcccggctaatttttgtatttttagtagagatggggtttcactatgttggccaggttggtcttgaactcctgacctcaggtgatcaacccacctcagcctcccaaagtgctaggattataggcatgagccaccatgctggcctgtttcctttctgttaaaggccataataatagtgccaatctcatgggattgttgtgaaaattaaatgagatcatatgtgtgaagtgctaaatgcaatgcctggcacatcataagcactcaataaataacagctagaagaggtcattgctattagtgagatctaggctttcactaggagttcacaatgctggaaagataatgtacacctgaaaaatatgtaaggggacatgtagggccttgtttgtggaaagggcaaagatttgtggaatcaaacaaatttgtgtttgcattccaactctgccacctaccagctgcgtggcttgaggcaagccatttaagctgagagtaatgataatgccatgtggttaatatcttcattctccaatgtgttaagtgcctactaagtaccagccactatacgaggtgttagagatcaagagactttaaaaagatactttcggccaggtgcggtggtcatgcctgtaatcccagcactttgggaagctgagatgggtggatcacctgaggtcaggagttcaagaccagcctggccaacatgatgaaagcctatctctactaaaactacaaaaattagctgggcgtggtggcgcatgcttgtaatcccagctactcgggaggctgaggcaggagaatccccggaacctgggaggcagaggttgcgcggtgagccgagattgcgccactgtactccaacctgggcaacagagcgagacttcatctcaaaaaaaaaaaaatattaataataataataaaaagacactttcaagctgggtgtcgtggctcatgtctgtaatcccagtactttgggaggcttgaggcaggtgattgcttgagcctaggaattggagaccagcctgggcaacacagtgagacaaaaaatacaaaaattagctaggagtggtgatgtatgcctgtagttccagctacttaggaggctgaggttggaggctcatttgagcccaggagtttgaggctgcaatgagccatgattgtgccactgtactccagcctgggcaacagagcgagaccctgtctcaaaaacaaaagacactttatccaggctcaaagagcacacagtagcacagcgtagctggggaggcagatgaaggtatgcttataattgggaaaactaagtgctctcacaaaggtaggtctcaggcaagcagggaaatcgtgacacagcaagactccatctcaaaaaaaaaaagataggacaaagtgacttctatagcctatgaagggaccatcagaaactactgaatgggtagatcaaagccataaaaagaaaactagaaatcagtttaggaatgagcagatttgcaaaatgtgagggcaaaaaatgagaaactccttatctgcacagctaaaattcaacagctctatcaaaatggctatagaatctacaccataaatacttgttgatttcctaagtacttgctttaagaaacaggtacaagggaatgccttatttactagttctttgtttctttttcctctaatagttgaaaagagagaaactggccaggtgcagtggatcacacctgtcatcccagtaccctgggaaaccgaggtgggcggatcacctgaggtggcgagtttgagaccagcctgaccaacatggcgaaaccccgtctccactagaactacaaaaattagccgggcatggtcgtgggcgcctgtgatcccagctactcgggaggctgaggcagaagaatcacttgagcccaggaggaggaggttgcagtgagccgagactgtgccactgcattccagcctgggcgacagggcgagaccctgtctcggaaaaaaaaaaaaaaaagagaaaaaagagagagagaaaaaccaggacttttctctctgtcttgctggagcctgtgctgaaccctgaatcctgttgatagttctccaatttcatttggtgttgaagcccctgaaactcccaggctgcaggttgtaacttgcaatttggtcctctgtctcccgcctatcagaggaacactttccatgggaagatatgggcatttctagtcttgggctctctctctttttttctttttcttttcttttcttttttagaagacggagtctcactttgtcgcccaggctgtaatgcagtggcgcgatctcagctcactgcaagctctgcctcccaggttcacgccattctcctgcatcagtctccggagtagctgggactacaggtgcccgccaccacgcccagcaaatttttttgtatttttagtagaaacggggtttcgctgtgttagccaggatggtctccatctcctgaccttgtgatccacccgcctcggcctcccaaagtgctgggattacaggcgtgagccaccgcgcctggctgggctctcttttaagaatcatcttcactgcaaaagtcaaaggagacagagtagtatgaacagaagtcaaaaggggaaacagctcacaggggttcttccctgcagtccctagggaggctactgtccttttcctctaaatattttcagaacattttaaatggttttgaggactttagagaaagtcctcacttcttctctattctattcttcccttccttgaggtccttaggggctttcctctcttttcagtttcagcttaagtttaaacacaatatttccatagaaatgttctcttgttctctttttctgcctgctttgactctgtttaaaaagccagattcaagctagcaccaggacgtgccatttaaaaattaaatttacctggttataaaagagatataaagtgacgtatggaatcttgggacattccaaatccttattttttataacctgaatgtagggaggtggtaattaggatgtgtgtttaagacaagagtaccaacctgtggtaaccagtctggggccatggcaaaggtgacttcaacactaaataagagcaaaagaacagtagggcaaaacaatttcaatataaaatcataccctttatgatcttttttaaaaaaaaaaaaagatagtgatggtagatagtaatttttgtgtgcattctttttcaaataatttactcggtgacctagcacaatggctcacacctgtaattccaacactttgggaggctgaggtgggaggatcacttgaggtcatgggttcaagaccagagtgggtaacatagcgagacactgtttctacaaaaaatttaaaaatcagctgggcatggtggtgcatgcttgtagtcccagctacttgggaggctaaggtgggaggatcgcttgagcctgggaggttgaggctgcagtgagctaagatggtgccactgcactccagcctgggcacagaatgagaccctgtctcaaaaaaatatatacttgctaaaattaagaagctgtcatagtgtcaaacactgagattggcaatcctaatttggttatcctgatgttgtttactttattgggctgtgaaaatcaaaggacctgctgcactaaacccactgctggtctagatgagacctcctgaagtgcagaggcagtgcccctaagaaagaaatttccttttttaaaaaagagggccttctggggtagcattttctatttttaaccttttttgaaattttgataaaaaacacgtaacataaaacttactattggccaggcacagtggctcacacctgtaatcccagcattttgggggggctgaggtgggtggatcacttgaggtcaagagtttgagaccagcctggccaacatggtgaatccccatctctattaaaaatataaaaattagctgtgtgtgatggtgcacacctgtaatcccagtcactctggaggctgaggcaggagaatcacttgaacccaggaggcagagactgcagtgagcagagatcatgtcactcactgcattccagcctgggcgacagagcaagactccatctcaaacaaacaaacaaacaacaacaaaaagcttaccatcttggctgggtgtaatggctcacacctgtaatcctagtgctttgggaggctgaagtgaggaggattacttgaggccaagagttcaagaccagcctggacaacatagcgagactccatctctaccaaaaaatgaaatataaaaattagctaggtgtcgtggtgcgtacctgtaattccatctaggtgagaggctgaagcaggaaaatcgcttgagcccaggagtttgaggctgcagtgagctatgatcacaccactgcactccagtctgggcaaacagagcgagatcctgtctctaaaaaaacccaaaaaaccttactgccttaaccactcttaagtggttaggtggcgttaagtacatttacattgttgtgcaaccatcaccaccattcatttccgcagctgaaatcttcccaagccgaatctctgcacccattgaatactaactcctcatacccccttctcctagcccttagtaacctccagtctactttctatctccatgaatttgactaccatgtgtatctcatatatgtagaaccatgcagtggttgttcttttgtgtctggcttatttcacctagcataatgttttcaaggcccatcatccatgttgcagcatgtttcagaatttcctttcttttaaaggtatttttagaccggacacagtggcttatgcctgtaatcccagcactttgggagactgaggtgggtggatcacctgaggtcaggagttcgagaccagcctggtcaacatggcaaaactacgtctctactaaaaatatgaaaattagccaggattggtggcacatgcctgtaatcccagctactgtcgaggttgaggcatgagagtcgcttgaagccaggaggtggaggttgcagtgagccgagatcatgccactgtactccagcctgggtgacagagctagatccatctcaaaaaaaaaaaagtatttttatactttttgacaacattgcttgtattgaagatactcaataacaggatggttggtaaaagggcaagtcttaccagctttctgtatttactcatctgtaaaatggttctgagttctattactatcatttaaacacatctaagcaggggtcacaaacccacaaggtccaggcgcatgtgtggtaaagccacctggaggggggccgtggtgaagtggagagacgggtctctgataaaggtggctgctgctatttagttccaatccactctgtccaatatgtaatgtaggcccagtactgcatgcacaaatctgatttcacactctgttacccaagctggtctcaaactcctggcctcaagcaatcctcctgcctcagcatcctaaaatgctgggattccaggtgtgagcccctgcacctggccacaaatctgatttttatgtgttggccaacactgttgggccaaacagaacatgtttgcgtgctggctctggcacccaggccacctgttagaatgtctgccagggctaataaaaagctaattttagtgtggcctcattcattaattcatgcaattaatgtttatgggtctctactaaaggctaggttacacatatgttaatcttatttaaaaatgtacctattttactaggtattagtatcatatccacttttcatattaaagacaagcccagagcggtcaaataacttgcccctggtcacacagtgggaagcgctgaggtgggctttgaactcagatggttttcagagcccaaggtcctgtctcaaaggagggggactcacaggacaatgttaacccgtggacctatggacactcccagaaaacgtgatttgcaacttgtcgtgaaggacgagctcagcaaacaaggccggacgtcaatccaggcagaggaaataacttgagccagggatcaaacactaagattggcaggaaatgagcaggaagaggtagcggggtccctgacgccatctattcaattgtttttcagaagaggtatcagctcttgaaggcttacttctcaatactggctgcgagagcaagaatggtgtgtaatttacaaaagccgtcattgctgtaggtaagttgtagcaaacgactcgcgcccgagcattcccgcccccgccttcgctgcggccccgcccacgacgaccctggggaactacaagtcccgccatacagcggggagcgcccggagctcgcgccggccccgcccccagcccggtccccacccccggctccgcccccggccccctcccgccgggtcaaccccgaagagtcgccggtggccgcggcagacggaagccgaacgagttcctcggcggctgcaggatgggggactccaaagtgaaagtggcggtgcggatacgacccatgaaccggcgaggtgagagccgagccctcctgggccgccggggcggaggcggcaggtgcctggcgcgcccttccctcggccgccgtggggggtccggcggccccgcccctatagtcagcggcggggcgcgaggaggggcccggggaccctgaaacccgctcccgcgctgagacgcccggctccctcttctcccctcccttcccccctggccagccccgtccctggcgccgtcgggcccctcgtgccggccccgctgccccttccgcctgcgcccgccccgcccctgcgcccttttgccctctcgtctcccccggaggttcccgagggcgccctcggccctcgcgcccagcctcgtcctggcccctcagcctcgctccttccccgccagctgtcatcgtcgcccccgcgcgcgggtcgccagcccctgcagcccgcctcgggaccgcccgggaccccccgggaccccgcgtctcgcccgggtcgcccaagcctgcaccgccttggcccgcggcgggaagaagggcagggggccaggcgggtgccccgcggcgagttccttccacctgggcgtcctgagattggggtcaggtggaggagatgcccttttcgttgtttttggacagttgagaaagttttggttttgcctgaagtctcattcatcatctctcaataaatagctaaagtgccaagattcttgtggaattgtatctttctgacattctcttaactctgcagggagtgtagagaaggcagataaaccgagtacatttaaataatctgtagacccggggagtggagagaaccccaaaagtcaggggaggaggtgggctgggtcttggctttgatagtcaaagcagcatgactgggtgagttgctttaaataagataatgtgtttgaaaacgctttatatacaaggtcctgtcattgggggtcactattactgtctcaggagatgactttgccattgatgagactttgaactaattagaatcatttaagtaccagagacaaagttgtagcttcttagcaaaatcaagtgttgtttaatttttatgtagaaattataggttgttttcctcttctttgctttcttttgtatatattgagacatacagatcaaccagttgacataagctttgttggtttgtccttctcggggaaattggtttctcgcttggagttatctcatctatgggaattgttttgtcctgttcctgctaggtccgattaaagctgtcaggtgagtttttttccctaagaacttaattactttaagttctcaactagtgcaagattgagtcctgctttgcttcactaatctcgtgctctgacaacacacaataaacgtcgatacaattctgaaaattttcagaagcatcagtttttaaatattcaggtatctgtatttcagtttacttccagtttaccatcacaataatttaaagaaagaagccaaatgaaacataacttatctgggaattgattctgaaaggatggtttcagcacattcttaaaatttccttttcacaaaaaacttggaaatgtcagtgctaaaaagaggccgctaaccaaccaccacaaaagacatctcagatatttagagccctttccctctccctttccccattggtttcactttttgagggaaattcttatgcttttctcttataaattgccattgataaggttgtaataaacatcagagtttagaggaaggcaaagaataatagttttagctgtggaacggatgtgagctgatccttgggttcaacaatcattttgaaattgaggtttacccatagattccattagcctatatagagaagtgcattatttggtgtaaagtacctcctgtgttcacttagtgcccattcttagccttatatttcctgacgtgcatgtggacttcttttttcagtgattaccacacataaatttgttcttttccatttttgttatgaagtaattgttcacataaatataaaggttattatggaatacagtgtggtgggattgtaaatccagtgatttttaaaaattggtgtccaaagtttgtataaaaagactaaaacaggccaggcacggtggcttacgcttataatcccagcactttgggaggccgaggcgggtggatcacctgaggtcaggagttcgagaccagcctgcctaacatggcaaaaccctgtctctactaaaaatacaaaaaattagccgggcgtggtggtggacgcctgtaatcccagctactaaggaggctgaggcgggagaatagcctgaacccaggaggcggaggttgcagtgagccaagatcgtgccactgtgctccaccctgggcgacaagagtgaaactctgtctcaaaaaaaaaaaagactaaaacaaaaccatatttctttccagtaatttccttttttttcttccttgtatgatctgtaggaacctttccagtaattttgaaaagaatattactttgaacagttattagtattatgtaatactgtataattatgacaaagagtaaaacttgagtcctaatagtttctatcatataggtgccggaagcaaccttataaatcgctatctataaaagaggacggggatgagaatgggttactgtgatgatgtagttttactgtgtagactctgatatttggaatcacattagctatcttttgaggaaaatctgaaaatttccagaaaactctggtgtattaagttcttgtgtgattcagtggttgtgcttaggtgtttggagttttaaggtggttagctgatttattatttaacagttatcctcgaagtgagagtattttagtctttctgctaaactgtatgtgggtttgggaaccttagttatttgaaggttaagcattaggccctaattcagtaacaggaagagttgtaatggctaatttgtcagaaatatttgtctagtcatacatttattttaacattccactaacaaaaggaaaaagaaaaagaaaaaagttcacatactttcttcatcctaacagcttttcatttccatgccagtttgtgctcacacgtgtatgtaattttacataattttaatattacaacctttattttgcctttcttcatctgagatgcaaagctaaacaactagagaaaagggtaaatttttgtcacaagatcttcaagttctatttgcagatatcgtttgttttccagtgttgttgttcagactgtacagctaaacagataattcttgtgtgcttccatgtgccgcacagaacacccattcatacattattaacccgtctaatcattacaggagctgaaagttctgtagccgtaattggtgggattagttagatcagcaacattctcctttccaggaatttgatgttttctaactttaggtggcttaaaaaacatttaataggtaagcaaacattgattgagtgcctgccaggtatctggcttatattagataggatgagatcttaatgcttttcctcaagggatttcctgtgtgtaaatctgtataagatcaactaccaaaataagtaaatatctataaaaggtgtttggaatacctttgttacctacctagcctaagggggtagaaccgggaaacgaaagaaatgaagatagaaacagtgaaatagattatttcaggtgttagggagaatggacaagaaatttatttcaggagatatttcaaatgagtttacttggcattttccaatacttgatgtggtgaaagacacagaagtatgtaataatgtctaatagagtcaatgtagagtcagtgccttggtaatcatgatctagtatctcaatggagggactattatacagcgattaaaatgatgacagtcaaaaccatttaacaaggaagatcgttttctctgttagtggaaaaagaatgtaaagctgtacgtgtaactgatcaaatctattattattactatgtaaaaatgtatacaggaatgggcaagagctagaaagaaacatgaaaaagtgaaattgattgttcttgttagggggattttacttcctaaaagttttcttagggttgcctgttaccatcatattcagtttcttaaagcatgctttatggttcatgcctgtgaggaaatgactgtcatgggcttgaaaagaaaatgcctgtgaaaagattagattaaaaggtaaacagctgtagcaggctgctagttactaagtgccaggtgaatgacagggaaataagggaatcgagaggagtttagacttcactgaggagggtgaactttggttggacttccagggaggaagcttatgatgtgagcacgggagaggggatggcatgtattctttgaggaggaagtatggcctgagagtgaggacacagagactagaatgagtaaagcaggtttaggcagcagagatgagatctgcctgccagaatggagattctgtgaggatagctagagaatgatgggacaggaaaggtcaggtggattgcaggaagccctgaaagcagccaggccagaagtccggacctagggtggctggtccacgcactctgttttgcttcttgggaccttgtatggggcttggacacaaacacaacggggaaagattgctagatcccaaagcaagattggaagcttcagtagatgaccgatttctggcatagctgggcaggatttaaaagcgcttgctgaaaatgaagccttgtgaatgggaagcataaggaagtcggtcaaaattaagcagctgtgaatcaacaggcaaaggaaaaacccagcaagtgcgaggaagcttagaagatgctggtagtcagtgaagatagaggtgacccttaggaaatgaagggacaggagaaggtggctttgacccctggggtcattggtgattcttcagtattctcagagagatcactgacagatgtggagccaaggaggaccgtggatggaaatttctggcagtatttgctaaaacagaagatacttgttttgtcagcatctgcttgacatgctaatggtgaatgagacacacatgtattacaacattgttttgtttctactgtcaactcagtgactgaaatttggatatatgcacatagggccagaggcattttgagaagaaggtatacttttaaattcttttccccaaatctcctgttttttgtttgttggttggtttctttgtttttatttatttattttttttgagacagggtctccctctgttgcccaggctggagtgcagtggcatgatcatcactcactgcatcctcaacctcaacctcctgggctctagcgatattcctgctgcagcctgctgtggagttggtacataggtgtgcacaaccatgtctgtctaatttcaatattttttgtagagatagggtctcactttgttgctctggctggccagacctcttttcaagaaatatacatttataatataaaatacaatgttgtttaattggcattagcttttaccctctcacctccataaaacaataactgtccgacttttccacttcttaagtgctgaaaatggaagaaaccactgacaaaactattaattaaggagatggattgaagtgctgattgagtggaaatggatgtattgatctctatgcttgctcctcaagttccccttgtgtttggcagagcatgttctttaaaaaaaaaaacaaaaactcgaccaagatgagcagtgtgccctgtgacctgggaagtgcgtgaaactaactggtccactccatgcaagtccatgacttaactgtatggggctttcgctctgaggagataaagatatctttagaaaatggtatccattagtcattcatttcaacagtgttgactgaagaaaaagaaaatagctgctttttgacaactttctatttgcgagcaatggagttcaatgctttttaatgcattattttattcttcaaaccagactttgaaaaggaattgtaggccaggtgtggtggctcacccctgtactcccagcactttgggaggccgaggtgggtggatcacttgaggccaggagtttgagaccagactggccaacatggtgaaaccctgtctctactaaaaatacagaaactagctgggtgtggtggtgagtgcctgtaatcccagctactcaggaggctgaggtgggataatcgcttcaacctggaaggcggaggttgcagtgagctgaaatcgcaccactgcactctagcctgggcgacagagcgagactgtctcaaaacaaacaaacaaacaaacaaaaaaagtagtaattgtagcatttctatgtagcagaacctcagagaggttaattaacattcccagaattacaaaacccacctgtgcttttactacaatgttggacatgattatctttaagaggatcttgctatcctgagatgacaccattttcaaagatgtgcaggataaactggaagcataagtcttgatcttccatcaaaggagctcccagtcttgttgataataagatgcacatgtgagttcattggaagaatatatgtacctagtgcactgatggcagccaatcatgaattaaagaaatgggggtggaatttgagaacagcacagaagacagcacaagcaggccccttggctccaagttccaccggggtgacgtggaggaatccagatgggtgctgcacatacagtgggtttgtgtcggcatctgaggatcactgaacttggggaatccgctgcaaagtctctgatttagatgactaggtgaatgctggtgtcattaactgaatcagaagcacaggagaagcaggttttagggtggaggtgtgggaaatgatgagttctagtctcagtcaacagtgtgtcgtcagtgcttatgtgctgtgtaccctgcctgcaactatgaataagatgcagtgtgtgcctggaagcaactcagcacaattgagttttaggtgtctgaagtgcagccaggtggatggatccagaaggccattgtgaatatgagtctgaaacgaagggactggacgtaggtgtagatttcggagtcattactgtaggtagaagatagagcacctcaggtgtgtctgtgacagaggcggtcacagaggccaagaagagcaacctcaggagaatcaggtgaaagcaatgttgtggatgcctagggaggaaaaatgtgtcaaaagagtgaaaggtgaaagcaatcacatgtcacaggaatggccgcgtgattaacacagaattgtgttcagtggatttggcattatgatggtcagtgttcattttcaggataatttcactgaaacgaattaattggtattgggcattggcagtgggctgaggagtgagtgggcgtgccagtatggaggcagcgagtctcaagaacattcctctgagaaactccaggtagaaggggagggttcagagtggtacctggaggggtaggtacctttttttaaaaaaaaaagttttggggagatatttgaaccttgtatagatagagccaatagatagaagtttttgaaatatgggaggaagagaataattatataatgggaaagcccaggaatttcaagcttaattttcttgatggggtagaatgtgaggttattgaaagtaggaggaattgggtgagctggggtcttctgagtagtgaatgtgtaggaatgtggttgaaggaccctaactgtattttctatctattgagggtactggggtcatccattccgagttttttcttcttggtttttagatataagtcacatccccaaagtgtaccattcactgggttttagtttactcacagacttgtgcagccattattagtatacaattccagaacattttcatcaccccacagaggaaccttgtaactgttagcagtcagtctccatttcccacttcccagcccctggcaaccactaatctacttcctgactctatggatttgcttattctggacatttaatacatggaatcctatattatgtggacttttgtatctcacttctttcacttggtataatgtattcagggctcatccatgttttgtcatgaatcaatacttcattctttttatagctgaacaacattctgttacacagatatgctgtgttttgtattcattcatcaattgatgggcatttggcttgtttccaatttttggctattatgaatgatgctcctttgaacatttatgtacaggcttttgtgtagacatgtgttttcatttttctcagatacgcatatgtataggagtggaatttctgagtcatatagtaactaacttttgaggaactgttttccaaagcatatgaaccattttacattcccatagaaatgcatgaaggttccactttctccacatcctcaccaacacttgttcttgtctctctccatgagtattgctatcctagtgggtatgaggtggtatctgattgtggtttagatttgcctttctctggtagataatgttgagcgtcttttcatgtgcatattggccgtttgtatagcttgagagagatctctattcacatcttccccttatttcaaaaactatatctttttattactgagttgtaagacttcttcatacattctgtataccattctgttatcaaatagatgatttgcaaatattttgattttatgggtttctttttcactcccttgtgtcctttgatgcatgaaagttttaaattttgatgaagtccagtttatttttagttgcttgtgattttgctgtgatttctgagaaaccattatctaacatcatgtggattttcatttgttttcttctaagagtttgataggtttagctcttacatttagatctttgatccagttggagttttgaatgtggtatgaggtagggatccaacttcattctttggcatgtggatatccagttgttctagaaccatttgatgaaaagactgttctttctccattagattgtcttggtacccttgtcaaaatcaattgaccataactgtgacagtatgtttctggactcccaattccattccatcaatgtatatatgtctttccttatgtaagtaccacactgtcttgattactctacctttgtattaagtttcgaaactgggagtcaagtcctctgactttgtttttctttttcaagattgttttggctattctagttctgccttaagcgggtttttttttttttttttttttttttttgagacagtctcactcttctcacccaggctggagtgtaatgtcgtaatcttggctcactgcagcctctgcctcccagattcaagcagttctcctttctcagcctcctgagtttctgggattacaggtgcctgccaccctgcctggctaatttttgtatttttggtagagatagggtttcaccatgttggccaggtgccttatgagttttttaaatacctgtttcttagtcttctgaggttgattggtttcttttttaaactgtttatttgtttagagatggagtctcattctgttgcccaggctgaagtgcagtggtgtgatcatagctcactatgaccttgacctcctgggctcaagatgtcttcccacctcagcctcccaaagtgctaggattacaggcatgagccactgcacccagctgattcatttcttgagtatgaacattttatgtttttggtcacataggattattttatttgttttcagatatggggtcttgctctgttgcccaggctggagtgtagtagcacaatcatagctcatcacagcctgtaactcatgggctcaaatgatccttccatctcagcctcctgagaagctgggctacaggtgcatgccactacacctggctaattattttttttaaatttgttttagggacaggttcttgctgtgttgctcaggctagtcttgaactcctggcctcaagtgatccccctgcttcagactcccaagtagctgggggattattttaattattttcacactatcacatctcctctcctaacctggcatctcattcttgtgttagccatgttagagctcagttgtattttaatcttttatttatttaatacattttcatgtttactagtaacaatataaaagtagtgattaggttattttatatatctctttttagaaaataaagaccaatttgctttttacttatatggtatcacataattttttttctcccagggtcagcagatctcaataaaaaagggggtcccaagtaacttataaatagaacaaagtagtataggtagtgtttcctgctatgccattaaatattatattccaattgggaaaacaagtccttcctacataaatatcattgatgaatattttatgtatgaacatgtgtagacatggaaaagtattgggtatgtgacactaattggttgaaaataggatcacatgtggcatgcaaagtttgcggttgaataagtaaatcttacaaatagcttattatctatctttaaaaaatgaacccaaatgaatttaagagtaaattatagttagatatttaggaacatgactggtagataaagggaggtacacctatgtttctgcataatagatttggtttggaaattattattaattttctggagaattagaaaatgagaattagaaaagcagattattttgttcaaactgagaatgatgcatttccccagatggaacatgagttatgtaaagggagtctcccaggccctgcccgtgttttactatgatgtcactgggtgctagccatagctgatgtgtacagcgaagaaagacttgttttaaattattgttcacttttacaaggtgactaatatgctggctgaataaactgagttgtcagctgttgatattttaatattcattgtggggaatttgccctggaaaggaatcttgtttgggaaataatacggaatctttaatgttggtggaataaattaatttcttcctttttttccttcctccccttccttcccgcttcccccttctcccatcccccttccctttttcctttttccttttttttcctttctttcctttcctggctcatgggtatgtcaaagcatttgtggttctgagtactgtaaagcttgattactcatgaaataaacttacagtactactttaagatcactctggtttttaattgcttcttatacatagtactaattaaattatcttgttattttaggcttcactatgaataaactgttgtccatgtgttacttataatagtattgagtgctatattttaaattgtgaaatacaatatatttaccattttagcctttgaagtgcacagttcagtagcattgagtacatttcacattgttgtatcaccatcaccaccatctattcgcagaatgtttttcatcttgcaaaactgaaactccatctccattaaataacaactcctctttctcattttcccccaacccctcataacccccattctacattgtgtctctatgaatttgactaccctaggtacctcatataaatggaatcatagaccttttgtgacttgcttatttcacttagcatgatatcttcaaggttcatgatatgatgcgtcagaatttccttcctttttaaggctgaatacttttccagtgtatgtatatacgttttgtttctccattcgtcagtgggtgcttgggttgcctctgcattttagctgctgctgtgaacacgggtacactttagtgctgtttttacaaaggcagtgcatagcagctaggctttttttaatttagtattttaagccaagagaaaggtgttgatcttttggatttttgataggtgttttttgtttgtttttccaggctaaatttaaggcttaaatttgtaactgctatttaatcattgttttgcctttttttttcttccagacagggtctcccctcgttgcccaggctggagtgcagaggtgtgatctcggctcactgcaacctctgcctcccgggttcaagtgattcttccgccttggcctcccgagtagctgggattacaggctcccacctccacgcccggctaatttttgtattttttgtagagatggggtttcaccatgttgtctacgccactgctttgctttctaagtgctatatacagcaagaagttttcagtggcgagtgtgtcatatttaaaatcttgtagcaacacaatttaattcaactagtaacatttgatggtacactagctatagcattttatatcgaaatgtgtttcattttaaaatgcttttcatatatctgacccttaagcttgcttcagatctcactgcctttatttgattgggcatgtgtcctagatgttctgcccgtatacatattctcaacagtcctttgaaaagccttctcttactatccttcaatcgacagggttggggtgggaattttatttgacaaaaaagattgaaatagtgaagatggttgtttacatattaaaggccatctttgatgggtgttagatgtaagggacatttttaagttgccgtctctaggacaaaatgagtttaggttaggtgtattagttattaggtgatttttttgtattattttggattttctagggattggtcccttaatcataccatttaattcttccaagttattggttttatctgatgatatgcatggtgtagggggtggcagagggagaagctgttaagagcatatgagagaaacgtgaatactgaaggacagtatttggctgccttcttaattgaagataatttgaaatgaaggaactgcactattgtgggggaaatgtttgatgaaccacccatttttttcaggcctgcgttctagatgtattctgtatgagaacggcacttagagttcttctgtgcagacgaaatgttcttgcaagaaactaatgaccaactttgtggtgggtggtgagtcacagtagatttccggagagttgataatgtgcttgtgtatgatacagatttgactgtaaggagccagctgatacaatatggtcagattccattaagcagtggttttaagaaactctcatggacctctgggcctgaggaagtgaagaggtaaaattgcatgtttgaaaacttgttgcagtgtggctgagactttcttgcagcatttctgtgatagtctagagcagatttaaagacaaaacatcagaaatagactttaatgctagttgaccatggtagaacagatttgccttttttgggtttgtgtttccacatttaggtaaaacatagctctaaagttttccttttgattctctttgctctttgcttgaaaaatgtgttggctaaaggagagaccactaactacttagtactttttgaatacgtatttgagaataaatgtaaaataactgatgtgagaaaagttaagttttggccagcacagggaaggaagtttttgttttgttttgcttttttgcatttggcttaattatgtgagttaaagtgaaaaaaacaattacctttcttgagagtggacacactcttaagttataatgaatatgacattgacatttggccaaggttctttaggaagtacagcataactctgacatggtattgttcctttccttagagcttatctttttttttttttttttttttttaaagacggagtcttgctctgtcgcccaggctggagtgcagtggcgtgatcttggctcactgcaacctccacctcctggtttcaagtgattctcgtgcctcagcctctcgagtagctgggactacaggcacatgccaccacgcctagctaatttttttgtatatttagtagagacggggtttcaccatgttggccaggctggtctcagactcctgatctcaagtgatccacccttctcggcctcccaaagtgatgggattacaggcatgagccactgtgcccggcagagcttatcttttagtagcggagataagggaaacaaacagtttcatactttggttcagaaaaatataagaatataagaatatgagaggataaacaagccatggtctttacttttttaaaacagctgtattgagacatcattcatgccccatacaattcaaccaattcagtgtttttagtttgctcactgttgtacagccatcagcacaatcaattttagaacattttcatcagccctgaaagaaaactgtacctgttagcagtcactccttggccctagacaacactaatttattttgtctctacaaatttccctattctggatatttcaagtaagtggaatcatacaatgtatggtttttgatgactggcttttttcacttagcattagcttcatacacagtgtagcttgtatcagttcttgatatagtttggctgtgtccccacccaaatcccatctcgaattgtagctgccataattccctcgtgttgtgggagggacccagtgggagacaaatgaatcatggggtcagtttcttccatactgttctcatggtaatgaataagtctcacgagatctgctggttttataaggggaaaccctgttcgcttggctgtccttctcttctctgctgccatgtgagatgtgcctttcgccttctgccatgtttgtgaggcctccctagtcacgtgaaactgtgagtccattaaacatctttctcttgtaaattgcccagtctcgagtatatctttatcgcagtgtgaaaatggactaatacagttcttcattcgtttttttgctcagtagtgttctgcgctagggatatgccacatttacccattggtcagttgatggacatttgggttgtgtccactttttggctgttatgagtatccaaataatggtactgtgaacatttgtgtacaagttttgtgttctcatgggtatgtatctaggagtggaattgctgggtcagatggtaacgctgtttaactttttgaggagctgctggactattatctgaagtgactgcaccattttacattctcaccagtaatgtatgagggttctaattactccacacccttgccaacccttgtgatgatctgtctttttgattatagttatcccagtggatgcgagatggtatttcattgtggttttgatttgcattccaatgttgaatgatatggaacatcttttcttgtgcttattggccatttttatatctgttttggagagacgtatattcagatcctttgcctatttaaaaatttgattatttgtcttttttttttttttttttttttttgagacagggtcttactctcacacctaggctggagtgcagtattgccatcacagctcactgcagccttgatctccctgcctcaagccatcctcctatctcaaccttctgagtagctgggaccataggctcccaccaccatgcctggctatttttaaaaactttttttctttgtagagacagagtctctgtgttgcccaggctggtctcaaactcctgtgctcaagcagtcctcccaatttggtctctcaaagtcttgggattacaggcgtgagccattgcacctggcctatttgtctttttattattgagttgtaagggttctttatatattgtgatgcaagttccttattagatacatgatttgcaaatactttttcattccctttttcactgtcgatggtgtgctttttgaatcacacaaatttttaattaaaaaaaatttttgtttttagagacagatctcttttgcccaggctgtagtgcagtggcacactcatagctcactgtaaccctgaactcctgggctcaaaggatcctcccacctcagcctccccagtagttggaactataggtatgtaccaccatacctggctacttttttgttgttttttttagacgtgggggtctcactatgttgctcaggctggtcttgaactcctggccttaaatgatccccccatctcagccttccaaagttctgggattacgggcatgagccaccatgcccagccccagagtttttaattttgatgaggtccagtttatcttgttgttgttgtctgtgttttgggtgttcattacctaatccaaagccatgtggatatacacttttgtattcttctaagaacttaatagttttagtttttacatttagccctttgatctgtttggagttttgaatgtgatgtgaggtagggatccaacttcattcttttgcctgtggatatccagtgtctcaccatttgttgaaaagactattctttctccattgggttgttttggcatcgttgtcaaaatcaatggaccataaatgtgacagtatatatttctggggactcaattctattccatcgatttatatatgtctttccttatgtaagtactgcactgacttgattactgtggctttgtagtaagttttgaaattggagggtgagtgccctccttttctttttcaagattgttttgtctattctgaattttttgcatttctgtatgtattgtcagaccttgttggtttttataaaaaagctagttgagattttaataggatttccttgaatcttgtagatcaattggggaatattgtcatcttaacagtattgtctttcaattcatgaacatgcagtgtcttcctgtttgagtctttaatttctttaaaaagtttttttttttttaactgatatatcacagttgtacctattttgtgtttttctttcttttcttcttttcccccgagacagagttttgctcttgtctcccaggctggagtgcagtggcacgatctcagctcactgcaacctctgcctcctgggttcaagcgattctcctgcctcagcctccctagtagttggcattacaggtgcccaccaccatgtctggctgatttttgtatttttagtagagacagggtttcatgttggccaggctggtctcgaactcctgacctcaagtaatccacccgcctcggcctcccaaagtgctgggattacagacgtgagccaccgcacccggccatgtgatattttgatacatgtatacaatgtgtaatgatcaaatcagagtaattgggatatcccccacacgtctttaatttctttcaacggtgtttcggaattttcagtgataagtcttgcatttcttttacatttattcctaagtattttgatatttttgacgctattataaatgaaattgttttcttaatttcactttcagatttttcattgctggtatacagaaacacaactgatttttatatattcttgtattctgcgtaacatgtttattctcagatttttagcggtttccttaggattttctcttaggatttacttcttcctttccaatctggatgcctgttgtttatttttcttgcctaactgccctgactagaattcctagtacagtggtgagtagaaattggatagcagacatccttgtctcattcctgatgtagggtgggaagctgcccagtccttcaccattaagtgtgatgttagctgtgggtttttgttggtgctccttatcaagtggaggaagttttttttattcctacttcattgagtgtttgcattatgaaagagtattgaatttttgtcttttctgaattttgccttttctgaaataaattactttttaaaatgactgtttttcttgtttttttatccacagagactgacttgcataccaaatgtgtggtggatgtggatgcaaacaaggttattcttaatcctgtaaatacgaatctttccaaaggagatgcccggtgagttaagaaacagtgctgtgctcaatggatgtttaagtaactggaagcaactgtggctgctgaattaagttgcattgaatagatatcgaatgcctaccctgtagagacatattgctgtcttctgtgagcctgtactcaagttgaagagatgaagtctataatatgggatgacagtgtgcctgaatgagtattagaggtagtaattgtattagaagcacacagaagagactgagtgttatgttgagaagcaattgaagaaggcttcttgaaggaggtgcagctggctggaggattagctaggatgtaagtcggttccttagcatgagtggcttttacttctgccagttcaaatgctgtcagagcccatttcaagtgctatcttcatgaaggtatgcctgcagcccgcagtgatgtctttcctctaaatacctgtcagttataatctgtcctacctaatttaatgattatagattgttttggattgtaacttccagctgtacagtggattttaatgtctttgggggaaagagactcgagggctgaggatgaatatttgagtatcatttctagatatgtatggtagtatgaacaaaaggaaagggaagaacatgaatttggggcaggaaaagattattttgggttttcttagtaaatggaggactgtaaataagctgggataagattacagaagacctggaaagcagatgaggaagtttggcctgtatttttgtcaggaagattttgtttttggcagtttttgagtattatgattgaggatcaaggtggattaggaaaagttgttgattggcaatgtagagaatgggtcagagtggggataggctgaccttttctggagatcagctgtatcagagatgtttttgtattggccctgaaagtgggagaggtgaaagacatttggcatgaggctttgtgcaaagtaggattcataaatccttctagaaccagcgctgtatttggcactctgcagatattcttttgagttgagtttaattgagttgaaaagagcactgggctgggcgcagtggctgacgcctgtaatcccagcactttgggaggccaaggtgggcagatcatgaggtcaggagatcgagaccatcctggctaacacagtgaaaccccgtctctactaaaaatacaaaaaattagccgggcgtgatggcgggcgcctgtagtcccagctacttgggaggctgaggcaggagaatggcgtgaacctgggaggcagaggttgcagtgagccgagatcacaccactgcactccagcctgggcgacagagcgagactccgtctcaaaaaaaaagaaaagaaaagagccctggatttggagaaaatctgaaatcgaatccttcattatgttatcatagtgagttatttttaatttttttgaacctgtcttacgtgtctcacaaaagttttttcccacaaagatcaaataaattagtgacttttaaaagatcttgcaaagtgttctgtacatgggcaggtttattgttattaacatagagacacatacagcaaaatgtatagcttgatgaattttcatagtgaatacattccttataatataagtggcacccagataagaaacagaacgttgctagcatggcaagagactacatcaggagaagtagtttttcttttttttcttttctttcttttttttttttgaggcagagtctcactctgtcgcccaggctgaagtgcaggggtgccatctcggctcactccagcctccgcttcctgggctcaagcaattctcatgcctcagcctcccaagtagctgggattacaggtgtgcaccaccatgcctggctaatttttgtattttagtagagacagagttttgccatgttggccagcctggtctcaaactcctgacctcaagtgatctgcctgcgtcggcctcccaaagtgctgggattacgggtgtgagccaccacactgggccagttattacattttttttttttttttgagactgggtcttgctgtgttgcccaggctgaagtgaaatggtggcgatcttggctcactgcaacctccgccccaccaggttcaaccaattctcctgactcagcctccctagtagctgggattgcaggcatccaccatcactcccagctaatttttgtatttttagtagagaaggggtttcaccatgttggccaggctggtctcgaactcctgacctcaagtgatccgcctgcctttgcctcccaaaatgctgagattacaggcgtgagccaccacacccgaccggttactacatttttaagccaaaatgtattcaattcaatgcttgagtatagatgtctaccaagaaatcacctagttctagagaaatttcagctttgcaaggtcataaactttattttactcagtttgcttaatgttgagtggagtcttggggactaacatgccatctcttaaggagacaggcaggacctctgattttatgtttacagtgaataaaatattaatctcagcaatccattcttctccttcttggtatcaactaattggaaaaccaggtcaaaacattgctgtgaacataggataagaacgaaaggacgtttttggcaaatatggaaaagataaatgacgaactcttcctattccacaccactgctcggagcactctcctgactgaaatacttgaatccaccagatcagtctagttcttctgtgtattatcctggatacacatggatacattttatcacttatttgctcatgcagagctgcacttcttatactactagaacaattaatatctttttggaattatcttcttcccctcaattagttttctagatcggttcttgggattttccaaatctttgtcagcagtatatttctaaattgcttccctttaaatgactaaatctttaggccttattttatttgaattatatcttaaaacttattaaacttttatcctgtagtaaattttcgttgttgttgtttggaagccatggtgagattgtaataaaacattaatgcctgtcaccatggtaggcaaagtagtttcttttttgtttgtttggggttttttgttgttgttgttgtttgtttttgagatagggtctccctctgttgcccaggctggagtgtggtggcacgatacaaatagtttcttaagctaagttttatcttctatttttgcttctttctctcctctacccaccaaacaggcctttcttgctaactctggctaaaaagttaattggtatacttaaaacattgccttaaaagggattaaggtgcattttcccatggagagtgggagcctccactgtatgaatcatttgtgttataaaagttgaggcataggtgagtttggaaaatggagtgcattttcccataggaactgtcagtttcaagtggaaagtttaagctagtgactagtttaatccacaactcgaacatactttttttcttttttgcctcatatcttttttaaaaaaaatattttgtctcaatcttcgcatttcactgcaataatattaaatagctgtgtactcaagggccgagactgaataaaatgaataatcattctttctgctttatggaggacattcttatgtggaaaaggcttttttttttttttttttttccctcccttgctgcgggtgcgtggtgatgaaaagcacagagactgcttcgctgtgatgtctttgtgcccagggcaccagcagtttcccctccatcatgttcgtgccaccagcacaaatgtcaacacagtgagaaaggcagatgccttagtattgttatgaaaataatcccaacctccagactctctgaaaagctctggggaatcccccaagagtcctcagaccccaatttgaggggtttaatccagtttataagcttctaagaaccaaatagatgtccctggtttattttttaaaagatttattgagatataatagtaagacaatacaatccacccctttaaagtgaaccattcagtggtttttattacacttactgaattgtgcaacctgcaccactatctgcttgtacatcatttttatcaccatgttaattaatccactttctgtctctgtagatgtgagatttgcctgttctggacatttcctataaatgaaatcatacatgatgtggtcttctgtgattggcttcttagcatcaggttcttgaggtttatccacttcgtagcatttatcaatacttcattcctttttatgatgaaataatagtctgttgtatcacattttgtttatccattcatcagttgatgggcatttggattgtttctactcttttggcttcatggataatgcagtttgtgtacaagtctttgtgtggacgtccgttttcatttctcttagattcatttctagttatggaacgcttctgggtcatatgataactgtattctgaacattttgaggaattgccaaactggtttccaaagctgccgcaccgttttacattcccaccagcaatgcgtgagagttccagtttttaaaaactctcatctactgtaaagaaaatggaggtaactctggctaattaaagagtgcatatcctgcctcaaggcattcagattacaatgaaaaagcaaaaccaaacatagtgctgtccaagccaaacactcctggccagattcagcccttggctactgatttagaaccccgcgttctggtaaactagattctggtatacttctctattgagcagtacttacttattttaaaacaaggttttgaaaaatttgagcaaaattaaaaaacataatatacaaaaagttctaaagaatgaaacacttttatgtacctatcagtttaacaaatcctttccaatgcagtttaaacctatgtgaactgccttctgttcacataggaaccctttctctctccaccacagttaaccactttcttgaatttgatcttcttctttcccttgtatttcttcacattttcactttatggaggacattcttacgtgaaagcggctttttttttttttccctgctgcgggtgcatggtgatgaagcgtacaatgactgctgctttttttaagcatatctgtaagttgtttgcccagtattatgtgtacatgaatgcctttttctagtgaaaggccagaagggtgactcgaaaaagtttcactattcttataaaatataatgcatgatttttaaagaccaaaaaaaaaatgttaaaaggagctgaaaataatatcacccacttagcttgggggagaaagctcaaacttggtattttatcaaatttcctgttctttctttttttttttttcctcttttgtgtttcttttttttttcttttagattccaggggtacacatacaggtttgttacaagggtgtattgcggccaggcgcagtggctcatgcctgtaatcccagcagtttgagaggccaaggcacgcagatcacttgaggtcaggagttcgaaaccagcctggcccacatggtgaaaccccgtctctactaaaaatacaaaaattagccaggcatggtggcgggcacctgtaatgccagctactcaagaggctgaggcacgagaattgcttgaacctggaaggcggaggttgcagttagccaagatcgtgccaccgcactccaacttgggcgatagagtaagacttagtctcaaaacaaaacaagcaaacaaacaaaaaaaacaagggtatattgtgtaatgttgaggtttgggcttttgttgatcctgccatccagacagtgaacatagtacccactgggagttcttcagctcttgcctcctcctccttccgttcccccttttggagtccccagtgtctcttgttcccatctttgtgtccatgtgtacccaatgtttaactcccacttacaagtgagaacatacaatgttaggttttctgtttctcttttgtccttttaaacaaaatcagaacataggctttcccctcttgtcttatttgcaatgaatttcaaggaagtgtgcagtgaaaattgtcgtagtatacttccagctcttttagagacggaaacagggagctatacctcctcagaggtgctgctttaaacatcagaaccaaaacctgacaggaaagaacacctccgtgtaagttgcacttttcagttccttggtcaagtgtgagtccattttcttccttagccctctgtcttctattacgtgtgtatggtttggggggctgggcgggtatgcacattaacacagtgctaaagacatcagcctagagtttatcctgtctttctttcttttctgttttgttttgtatgtttgtttgttttgagacagggtctcattctgttgcccaggctggcgtatagtggtgtgatcactgctcactgcagcctccacctcccaggctcaagtgatcctcccatctcagcctcctgagtagctgggactacaggcatgtaccaccatgcctggctaattttcattctttttttgtcctctccacccctaagtgtaaggttttgagaccagaacgtttggaggttgaaagcatttggaggtttgggtgtcaagatcttcattaacctgaacactgatttttttggtgttctgtgagttgacttattctttagaacaggtggggaagatgctctaacatggatgaaagtagccacagatggcacaaataggcagagactgttcttgttttacagtaaaatatgatgctgccctctccatcccccatgtgtcatgtttaacctaatgaacaatagacagcgtaaaggttacagctgccagtctaatgggaagactgagatgttgatcacatcatcttttttagtaaggccattaaaaatctttttgttccttctgatagttttactagacatcaatttagtcagtatcattaggtaattaatgagtacctaatatgaacaaaacacacccaacccttctttggagcttcagtgtactctgaccctggtggatgtacagattggagcccttaaagtatgtgcagaattgagtgagtttgacccatgtccatacacttctcttgcaaattatattgcataatgctactgaggggagggccttatggcatacatgaagtcattttcagactaattccttgttagtggaaggcatcattaggtcatattagataatgactttttagatttctctactgctatatggatgctaatttaaatagcgattttaattgaaggaagtcatgcaaaatgtaattatggtacccacaatagacctgtttgttctctctgctgtgaaatgacttgagtggggctaatatttctcctcaaatagagtctgctcctctggagaacagtacgtggtatgttttaatttcataatggggctcttcctcagggagcccgtcctgctaattttattagagtacagtggggagagcgtggttctgtgtactcagaagttgtatatgattcctcagcctctccctttaaaaagaatactgtgatcatttactacttttgaatatacttgtgaagatgaatcagggagactcttaaaagctaaaaagataagaaaatatgtgtggttgaatgcatatcattgcataattaatggaagcaggtagtcaaattgcagcaaatacaaattttgcaaagttttaccagcagagtctagctggttgccaaaataaactggtagccaatagactgctactatagaatttgatattttagcattatcattgaatataaatattattttgctcatgcttttactacttttggtgcagcaataagaaggaataaactttttaaaaaatacaagaaaagagtctttctttagctctgtgcttgaattactacctggatactaacatttgatatgtggactcagggtttgtgtatatggttagttgccagctctagattaagttagttatggataataggaattacgtgttttgaatttccctagaattctggactcagcataaagtggtcagattgcatataatatattaaataaaatatctaattatgaacacagtttaggcaactaccaggtcctactattgcattttttttttggcttattttgcttagtttttttgacagtacttttttagcgctctttgtctcaatctgtaggatagaaattgttactaatataaatcagatgctgtataagaatctagatttctgttttaaagatggagggagcagtattccttgaggaaatgtgacatgagaaacccattcagccacaaaagttgttgtatcataacatgtttataattttttctgatgcattcaatattcgaacatcaacagtgtgccaagtatcaagctgagagttaggttaatctttaccaatccttagttccattaaatttatggtgttattaatttttttacatgatgtatctataagcatactagtaaaaaaaagcaaaacaaaaaactggaaagcagaaaaagttattctgttgtgcatcttgttagattttgcacactcaaatttgaaatgatttgattgtttaattttgagaattgtacattttcttgtgagaaagttttcttttacaaagaaaagcgtttagaactctggagtcctcaaacttcttccacagagttcttttaaaaagcacaggtattttatagatggtaaatttcacctttgctttacttctatcaaacgtaatttatatatacttttaattaagtaaaaacttatataggatgggtcataattattaagagtagtgactatctttatgttttgacctgtatatacaagtcagtaatccttttgttccacttttaggaaaattgaaatagaatttatgtaaagatcatcgaatatgtaaaagttttatttgcaatttaatttttaaaaacttttgttatggagaatttaaaagatatgccaatttaggcagaatagtataatagtataatgaacctccatgctcttgtcactcacccctgaaaaccattaatttgtggctgatactgtcctagctacatcttcatccctgtcttcttccccatattattttgaaggagatctgattttacccacagatgttttaatgtatcttttattatttgtaaacataacctcaataccatttatcatatctaaacaatttaaaataggtgtgaggaggaggaaaaaaatatagtgaggtggtggcatcaaattttcagtgtttaaatgcccaattatctcatcaagtctttttttccccgaagtttgttttgaataggattgagatgtggtctgcactttgaggttgggtggtatggtttttaatttattggctcctcagttgttgaagaagccggatcatttgttctgtcctgtggatgaattaataagtgaatttattacaggaactaggttatccttatttagtcaaacaccaaaccttgtttattttccttgtaaatattttcattctagcattccttttcattcttctgacattaccctagggaaggacctcattgccttgtgtttagatgacaacgtagctttctaaccagtttctggaactcaccgtcaccagaccgatcttcaagcctgctcctgcttcctgtaatctctttcaaatctagagcatttatgatttctactcattgagaaatgccactacgtaggtggcatcttttatatgtttatcccacattgttttctaatatttgtactgctttgcttttatctatgtattttgaaaactcccttcccttcaggctgtggctgctagaaagtgggggccactgtggcttcttcctgggtctttggtggtctgcactagatgcctcttgattgattgcagtggttctgttagtgctcgttctcaaaggcctcctgctctgatgttaccctcaaatagtagtttgaagggtgatttgcaagtctggagttggaatttctgaagggtacttctcaagacaacagaacctgatgagctatcttcttccaccccactctgtggagttcagtattctagcaatggctgtccttgtccactagatagatagattatcttgcttggacggtgcagatggacgacatttgcattactgtaacctttctagactcccaaagcaccacagcctttgttttgcttttgtcactttgacgacaatcttttgtgtcaatgctgtttcattggttgtattttatttttattttttaagccattatagagctaggttatattttaagtttgatgtttctttgtgatctaatattaggattatacggtagaataaatttccattgggaagaatttcctgaagattaaacaattctgtttataatgtgtagattagagattgcatactcaggcaccatagtccatattttacccagagatatgttttgtttggcctgaagttggaacatttaaaaatcaggttttgtataaagattcagattcattgtgtttcttaaataatctgaatctggcaacactgggttttctgccctcttccggctcccagctgttccattccgtcatttttatgatttgccaggcccctgtaggccttttccttttcaaccttggtgtagattcttactggcttcagtcacaaaagatgtcctttcctgaccttggccctgggttttgaagctcacattactttttctttcctctagttttttttttttttttcctttggtggtaaaatgctcacaagaaaattaatcatttaaccatttttatgtgtatacagttcagtggtgttaaatacattcataatgttgtgtaaccatagcactattcatcttcagaactcttcttaaaaactggaactctgtgctcattacatacgagatccccattcctcccacccctaggcctgggcaaccaccattttactgtatatatgattttgactactctagggacctcatgtaaatggaatcatacagtatttattttttgtgtctggcttatttcacttagcatgtcctcgaggttcatccatgttatagcacatgttagaatttccttcctttttaaggtcgagtaatacttcattgtatggataaaccacattttgcccatccattcatcggccgacggacacttgggttgcttctacctttttcctcttgtgagtaatgctgctgtgaacatgggtgtgcaagtacctcttcaagaccctgctttcagttattttgggtatagacccaggagtggaattgttggacctcacattacttttcaagaccatcaatctctgcactctgaatctgtcatgttctcagttttttctttagcttattaagaagtgtagccatgtgaattccctaattgttgacatgactttgtttataaattaccaaatattcttgatgtagtgttcaaattaatacattattttgcaaaaatgtaaagtgctaactcttaactgtctatttttctttaaaaatgtttatattaacatataatgactcttgtttttaaatgaattaaaatacacacacacacatgtacttcagagacaaagtctcactctgtcacctacactggagtgcagtgatgtgatcatagctcattatagtcttgaactcctgggctcaagcagtcctcctaccttggcctcccagagttctaggactgtaggtgtgagccactgtgcctggctctaaaatatttttaaaatttctcagcttctaattcaaaaaatatctatcagctataacccatataaacaaaagctgttattgccctcactaatatttaagagtgtaaaggggttttgataccaaaaaatttgagaatctctgatctagataatgtgctagcacaggttaattaaaattgtttgaggtactcaccgcaattttagaacattataacatttttccccatataagcaatgtcacgtaaatgtgtaagtcatccctgggttgctacagatgcttatttacctgtggtatttctgaagtgcctaccattattaactaaaacattttgagcaagtagttctataagttcagcgttccagcttagaatgccaagaaatgtaactattccctctccttttggggttagggtggcaaggattccctggttctaaacctctctgattgttctcttgctattgatagggtttgtggataaacagtgggaacaggatttgaagaaccaagatggaattttggtgtcatatgggattttttagaaagcttttttcagatggagtctcactctgtcacccgggctagagtgcagtggcatgatctctgctcactgcaacctccacctctcgggttcaagtgattctcctgcctcagcctcctgagtagcagggatcaaaggcacatgccaccatgctcggctaatttttgtatttttagtagagatagggttttgtcaggttggccaggctggtctcgaactcctgacctcaagttatccacccccttggcctccgaaagtgctgggattacaggcgtgagccaccacccccagctgaaagctttcaaatgagtttcaggtgctggaggggtgagagagtgggcagtggtatgggtgctatggagtctctgtgtctaccaggatattaagaggacagaagaggcagaaacaagtatctatgatggatcctggaaaaagcaagaagcctttgacaaatcactgttgtgcttaccgtgaacaagttggaattatttaattttgaatttgtcagaaagtttacagtaatgtaataaatttaaaaatattcctaagtaaaaaaaagaaaactgtaaaatttctaatgtcagcagaatgtggtcactgtgagggagaaaaggatggcaagactaactttatttttgtttttacttggaagtataaattcaaatttcgggatctctgagtttttatgtagctggaatctttctttataagtatatatatatatatttattttttaattttttttattttttattgttttagagacagggtcttgctgtggttgcccaggctggtcttgaactcctggcctcaagtgatcctcccatcttggtttcccaaagtgccaagcctatatatattttatttttaaatttttatttatttttaattaattaatttatttttagtcagagtctcactctgttgcccaggctggagtggaatgtagtagtgcaatcatggcttactgcagcctcaacctttccaggttcaagggatcctcccacctcagccacccaagtagctgggactacaggtgtgcaccaccataccctgctaatttttgtgtgttttttgtagagatggggcttcaccatgttgcccaggctagtctcacactcctgggctcacgtgattagctttcctcagcctcccaagtgttgagattgtaggcatgaccagctgcacccagatatttctaatttcttttaaattattttttcatgatccagggacagactggaatatgtagctggaatcttacaggttctttataattcttaaaaaaaaatttggaagtggaatttgtaatgcataagaagttttgattggagttctttgttttgtttacatatacacatatatgtacatttccattaaagcaagcctttttccttttttttttagaggatataaacagctacaaaattactgtgttttaaaaaataaattttacctgtgaaatgcaaactgtcataagaatcggtacatggtaactgctgttcttatcattgctctttattattttgttaattacatattcctttccagagaagattggctgacttggtgttttagtcacatgtaaggagcacggaagcttccttgctcaatttcattctcatccagtgttaccacaacagaaacctgtgtgtaaccaaaacgcttggcctgttcagtgattacccctccttagtcactcggccagtcatggccacacttgccacctgccctcttctttgggggattgggtataatatgacacagtgggaggagccagacgtttcatacacatttggtatgatttcgtgttagtcattttaatatagttatataagtagtataggaaaaccctactgtgggaaaatcccttctctgaatgtaagatttatcaggccgaacccgtatggtagccttcatctatttacatcatgaaggatgcttaaaagtaggatgggggacagagactggttaagagtaagtcacacgtccgggcgtggtggttcatgcctgcagtcccagcactttgggaggctgaggcaggcaaatcacttgagcccaggagttcaagaacagccttggcaacatggtgaaaccctgtctctacaaaaataaaaaaatcacctgggcatggtggtgcatgcctgtagtcccagctacttgggaggctgagacaagaggatcacctgagtctggggaggttgaggctgcagtgagccgtgatggtgtgattgcactactgcagcctgagtgacaatgtgagaccctgtctcaaaaacaaaaacaaaaaacaaaatattaggtcacactctggcattggaccaagactttatgccttgccatttccagaagctttacttagggtttcagattctgctttcatcattctgccccatatcagaccccttgcaggtgctgattcaggtcttcttggcctcacctctccttggagcctttgatcacttttcaaccctggctgttgccagctcagtctgggctcacgccagcttcacgtgctcataatctgacacttcctcatgctcactcccttccctccttgcctgggatacactcccacagaagccttggtctttgctttctgaggaatccacactaagacgtcctctcgcatgcccttgtctgtgtcctcagggattctcttgctgtgtgttgagctggctgtccgttgacctggcctttttgggcctgtctggtccctttgccccccagaacttggtatggatagtaaggaactgaacttaaatattaggaagaggataggccaatttatagattgggttaatttttaaattgatcaaccccgtaagcagtagcaaagctgcagaacagaggtgctgcgagggagtttaatgattaccactgtgtctggggatgggaaaggcaagagttggttgaagagaagcatgactcagacttgggtgtgagtgctgggcctactgtttaccagctgtgtaaatctggaagtttatatcacctccctgagcctctgtttccttttctatgaagtggaggtgataacactgtgatatggatcatgcaagattaccgtgggcatgagtgagttatttatgtaaaatgtctggtacatggtacctacttagtaggtggtagctgctattttgccttgatttatttattcttgtcaactctcttaaacaaattttatttattaaaacatcatattttaagtaatattcttttcaaataacactggcatatatggtaggtactcaataaatattaactgggttagacatgtagtcaattataataccaggtttctaataacaaatgatgcccttttgcttttaattgacaataatcatagctgtttaagctgtagatctaagtgtagtttcttgatgccccagatagcaactgtaagatgtttatttaagggattgtgggtttcctctgaagagcatcaatttgcataatattgctcagagttggtttcttgaactatcattatcataagaaaaggaactccgtggtcaaggtctttgaatgcttagaaggtgtcagtaatgcagacacagccagcacagcattcttggaaatacaagaagtgaatagagactttagtttgtggatcttctcattgatgacaaccagcatttatttataggcattagtattgtttatattgtgttagatcctttgcaagagtataagttctcatgacatcttacaacaaacgatataggcatcacattgttacctcaacattttcagaagggaaatgagactcaaaggtgttacaaggcttcccagggtcacatgatcagaaagtggcagaacagggatctgaactcagatctgcctaagctcgtctctccaaaactagatgagctcacagcttctcattgccttctaagattttacagaagagtttcttctctaaacatttggaaaaatgtaactggttaattcagattagatcagaactaaagacattcagcagttattgattgacatctgatacacatcactccagaagggtgtcctgataagggaaagataaatatgacatgcttttttttttttttttttttttttaaagctgacattctggagttaggaaaaacccacatacagctaagtgtgtatcatattcattaattcattcaacaaccatagagtgccctctgtgtgtttatcaggatgttgaccctaagaaaacactgataaacaaaagagaatttggttccagccttcatggtccttattagtcttgtgggagtgttatgaactgatctaagccgttttggtcatttgtaacaagatattaacaaccttctatgtttagagttaggtgagagcctgaggccttctcctgcccaatcacaccaccaggagatgtgttacaatgaaactttgactgggttctgctgcatctttattagcaagcagccacagcattggtcatgccacctgttcctgtaagctcagtgaagccacagctctcagacaagcaccttccccagaagtttcccttgagacagatgtagcaggattcaggtactcttttgatcaaaattatgcaatagaatctgaattcaagtctggatagagccctagctaatgacagggaacaggatgctaggtttgttagtcttatactttgctgtcctaagaatggaggaacctgtatctcatatatatatatatatatatatatttttttttttttttttttaagatggagtctggctctgtcacccaggctggagtgcagtggcgcgatcttggctcactggaagctctgcatcctgggttcacgctattctcttgcctcagcctcctgagtagctgggattacaggcgcccgccaccatgtccggctaatttctctattttttttggtagagacagggtttcaccgtgttagccaggatggtctcgacctcctgaccttgtgatccacctgcctcggactcccaaagtgctgagattacaggcgtgagccactgagcccggcccatatttttagtcattattttagtcacactttcaacactatgcactttaccagtgaaaaattatttctaacatttcttttgctaattaacaagccctccagttcatgcccaatgatgtactttgaaaggaaaaaaaaaaaccaaattataaaaaaaatttccagtgttgatcaggaaagaaaggtagctgaaggcgctaaacacagcttctagagcagacttaaaaaaaattttttttaaagtcttgctctattgctcaggctagaatgcagtggcactatcatggctcatcatgtacttgaactcctgggttcaagtgatcctcccacctcagcctcctgagtagctggggctacaggcgtgcaccaccatgcccagctaatttttcaagttttttgtagatttttgggtccttctatgttgtccaggctggtcttgaattcctggcctcaagtgatcctgccacctttgcctcccaaagccctgggattacaggcgtgagccgctgctgccagcctggagcagaaattcgcaaccttttgttggtcatgaaccctttgacagtctgataaatcatgtggactccttctcagaataatctttcaaaaacataaaatacataggattatcaaggaaaccagatacgtattgaaatatacctaggtcaggagttcaagaccagcctgtccaacatggtgaaaccccatctctactaaaaatacaaaaattagccgggtgtggtggtgggcacctgtaatcccaagtacttgggtggctgaggcaggaaaatcacttgaacccaggaggcagaggttgcagtgagctgagatcatgacattgcactccagtctgggcaacaagtgcaaaactccatctcaaaaaataaaaaataaagtgtaaaccactgtagcagttagtataaaatgctttttattaataagtggcagaaaatattaaatatttcataacttgagatgaggattgactataattgaaataagtattttatgttgtgatttaataaaaataggttaactaccttattgaatccttattgaataaggtacatcaaaagcctgaaagaaatggtataaaaatgtatctgtgcatatagctgatgcatcctaaaagagtaattggtcatccttctttagctatttcaaagtactttgccttccaattaatggcctgtcttaggggtgagtattaacccatttatgcctgaggttgcaatttttgcagtcagaccttggtgatgaccttgagcagaatataaataaattaagaacagatgaaaataattgcttccattttccaacttggaaatctacactttagctacaattaacaacgaaacttaaacagaagctatttgctaagaaattatatcttaaatcagaccattagtctgtcaaaatgaaagtgaaaatttaaaatatggaagtgaaacatgggatgcagagaagaacacatgtcagagaccacgcgggtgtaaattttaacatttagtcttgactgttcttaagatcttcactgctttctggtaagttaaatcattctgaccagcaatcttggagaacttagataaagagacacctctcctgggcctgggaaagtgatggaattgctccaagggttggatgggtgagtgtctggggagcggacacccatgggctttccgggccacctactcacaggctcctaaacaatgaccttcaagtgaagggctcccatgctacaaatacaaggccagaagctgaatctgaacccgcccagtaaaaagcttttggaccaggaaccagctgactgttaatgcaggtggtgagttaggtatgtttttataaaactcccatttagctccagtcatctaaaattccatctataatgtgaagagctacagaccctagttactttcatgccagacagtcatgtaagttcaaattacttttatggtctcttgaatctgtttattagagaatttactgtgctgccaggaccttctctcttttcctggaaccaggaagttgggaattactcaggtgttacattttacatcaaagatgaatcaatccgtctctagatcctgcatgtattcaatgcagaaggtaggttaggtatgttttcataaaacctccatttaactccagtcatctgaaattccatctataatgtgaagagctacagaccctagttacttatatgccaggcagtcatgctcttgaccttaaacgttccctctcacttcacccttgagttcttgcaaactactagcaaatgggccagattgtcagtgtttcctttgctgctatctggtgcaagcatctgacaactgtgagcttagtcaccatgtactgaacatttggaaactgtattactggtgttcctatctagtcaggggactaaggtggtgcttagtgtaaacattagctggtgattacaataaaatcctgcccagacgaacattctttagttggagagagacgctggtaacacaggaatcgatccagccaggcacaggaaggtttaaaactgctggtaaaaatctctgcttagaaacactgaacttttattccctattttgtggatactgtctagtctaaaaacaaatgtttagatttccaggctggaaagtttttttcacctgttcctgatgcttggcaggcagggcacacctccactgtatcttcgccagcatcatttcaacagcctttgacctgatctcctatctccagtcacgctcccacctaagcatcagcgcaatcttgcattgagtagttttgagtccagaggagccagacagacctagttttgactcaggatgttacttaatctctctatgcctatttctccatctgtaaaatgcaaataatagggttgttatgaggactaaatgcgttaatatgcataaaatgctcataactgtggctggactagtctgtccttcacatgcggaaaaagcttctgtgccttcccgtcctccacatgtggccctgcctttctgccttcccacactgtcgtgctattctctatctgaaacagcttcaactccaaaccacagacaacaaagaccttgtgacatatctttccgtgatgtctttttcaaccttaaataaggaataacagtaatgacaactttcattccttctctccacttttttccttgcagctgtaacacatatcactgtactcatgtttgccagatcctcttacagtgtctttaaaatacttcagcataactgcattgcacttcatggcttacccctttggaactcctcataagtcctcactgtttgtattcatttgtacagaagtctcatcatccctattaaattatacccaaaaaagtgatatagatgcaggcattagttttaatccacacataggaataactaattaacatttgatatcctaattacgcgtacacactccagggtggatgaggtagcatatgaacacctctaatcaaggatgcatgctctagaatagggattcttaacgtggatagaatgaatgggggggggttctataaacacggatggggaaaaggttacacttttatttctcagtaacttacaaatgaaatttagcgattccttcaattattaacataggtaatgaattatagtattagcagtacctgtgactttgtcaccaatacaaatcacagctgttttcgtatcacattctcattgttacaaatatctttagatgtttacattcaacacaactttgaagttgaagcaattattcccaatgctagaccttgttagttaataataaataagccaccatgcccggccagtgatttacacttctatatactctcttcttttattaaatacttagggaaaaagcccagtattgatgtttaagaaaactgaggccgggcgcggtggctcacgcctgtaattccagcactttgggaggccgaggcaggtggatcacgaggtcaggagatcgagaccatcctggctaacacggtgaaaccccatctctactaaaaaaatacacacacacacaaaaattagccgggcgtggtggcgggtgcctgtagtcccagctactcgggaggcggagaatggcgtgaacccaggaggtggagcttgcagtgagccaagatggcaccactgcactccagcctgggcaacagagagagactctgtctcaaaaaaaaagaaaaaaaaaattggtaggctgggcgccgtggctcacgcctgtaatcccaacactttgggaggctgaggcgggcggatcacaaggtcaggagatcgagaccatcctggctaacacagtgaaaccccgtctctactaaaaatacaaaaaattagccaggcgtggtggcaggtgcctgtagtcccagctactcggaaggctgaggcaggagaatcacttgaacccgggaggtggaggttgcagtgagccgagatcaagccactggactccagcctgtctcaaagaaaattgatagaattccttttcattcttatttattttcaaaaatacaatataccagagttggattacttaataacatacattaaccagaggaatacactatctttatcatctggcttgttttattaatagctgctaattttagttacgtgttaaattttattgcagattaattactaagaaatagcatattgatctatcttttatccatttaaattgttagatatacataattcaaattcgcccttggttacttttagtaatcttataggatgtattttataatctagttctctgtgaagtggcttttaaaacttttgtttgaattttaaaatgaggccaagttgtcttgtacagaaaatgtttgatttagatttttttttttttttttttttgagacagggtgtctctcactcaggctggagtgcagtggtgtgatcggggctcactgtagccttgacctcctgagctcaagcaatcctcccgcctcagcccccaaagcagctgggacttgagcgccaccatgcctggctaagtttttttttttgttttttttttttttgtatttttttgtagagaggaggttttgccatgttgtccaggctggtctcaaactcctgagctcaagcgatccttgtgcctcagcctcccaaagtgctggcattataggcgtgagccatagctcccagccatatagatttatatgtatatatataaaatcaatttttgatcataaagctgctttctagattatatgtcaaattgttagatcacataacaaattgtcccataaattgaatcagctaaatctgcagctctaatattttgaggaaaacacatcatgtcacataatattactttgtcaaaggtataatgaagttaacagtgttttgtcttctcaaccccttctgtgtataacaggttaagcaaagtgccactaagtgaaacagtagcaggtgtaattaacttgaaaagttatggcgaagtctttggcatgtacccaagaaattgagaaaaagagtgacttttatgatctgaatcacaactctttttgtaagccatatagttttccattatttgctttcaggaaatctaattcattctttagctgaaagatgattaaaaataatatttgaccagcctgagcaatatagtgacaccctgtctctacaaaaaaaaaaaaaaaaaaaaaaacaggtgtgggacttgagctcaggagtttaatgttaaaatgggctatgattttactactacactttagcctgggcgacagattgagacccatttccaaaataaagaaaacaaaataatgtttgatgttaaagtactatttgttttgttttgtttttttgagacggggtcttgctgtcacccagctggagtgcagtgccgtgccatgccatgaacacagctcactgcaaccttgacctcctgggctcaagcaatctcttgcttcggcctcttgagtagctggagctacaggcacacaacaccatgaccagctaattctttttttctttttttgtagagatggggtctcacattgttgcccaggctggtcatgaactcctgggctcaagcgaccttcctacctcagcctcccaaagtactgggattgtagtcgggagccactgtgcctggcatatataggtatttttatagaaaatagtgatagagtggttaattaataagaatttatattagaacaaaattctttggggaatgtggaatagaaatatgaattcatggaaaaaagtaaagatagaaaactaccgactattcaagaagaggtttttcattttataaagtatcgatagtgaatataaaaactaaaaatattatgaaatacccaaataccaaattttatggtattttgataccaatggatatgttgaaaggaattttgtttaaaaaacaatattttgggcgttatcctttgcaactattcaaacttaattttgaaaaatcttgtacattgacttaaaaatgtgtgagcagttacaaggcttcacaaaattcttttggggcacacgagcaataatacttcaattactctaggtgatacatgtgtaccttggataattaagattcatattaaaatcatattggatacatattcattgactccttgaagaagattaagttcatatgtgcaatcctttttacctcttctcctatttcatttttatattagtttcagtgcttttctgtgctgctttttctttcctttttttttttttttaaatacagggtctcgctctgttgcccaagctggagtgcagtggcacgatcacagctcactgcaggtcgggtgcggtggctcatgcctgtaatcccagcattttgggaggccgaagcgggcagatcacttgaggtcagcagttcgagaccagcctgcccaacatggcaaaaccccgcctccactaaaaacacaaaaattagcttggtgtggtggcacatgcctgtaatcccagctacttgggaggctgaggcaggagaattgcttgaacctggggggtggaggttgcagtgagctgagatcataccactgcactccagcctgggtgacagagtgagactccatctcaaaaaaaaaaaaaaaaaaaaaaaaagaacacagctcactgcagcctcagcttccctgggctcaggtgatcctcccacagcagcctcttgagtaggtgacactacaggtgcatgccaccgcacccagttaatgtatgtacatatttaaattttaacatataaaaatatatttatttatagagatggggttttgctgtgttgcccaggctggtcttgaactcctgggttcaagcgatccacttgtcttggcctcccaaagtactgagattttctgggatgtttttacataacgtattgatactcatatttcttgttaaatcaaccttaaacgttatctctctactcttttcttaccaacattatgagaccccgtgtttctccttcctgcgctcttttacaagccacctttctttatgcataagttgacattggtgtgtatgtttgtatgtatctttttctgtcagtgctagaccaaagggtgtcttaggcttcctcgtccttctctgtgggcttattatcaaaacccatgggctgtttcatggagactgtcctaatatagacttttttttttaaataaagaaattttatttacttagaaacattcagaatgtcaacaaaccagctgtcgccttcccctccttgccagttactgagtagtgttcagttaacagaacaacagttattttatataagctgcatcagagacaactgaagatgaaaaagcaacaaccatccccatatgtaactagctgtcctgagcactggcaagacctgctttaaatttccatgccagtttacagccccgtagagtaccaggcaaggctagtgaccactgggaataccatcaggacagggctctctgaagacacattgggtagtacattaactatacaaaagaagatactgcacagtttaaaaacaagtctcacgtagccttacatttcagtttttttctttaaaggagtgagttgtgtacaggggggttaaatttttatagacaaaaatgtattagaaccaacttattcatcatcatcactttcatttcattttttattttttgagagagggtcatcactctgttgcccaggctggagtgcagtggcatgatctcggctcactgcaagctctacttcctgtgctcatgtgatccttccacctcagcctcccaggtagctgggatcataggcatgcaccaccacacccggctaatgttttgtatttttagtagagatggggtttcaccatgttccccaggctggtcttgaattcctgggttcaagcgatctgcctgccttggcctcccacagtgttgggattacaggcgtgagccaccgaggcttgccttatttatttatttatttatttatttatttattttggaaacagggtgtcacccaggctggagtgcagtgacacaatcttggctcactgaagcctctgcctccccgactcaggtgattttctcaccgcagcctcccgagttgctgggactataggcaccatgcttggctaactttttttgtattttttgtagagatggggtttcaccatgttgccaaggctagtcttgaactcctgggctcaagcgattcaactgtctcagttcccaaagtactgggattacaggcatgaggcaccgtgcctgacccatcatcttcattttcttttctactcctccttttcgtcttcatctttctcttcttcttcctcttccttttcttgcttttttgcagccttgatgactgcctttttcaccccatcaggcttttcttgagttcatatgcagtaatagactttttgtgttttctttcagcttagcagccctctggtcttgggtctgcctggcatcggcagcagcgttattattccacatcttgcccagttctttccaacatcgccagtgcattggctgggttgttctcctttaatttttggtcagtgctcaggacagagcaagaaaaaggccaaaggaggctccttctctggtgcgttgggatcctggaacttcttttttgtgttccatgtagtagggacggagcttgtcatttctttttctgcctttgccatgtctgcagattttcttctctttgcagacatgaccttccaactcctgagcacttcttaggaagctctgaggagctgactgaagcctctggctgccgccacttgtgtttgcacagaggttgcatatgaggatgttttaccttccctttgcccacgctttgttattttttctcagcaaggagcgatttgcccagcacctgtcaggctctcccttggctgtagtgctgtctcttgagtgcagggcactgtgatggctcatagcataaagttgaaataaattatctttccctaaatcccatcagttgcatcagagtataccacgtttttgtttgctttatataatccatgactctcttaacagctttttgttttttctgcagttttatttgtgttttctggttctgtctttagcatattcttaaatttttgtttgcaaattcttagccgtgccattctattaatttcctccaaagctctgtatcttagaatcttctgccttctggttgttctctagacctgctgttatagagctgttgcctgggatttggtgaggaatacttttaaactaacatcttctgtctctttttaatttttagctcatggtttcttaaggaaatgcatagtttaaggtctcatgtctaacagtacagcaaggacaagatgttgacagagaacagacgtaggaaaagtggcgtctggacatttgaggtgcggcttatgaggaaagctatttttttagacaggttgtagtcatggttaacctaattcctaggctctgatttcaataaacattcactgaatgcctacaatttggcaggcactgggctaaatttaggtgctgaggatttccattgcaggagctggtgtggaggcagcaggatcacctgtaagtggctgatgacatgtaatagatgttaaaggtgttcaggaaccttgtattttcatccttaattactgtaattctcttatcccatccaataagcacagtgtaacggtgcttatatgtccctagacacgtagagtatttcacatgtaggaaacaggtttaagatgttcaaaggggaatcagttgacacccatactaagtagagagcagaggtggttttaggaaaagcaccaaactctcacactgaatattagtgagtgatagagctgattaatatggaaaattataatgaaccatcttgtgggggggtgtcctgatagccccccacactggaaaaaaccatgacattgcaaattaatttctagttggtggagtatggtgggggaggttttgaactgggcaccttagtgctttgtcttctggacctgctgttattctggagttttctccaaactagttcaccaaaaagtaacataagacatttgcatcatcttgctgctgtagctaaaagatgttctctcttacttttgaaagaaattctttctctttgttcagctcccctttcttccccctcctagttttgaactgagattatcacaaggatcagtgagatagaagaaataaataataaagacactaacactgaatgcttattatgtgccaggcactgttctaatcttcatagcaatcccatgaaataggctctcttgttggctacattttatagagcaggaaactgaagcctggagaagttagattagttgcccaaggtcacatagtaagtggtggggctgggattcacaaccaggcaattcagttcctgagcccagtcttcgccactgtgttttcctctgtctcatttcaccttagttacggataaagctgtaagagaaaatggctttctgtctgttggccaagtaggcttgctgacccctcacccttgagtgacacacttagcaggcacaggcaggccggacagttgcaggcctcctctacagggtgggggagcacagcctgtgtgtactcatttccttctcttgagtaccactaatttgatagttcacgtatcctctactaagaggtagagtgagacagcttagggacatcagaagtactactttcggttcttccacatggaaacatgaggaacgaggaataagtattctttccctaacacttacagtgcacttaagacaaagttttttttttttttggactgaatatacgtcgatggacacaggcccagatatggagaaagggcaggtttcctctaggcaagatttgcacggggaacctgaagctcacatagcttcagccctgcgccacagcttagccttagtcacataggtttccctaggtcatagcccagtctcaggctgcccactttatttgaaggcaagggaaaaacaacagtccaaataagataatttgaaacaagcatcttttcatttagttttctgctacaaagttgtctttaatttcttctcctgtatcatttgccatgggtgggagggcaaaatattaaagtagaaagaacatagttgtattttttttttaattaaaaaaatcttttttgagacagagtctcactttgtcacccaggttggagtacagtggcaggatctcggctcactgcaaccttttactcccaggttcaaatgattctcctgcctcagcctcccaagtagctgggactacaggcacccgccaccatgcccagctaaatattttgtgtttttagtagaggtggggtttcaccatgttggccaggctggttttgaactcctgacctcaagtgatctgcctgccttggcctcccaaagtgctaggattacaggcatcagccactgcgcccggcctagtacgtggctttagaatgagagacctaggtttgaatctagctttgttactgaacaaattatttaacctgtttgtgatatgccttccttattactctacaaagtggagaggataagacctaccttgtagggttggtgtattaaagtgtaccaggtatttgacgtttagcagtttaaaaaaggtagcctctattattattattaaagcaattaaaaatagagacttaaaaaataatttaacaactttaaacgagcaggtgaacagttttttcaggcaaatctcccttcatctccgctgggaaagaggtgatcagtattgggtgtattgtctgtttatctacatacacacccatgtatgaagatgaatacacaaaacaaattttcagatatacctcctataggcaatactagttacctgtatgtgtgtgcaatttagttttaaaattacaattcatatcctcatttacttttttccaccaagattataaatttgctttcaaagcttttaatactttaaaactttttgtcgttgtccttcaagcattcaaagattcccgttgctttcttcaaaacatctttagcttagttgacaaataccataaacttggaaggcatactcttattaaaaagggtctcaccttgtcgtccctgctggagtgcagtggtgccatcacggctgactgcagcctcgacctgctaggttcatacaatcctcctgcctcagcctcctgagtagctgggacaacagacgcatgccatcgtgcctggctaattaaaaaagaatttttggtaaagacagggtctccctacgttgctcaagctggtccttgaattcttgagctcaagcgatcctccctcctcagcctcctaaagtgctggcattatagttgtgagccaccacacctggtcggcatactgttctatagagttggttcgatcgatcctgggacatgaaataatgaaagaattattttttcttctctaagacagttcctattgcctccctccctactccaggtgttgccccaaatttgccatattttgcttgtttgttaggtaggttggaaaagtcttttctgccctctatcttccctccccttccccacataccactcactctacttggaggctagaacatgtttcctccaggatgttagcctaactcagaagacagggcttcatgaggacgggaaagagcagggaaacaaacataatgcaactcatgcagggagcgtggagccaccggagcaacaggtcctggagagaaaatgcagtcctgatgatgtcacagccctgaacagttttgattttgtctctccagcagagtattatttagaggtaaatattccttctgccttggtttggatcaccactctatcacagtcatgcgccccataatgatattttagtcaacaatggactgctcatatgaaggtggtcccatcaaattatgaaggagctgaaaaattcctgtcacttagtggcatcacagccattggtaaagttgtagtgctatgcattactgatgcatttatggtgaggctggtgaaagcaaactacttcactgccagttatataaaagtctagcacatacaattatgcatggtatataatacttgataatcatcataaatgactatgttactggtttctgtatttactacagtagactttttatcattattttagtgtatatgcctactacccatttttaaaaaggttaattgtaaaacagcctcaggcaggtctttcaggagttactacaaaagaaggcactgttatcacaggagatgacagctccatgcctgttactgcccctgaagaccttccagtgggacaagacgtggaggtggaagacggtgatactgatgatcctgaccctgtgtgggcctaggctaatgtgtgtgttttaggtttttaagtctaattttttaaaaaagttctaaaaatataaaacttctagaataaggatataaagaaagaagatatttttgtgtagctgtatagtgtttgtgttttaacctgactgttattacaagaatcaaaaagttaaaaaagtttataaagtaaaaactttacagtaagctaaggttggttagtttactgaagaaggaaacatttttgaaaataaatttagcgtagcctaagtgcacagtgttaatgaagtctacagtagtgtatggtcatgacctaggccttcacgttcactcaccactcacccactgactcacctgatgcaatggccagtcctgcaaactgcattgatggtaaatgccctagacagctgtaccatttttaaaatcttttgtatcgtatttttactgtaccttttgtattttattttattttatttatttttttgagatggagtcttgctctgtctcccagactggagtgctgtggcgcaatctcggctcactgcaacctccgcctgccgcattcaaactgttttcctgcctcagtctcccgagtacctgggattacaggagcctgccaccacacctggctatttttttttttgtatttttagtagagacagcgtttcaccatgtcggccaggctcgtttcgaactcctgacctcaggtgatccacccgcctcagcctcccaaagtactagaattacaggcgtgagccactgtgcctggccccttttctatgtttagatacacaaatgcctactattgtgttacagttgcctccaggaaatgccatacaggtttgtagtctaggagcaatagcctataccatacagcctgtgtgcatagtaggccgcaccatctgtgtttgtataaatacattctatggtgcttgcacaggttaaaattgcccgtaatgcatttcccgaacatattccttaagcaatgcatgcctgtatttaattgtggaccttgggcaagttatttaatctttaagcctcacttccctcatttataaaatgtggatgataataggattgatgctgtagggttattgtgagaattagagaaaataatatgtgaaatgcacttagaatagcttttggatccagtaagagcacaagcatttattgaatctagatttgaattcaagtctgcctagctcctaagccatgttctttccatcacaccccacgatgcacagcagcgtgaagtatgttatgtaggtagtgaccctactttactactgaagttgcagagaggttgaatgaggttaagtgactacttaggatcctaaagcccatgttcaaggcagaccataaactgaatgagggctgcttactcttagtgcagagtactacttcttatagtgtcatgtcatgaagacagtttaatatcttgaattatctaattacctcttgtctcatcaactagactgttagctgcttgggactattacatccatgtgccatctgattatacatgcttaaatagttagaaacttgagacttaaaggaataacgattactttagcatagtgcctcaggtacgtgtgttatctagtatgaacattagtaatcaaatacaatttcccaaaataaattaacacattaatttgggcatctggaccacaaaacaagtattaaatgtgaagtttacaaatatttacttaccacatgacccagctgttctacttttaggtacccaagggaaataataacgaatgtctacacaaagactatgaaggagcttgaatgtggttaaagaggtcaaaggactgaatagatatggaacagaaaaatcagtgtgatgggctaaggaagtagtttggacttggataggaattaatctttataatagtctaatgtggagagaaactccattgagaaaatttttctcttctttaaagtctaaacacgtctttagaagattctcagcatcattggttgttagagaaatacaagtttaaaactgcagtgagaggcccctgtgctcccacttgaatgtctgtaatcaaaacgacagacgatgctgcactgggtgttggtgaagatggggagcaaccgtgactctcatgtcttgctgacgggaatgtaaagtggtatatacactttggaaaacatttttaccgtttcctaaaaagttaaatatacttttgggtataaacatacttaccatgtgacccaacagctttagtcttaggtatctattcaggataaataaaaataaatgtgtacacaaagacttattcttgaatgttccaaggagcagtatttataatagcttcacgctagaaacagcccaaatgcctatcaactggtaaatggataaacaaaatactatgcacaataaaaaaggaataaagtactgataacatgctgggtgtgcatgaatgaatcttaaaaacatgctaagtgatagacaccaggtagaaaagctacatattttatagtatcatttatatgaaatgtccagaaaaaagacagtaggtcagtggttgcctgggcctagaggaaatatactaagaaaaaaatgtatatgtaaataatgctaagtgtatgacagaacaaagcaattagaaattagcaattgtagcaattagcaattctgggctctataccaaatgccacctggtgtttaaggagatctttcctctgtggctggttgtaactcatgcctccaagccccgtgcaagctctgggaattgtccagcttacacatgcttcctcagtactagttgtttcctggtgatttttctggctgcttggagtctcacctcctgcatgtgaagtttactcagccaaagacaaagactgaagggcccctgagcagattcctggagttctccctctgcattgcttccttctccctggccagcagactctagctgcctcagcttctcaggtctctcatccctggcaactcagttctggccaccaggctctggcctgggttcccccttcctggcccatggtctggaaagtatctataggcagaaaacctgggcagtcgaagggctcacttcccttgttctcctctcagggatcctcattttactctgcctgttgtccatcgtctgaacacatttgcttcaggtcttttgcccagttttcttgctgtttatggcaggagagctagaaccagttgttctatcatggctggggcttcacatgtatggtaaatgccttgtctgatgcccatggcaaacaatgcatggaaacaagtgccctctccgaggttcttaccagcaaatggtgctttcgtgcagacgagaggaaggtgacccctctggccagaccaattagaagaaggcaccacttctgagctgtctcagtcttacggaaagcacatggtgcctttttctttgcacccctcctaggccgtggcccttttctgccgggccattgtggcaggggctgctctttagcccccactccctctgggtcaggtgcctccatgaaggacacaaaccatacaactgcaggccctggccaggtggtctcattttaccaggtacctcttttcctgcagcagtgtttagcatgtcagttgctgaagggaaaacaaattaatcctgttatcctctaacccatttgtgttctttgtgctctacttgtggctcatattgatgaaaactctctgaaacattcttctttggtatttctcattcacaggaggggttaaataaatttggctaaaagttaaaggaaaaggaccagggaaaaggtcattcatgttattttattttgaatcaccatggaaataaaaagtctcaggatcccatcttaatatcttacaaccgaatatttccttgttggttctcatattgaaacaaatgtcatctgccatacactttttgtttctatcaaactaaacgaaaaatggagccctgtaaactcttggaaagaagatgctttcttgggctcattatttgggggcaataaggctggaaggagacgtagggtgtgtttggttgtgatctcatctgagaaaggatctgaacacatttctgctggtgtgcctggacaatcagttcttccatcttcaagtcatttctagaaatggtgaagtctgtagccctctctctggtgagtagatctgtagggctgtctgtgtgctctggaatggtatctggaattcaagtgttctgggcagtttacacaaaggtatactgaatgtcaatcctgtgaacttttacaactcattttagatatttttagattctatccccttccatccattaccctctgtctttaattatatttcccatttcttccctgatccatggtagtctgactactcttcctactactttcctgctctcatgtggtggatcaaggatcctttttttttttctctctctgagacagggtctggctctcttgcctaagctggagtgcagtgatgcaatcatggcttactgcagccttgaccaactggtctcaagtgatcctcctgcttcagtctcctgagtagctgagaatacagacgtgtgcatcaccacacccagctatttttttttttttttttttttgtggagaggtagggtctcactgcccagactggtcttgaactccagggctcaagtgatcttcccaactcagcctcccatagtgttgggattacagacatgagccgccacattcagccaatgatcctttaagtgatcaccctctatctttctgtgccctagatgctagttcagagtgtacttgatgctcaccttttagttgtatgtccaaagcttgtgccagttctcattggttagttgtgaggcaacggaagcaccttaagggactgtcacacagatatgcttagtcacaccctgcctggagaggggagtcaggaatcgtcacacaaaattacaggagatgaactcaaggagtaattaaagcagctcttagaattggtctttgggagctagagacccaggcctgctgtgctaacctcccctttcactggcctttgtgacattggactcaggccactgtaggatggtgggaggagcttgttctttggatttctgaggcttaggtagtttggatggctgtgtgagctgcagagagtaaatgagatatggctgagtccacatcagaatggagagacagatgtagggagccttctcgccctccatgagcctgttctttctgtagcctgggtacgactgcccatggcgccttctctatccaaactctcacctcccagtggtgcctctcatctggttttcctccttctctggcagttccttttttcagtgtcttttaaagttaccttattgtagaaacgtaaacttgcaagttaatgttactattctgttggtgtcttgcatttacatttgatcctcagtggctctacttcttacctaaggtgttagatgatcagcctatggaaataaactaagaccatgcaaatgcgaacaaacagactgttaaccagagtgcactccagcaagggagttggccaccatcacttgggtttggcagatgcacagaggcaggcaggggcacgtgaaactttatagtggagaaaaggaaaccttcgagggttttctgagacgaggctgtggcctgggggagctggaagcaggctaatagaagtggatgtcttaggtgcttgttgtggggagcatacttgactttctcttgctgattctgaatggcaagcaggggcaaaaaataaggaagctaagagtcactgaccaaggtcccaccctcatgggccaatgaccaaggttgtgaattagagctctggttgtacgtggtctgcccgttgtctatttgaatattcagtctctcccaagccaacgctgacctagaacatggagccccatagctcttcataaattgtctctagcacactgtttcttaaccttttttgggttatagactctggactattttaagaatctgaaagctataactcctctgcctagaaaaaaccaaaaaaacagtagcatggattcacagacccactgaggcccaaccatggaccacagatttcattttatttatacagatttaacaattttatcttttttgtgactatgatgcagcattaatccgtatggagtatatagactgctacctctttcttacaccttagaagtaattgccaataaattaatatgcacatatgtttaaatagcactacttttatcctataccaagtaggtgatatggtaggtgagtcaatatgtgatactgatgagaaacctcattaagcaccaaaaaggatacttttttggtcatttcaaccaatttttatttaaagctttttaagttcttatttccctgccatcagaataaattaatggaatatcatggcttagcatccttttcatgatgaactgcaaatacatgattttctaatgttgagatatctgacttaactggattgtcagctccttgagggcaaggacttgtgcctgttctgcagcctctcaggaaatatcgaaatgaacacttcagggctctcctcacatggtgcctgccccagactgtctgccgtgctttcctcattcacgtttctctcttcatttttttgagcggtaactattggcttctataatagtagccatcatttcaaactcccccaaaactctgattattggaagcagatgagccaaccccttctggtctgtgaccttaaattaagtgtatacctggtctcttctatagagaaaagcatggcttctgtttttctccatctctgaaagcattttttttttttgcttttgattcaagtatattctgaatagttgataaatggaattccaatctttggataaaaaggtgtattaatgagtctgttgaaacttttttttttggatgagtatcaggacactgggagaactatagcaggcatggggacagcataaatcaggactggacagtttagacaagctcgtcatttcatgtcacgtccaataagcattgagtgcccaccagatgatgtcaggcacccggaaagaaacgccttctgtgtcctcagggagctcgcagtcacagagagggcaatatagctttgatacttccttagaaaagaagacccaagggaattggaagtccctggtaggggacagagaaggtcacttttgttttgaaggagaagtaggctatcaccagggcaaacaatgggaaaggcaccctggtaaccgaaaggatagaagtgactgagcctgaaggacttgctgagcttttagagtaatgcagtggaggcataagcacgggcgtaggagattgaggctggagagttggggagtggtggtgctgtggagagccttgcttgcttgcttaaggagttagaatttcatctgcgagggagttgggagccattgaggggtttgaggccaaattatgaccaccagatcagtgtgtggtttagatgtgtgcttgggtgagagcacagctaggaagttgcgtggtaaaccaggagggcatgaagcagggtggcgttgtgccccatcagccacgtggcccactcccttgcttccacttggtcaccatcaaacgtcctttcagcaaggcttctcttgaccaccatgtttaaaatttccaccccacttccacttccgcaaaccccatccaccttccctgctttatttatttccttagcacctattatatgacatatttactcattcattcattcactcattcattctatttttaataatttaagctcttgcagggcaaggtttttgtcccatttttccaggctgtctctccagggcttagattagtgcttggcacggcagactgtaaatatttgctgaatgaatgactatcagaaggaaaaagggaggttggggttgtgagacatttcaaggtgaaaaccatatcttaggacagggataaacaaagccatcttcagttaagctgttttttcccttgtgagtagtgaaataggtagtcgtgaaacttttggaaattgaattttcactcaaggaagttaaggaaatcttcgctaagcagtcaattttgggagtaattatagtgaatttcagtttctctcaacctgctggctgacttaaccccaagacattgcatcatgagacagaatcacaataatgatggcatctaacatttatcaagcatgcgtcagcatacgtgtgccatgcacttcaagtatgccttttgtttttcttttcaattttttcatagagacaaggtctcactatgttggccaggctggtctggaactcctgggctcaagcgatcctcccgccttggcctccgaaagtgctgggattacagacataagccaccatgcccctatccccagcctctttttttgtggggggaattagttaatttcattttttttttaaaaggtggggtcttgctctgttatcccgactagagttcagtggcacaatcatagctcactgcaagtgcaagctcatcagttcaagtgatcctcccagttcagcctcccaagtattgaggaccacaggtgcatgccactattccctactgagttttgtattttttttttttggtagaaatggagttttgctatgttatgcaggctggtcttgaactcctgggatcaagtgatcctcccgcctcagcctcccagagtgttgggattacaggtgtgagccaccacgcctggcctctttttaatttgaagtaccaagctttccaacttagatctaaactctagacctaccactggttatagtgaagacaaaggctttaggtttaatttgatttcatagctattaattctaatgacattactgctgcgagggacatttgactttgggattccttgtttagcctagctgggattaggttttggaatcttaaagcagattgtattatgtaatggggtgtgtagaatctgtaatatagccctgacacgattgtgatggctctgtctgttagattcttaggacttggatttggaagtgttctccttattttcctatgaatttgtgagtcggtgtttttcttcaagtctgaagaaaagaaaactcttttctgttttctcttaataggaggaatttgaaactgcaggggcctagtaggaggtggtagttgttcagatctacctgttgctgctgtgtgggaacttaagcctagcatttccaagtcttctgaattttcaagagaatttgaaaatccagattttctaatgtgatgtcttctaattttctacttttgatcaatacagtgaggcctgaacaaaatgcttgtggaccttttttttaaaaaaaacttttttggtgacagggtcttgctctgtcacccaggctgagtgcagtggtgtgatcatagctcactacagcctccatctcctgggctgaagcgatcctcctgcctttgcctcccaacatactgagattacaggtgtgagccactgtgcccagtcgggcctgtagaccttgagtgtgtggcctctggttcggagatataggtgtagaaaaggtgaagggctggggggaaattagttaatttcatattcagtgaacattttccccagatcaatctaatcaagcagaaattcagtcatattaatctgatcaagaaacacgatggaaaatagggattaaattgaaaaccacaaatactgagagaaataaaaattagaagctttctttgcttgtagtctaagaatatcttaatccgccttttttttttttggtctgtggccgaaggccagatgtctggcccagggcctcagctcagtaatgtattctaatctctgtatatagaataccttgaagttatttgaatttgccatgattaaaatgagtgtgtattaccctgtgaatgtgggatatgaaatatacttcatcaaaaaccctccacaaatgagtcagtattctttggccagatttaaactttctttttatttttctttaaaatttttatagagatgggggtcttgcagtgttggtcctgaactgctggactcaagcaatcctcccacctcagcctcctgaatagctggactgcaggcccacaccactgtacctggctagatttaagctttcttatagtgaaagtggacgatgaaatgaaactcattctgccggtgtgtttcacagatgagaaaagacaagtgatttgcaagtgattgagttaatactgagtgtattctttgaattatgctatcccagtatatgacagtttgaaattatggaatttatatatcagagtcttcatatttctaaagtcctatgattatgaaatatactagttgtggttcagtggccatattgcttggatgtccctctgttctcaaccagttgttgtttgtgtgggtggaagattcgaatagaatggggttgtcaaacttttttctacatttaaataagttttctccaaggactgcaaattaccagtatctaccaactgtcctgagtgggattggacacaggagatgtctaactgctcttttcaaacaaccttccttttctaggtctcctcctaccttctggggtaattggcaccagtttcagtcttttcttgtattctgtggatgcattttctatctttttttttttttttttttttttgagacggaactccctctgtcacccaggctggagtgcagtggtgtgatctcggctcaccacaacctccgcctcccggcttcaagcaattttcctgccttagcctcctgagtagctgggattacaggcatgcaccacaatgcccggctaatttattttgtatttttagtagagacagggtttcaccatattggccaggctggtctcgaactcctgaccttgtgatccgcctgcctcagcctcccaaagtgctgggattacaggcgtgagccaccgcacctggcgcattttctgtcttaatgtcgtgtgtttcagttgtaaatatctccaagtttcattgaacatggaaacattgttttctttattgttttggacatgattttagagacagaggatggtggtggaagtggttttattttccccataatacttcttcgagagtaacataggctgtttaagaaagatagtgtctagggaactcatgattaaactgagaaatttaatcatgagtttaataaatgaataagtgaagtttaataaatgaataggagttagcctgtagagtccaagacagaaatagtcatgtatgaaagccctgagactgaaagattggtacctgggtcagtcccacatgggtgaaaggaagaccagtaaaagatgtagttggagatagagaaaggggccagatcacctgaacagcttaagaaatatttgcagaataagcaaaaagccttgtgttggacattcccgtaaaggaagaacactttgtccttcagaagcttatggtctagccgagatgacatgtaaaagtttattctatcatgagacaaatcgagtggtcctacataagcagtagaaacagtttcggctttatgtaggaattggggaaggaaatcacttttgtatagggttcaagtggatggatgcttgagggagataaagtgtgatctgagcctttctcttgtgggtgggccttaagcaagcagaattgctagggggaatggtgttacctaagttaggtatatggaggacaggggagtgacgtagctgagttgggggagatgacgcctgagcctccagtggtccacaggtggcactgatagggatgttggaggctcactgctccttttcttattgtcagtgaaaagagttgaacagtgaatctaaggcagcttcacattccttgtgccagttcccagcagatgctttctgctctccgcttagacattccactgctaggggaactggctgtctcttgaaacagtgttaattattcttatactaaagaaataacccacttcctataatcccagcactttgggaggctgaggtaggcagatcacctgaggtctggagttcgagacagcctggccaacatggtgaaacgctgcctctactaaaagtacaaaaattagctgggcatggtggtgggtgcctgtagtcccagctacttgggaggctgaggcagaagaatcgcttgaacccagaaggcagagattacagtgagccaagatcttgccactgcactctagcctgggcaacagagcaagactctgtctcaaaacaacaataaaataaagagatatcccacttgcggcaaccttccccagtatatcttactgaatgcagccctggaagtgacctaaaacaagttagcttccctgccaggtatgagtcccctcagctttgaggctgggcagcctgtcttcctctcatcttacccgctccagctacagggatttccccttctttcactggtagagttttcaaatccccccgcctcctgaatgctattattctccagtcatactctactttatcaatgttgctattagaatttatccttcaaaagtggatggaaaattctagatattgaggacacaacgaacagggctttttgtgatatttgtacttcttacagagagttgactggagtaagcaaatgttgagaagcttctgttgtgagtgtagtcactttctaaatttcaagtcagctcggcttcattccatgtatggaaagtacagtgggggaggagtgacaaagaaaaaaatcatactcatcacacagattgttgtttggttgctggtagtgccagccaagttcaaaaaagcaacaatatcatgacgtagtatggctgtattagaataagctctttgtgatgtatacatccgttatacagcgggttggggtggggtcttgttgaaccagagattccaaatatttcagttgtgaagatttcagcaactcagacctttagaattaaaagagatgatgggatttggattcagtatttgattttggtagttgacaacagtaaatgatctataactttcctttctactgatattattttgtgttttacacatatgtgatactgtgtggtttacttttggacccaatatcaattttttttgtgtcatggacagaagtattacaacattttcagaggtgatgagtttataaaatttcttcttcgtattttggcattctagagattacagatataatttgatttctttgtatgatgtgatttgttattcaaatgagaagtgagcatgagcccacaagccagatcagtaaaaaggaggaagaggttagtttattcatagataactgtctttatcccagatatgcagccatattgtttgttgtttcccaagctgcctgcttccaaaaaagcacattcatccatggtcatccacctgggctggggaggtctccagtaactaaacagtcactatttgggagatagtaattgttgcaggcaagaattataagtgggtgctaaaatttgcaggtgaaagtatgacgatgagaaacagagtgtttacatagtttaaaagtttatcccccacatgattcttatttgttacgaaggtaaaaatagtaattttactgtgggaaacctcatagatccagccttgaccaagtgatcagaattaacatgatcagtaatggcacatgcacctcatatgactcttggtagaatgcaccaaggagggcgcaatgtgacttcagtggtgggcttgccaaaatgcacaatctggatttagtcaggaggaagcattaggcaaacccagattgagggacattctacaaaataaatggccagtcctcttcaagtgtcaaggtcatgacagacaaagtgccccaggttggaggagacatgacaagtatatgtaacacaaggtcttggaccaaaaaaaggacattagtgggggtaattggcaaaatttggaggaggttgtctataggttatttaataaactgtgttgatggttaatttcttggttttggtcattgtagctgtggtgatataagaaatatttggtggttaacatttgaggaagcttggagaagggtgtacaggatttttttgtactatttttggagctttttgtaagcctgaaagtatttcaaaataaagttaagcaacaacaacaacaaaaataattcaactcagctgagaaattacagctttagtgcttgtacttgagacatttctctggattggtcagcagctgcttttgcttcctgaatctccacagtgatctggatagttgaggtttctaattaagggatcttgggatgagtgagacatggctgtattgaattgcagctacactttgacaaggtgttgtttaattaattaatttatttatttttgtacagggttgtaattacatctttgggtgtcccatgcctttgcaggttatttgagctttactgtcatagccatcagaatccctagctgcaaacttagctctgtaattaatttactggtttgtttctgtttttattatgatgatgtgaattcaggttagtcccatggattcttctgctatgtgtcatatgttattgaatttcatacttgttgtttgtcttaggaagagttgatgtttttggtataaaaacattttatttaaacttgaaatatcatactaaatatatatttttcccctcagaaaagacactttggagtttctataaataaaatgaatagtaaatgtactataaaatagagtaaatgtactctagcataagcaccaagtgctaaccttttattaggtaatcattagaatgggagaaattagtacattgggaaatgttagcaggagcagtggttaatgtgtgattcgtagattgttaagtcgagagtgttttgatcagtgtgggcaagaacgtggaccttgggagtcagaagacctagttttgaatcccagatccatactgcttattacaggttgagtattccttatccaaaatgcttgggaagtgttttggatttggatttctttctttttttttttttttttttggattttggaatatttgcataagggcaatgagcatttcctttgaacatgaccttttgagcatcatgttggcgctcaaaatgtttcagattttggaccatttcagaaagattttggattttcagatcagggatgttcacatcacaacctgaagtatgttcacttcacaacctgaagtatgtgctagacgggttgacttttctgagccttactttttgcatctgtaaaactggaatcctaatagtatcttgcaaagttatcatgagaatggagtcatgtagcatgcagtgcacctggtctaaagtgaggcctttcatccatgttgaattctcttcttacctcccctgtaggtttataacaaagccacctgcaattgatgagaaactgctttgcttataaagacaataaaaagatgatagcatgtcagtaacctctccagatttcagaagtcttttttttttaattttcgaaaacatttttctattttttaaaaaattttatttttttattttaatagcttttgggtacaagtggtttttggttacacggatgagttatacaatggggacttctgagattttagtgtacccgtcacctaagtagtgtacattgtacccaatatgtaatctttttatccttcacccctcctgctccccctcttctgagtctccaaagtccgttatatcactctgtatgcctctgcatgctcatagcttaattcccacttattggtaagaacatgcaatatttggtttttcattcctgagttacttcatttagaatagtggcctccagctccatctaaggtgctgcaaattgggaactgtgttacaataaacatacatatgcatgtgtctttttcacataatgacttattttcctttgggtgcatacccatagtggggttgctggatcaaatggttgatctacttttaaagttccttaagaaatctctgcctgggtgccgtggctgatgcctgcaatcccagcactttgggaggccgaggcgggcggatcacttgagatcaagagttcaagaccagcctggccaacatggtgaaaccccatctctactaaaaatacaaaaaattagccgggcgtggtggtgtgcccctgtaatcccagctactcaggaggttgagcctggagaatcgcttgaacccaggaggcggaggttgcagtgagccaagatcacgccactgtactccagcctgggccacaagagtgaaaactctgtctcaaaaaaaaacaaaaaacaaaaaacaaaacatgcatactattttccatagaggttgtactaatttatatttctgccagcagtgtataagtgtttcagaagtctttttgtcaggaaattcttctacatctcttattccagagaaattattttcttttatgtattagccatgttggatattactccaaaatctcttaaacaggtatcactcatttgctagactttctgtggtgttttaatgttcttgtcagaaatcacttgatacaaataagtattaaatttcttttagaagaaaatctcaggagacaaagcaacaaagagatggtcgaagacaattggaagcaaacattttcatgtacagtttcctttcaggtttcaggccctgaaagttgagttttgatcctctgagaagggccaattattattgttcctattttattccagtttcaaaagtactttcctttattcttaaattgtttgatttcagtattgccctgttattatgtaagtgaacatcatcgtttttaggaagtttagaaaagcttgtccaaccggacttagtttgttgtgttgttgttctgttttgttttaggctttaagcagcctgaagccatggtctttagtttctatctctagtgataagcagaaaagaaggatgaggaaggggctttactggcccagccagaaacagaaaccgtgaacccatgactgttttctgtgttttggacacccggattgttaaagaggcatgtctgcaacttaccctcaaatggttcaggaaaaaaaaacatatatgtgtatgtgtgtatttattcatataaatccttgggggaaagggaaggagaaggagaaaagcagtcatggcagtgttaacaattagtaaattggcaggaaaggtctatgggcattctttgtactttttaccacttttctctaagtttgaaactatctcaggattacattgactgtatatattgagttttttttttttttttttttttttgagacggagtctcgctctgtcgcccaggctggagtgcagtggcgggatctcggctcactgcaagctccgcctcccgggttcacgccattctcctgcctcagcctcccaagtagctgggactacaggcgcccgccactacgcccggctaattttttgtatttttagtagagacggggtttcaccgttttagccgggatggtctcgatttcctgacctcgtgatccgcccgcctcggcctcccaaagtgctgggattacaggcgtgagccaccgcgcccggccatattgagttattttcttgtcccctgatgagatgtcagtaagtggcagtttcagtgggaggaaggtgggaggttagaagtgcttatgtgtgcggagaggaataagtagtgagtaattcagtaagtacaggttgagcatcccacatagaaaatccaaaatgctccagaatttggaactttttgagtacccacgtaacactcaaacaaaatgctctttggagcattttggaatttggattttcggatttgggatgtgcaactgttaagcatagtgcaagtattcccacatccagaaaaaatacgaaacccaaaacacttcaagcgttttggatgagggatactcagctgggttaattcactggcaagaaattagtggtttctttaatttagccttttttccttagccagaatagaattcattgttttgtagaggagcctgtacagataagagagtaatctgttgctttttcaaagcagagaaaactacttggaactgaaaccagatgataaaaaagtaaaagattaaaaaatatatatttataagacatacacaaagataaaagcaaaatctataaggcagaaatattaggactgttgaaattattatctgtgctcagtcctccttctaccagagagatacaagttgtctgtgattagcagcctgtcttactagctaatagacattcatttatccttcaaattactatgtggcttcaaaggtattattttatattcttactgtgaatttacataatgtttattattttacccttcaaaaaaagtcttctaaactaaatttttttttttttttaacttttctttcacgtcaatgatgacatctgttttgggagctcaggggccagccgaaggtaagagatttggtttgttatgtgatgcttgtaaagatcttatatgcatgttgttgaactcttagaagttttcttctcaaaaaggaaaatattttctatcattttgtacaagtaatgcaagctgtcagcctactcacaaatctgaagccatttattggcatgggaagggccggaggtttatggaaaagctgtatttgcactttgaccacttctggctggtctcctagcagctacaacacagattccttttgtgccatagattggctcaagactggtagttccaaactgtggtcaaagccgactcatcctctctgctcccaagacagctagggatgcattcccagccaacagaaacctgcgcggcctcaagccgcctccatagattggctctagactggtagttccaaactgcggtcaaaaccgactcatcctccccactcccgagacagctgggggtgcattcctggccaacagaagcctgcacagccacagccgcctcaagggaacatgctttcacctctgtctcttagggaatgtggagccctgcttgaagtgggcacaaagtctgtttcttaactgaccatgaagttacttggaacttccaggaaatttagatttctgtctccattcttggggttttgtttttcctttacagtccgtggctgaattgtaattcagttcgctattattattgctaaaatgtgtattatagacatggctgtttgggactctgactttttaagatcatttatttattaaattttttttccctaaccacagggactgaatgacaaacagaaagtcaccctgtcagtataaaacatcattgtgaaaaagccgaatagggcactggtttctttatatatgtaaactttctctcatcttttctactgaaaaggtgctggattattttcgttttcttatttttatgtatattttttgagatggagtctagctcttgctcaggctggagtgcggtggcgtgatcttggctcactgcaatctttgcctcctgggttcaagcaattctcctgcctcagcctcctaagtagctgggattacaggcacccaccaccacaccaagctgggttttgtatttttggtagagacggggtttcaccatgttggccaggctggtctttaactcctgtcctcaaatgatgcacccacctcggcctcccaaagtgctgggattacaggcgtgagcgaccgtgcccagctttttttttatttttattggtgcagaggctggaggttgcagtgaagatatgaaggaaccattgcctggtgatttaaaaattgttcatattttatttaattcagttgcatgtttagaaaaaatgttgtgttgactaaaatacatgggaggttaaacacctcagctctggggagaggtgtacttgttgaacagggagaccttgatttttcctttatgcttctatgttattcgaatttgttacagtgtttacttggaaagaaaagacttgtccagtttatgaaatctttgcctggaagttacctataataatttacgaaattgctaagccttaaagaggaccatttagagctgtagtaaataaaaagtaagtgtttattagtccccaactttgtgccaggctgtggcactttcatattggggaatagagctaggctagcctagtggtgcagaggagggaccttagagccagactgtgggctggaatcctagcaccccaacctgctagatgtaaggcacttaccttttttcttcctcaggttcctttgaacagtgtcgagcacacaggcttagctccattatggttactttgggaatagcctctcgactcaaattgggaataagaaatgtcactgttaaagaaatccctaaaagaaagacaagtaaaaaaaaaaaaaaacccaataataatggagaggagagtgccatttagaacctatctctgataaatatacagttggccttctgtatctgtgggtttcacatctgtggttcaaccaaccacagattgaaaatagtttttaaaaaactatgaaaaataatacaacaataaaagtaaaaatttagggccgggcgcggtggctcatgcctgtaatcccagcactttgggaggcggaggccagcggatcatgaggccaggagattgagaccatcctggctaacacagtgaaaccctgtctctactaaaaatacaaaaaaaaaaaaaaaagccaggcgtggtagcgggcgcctgtagtcccagctactcaggaggctgaggcaggagaatggcgtgaacctgggaggtggagcttgcggtgagctgagatcacgccactgcactccagcctgggcgacagagcgagactccgtctcaaaaaaaagtaaaaatgtaaaaagcagtacagtatgacaactatttacatagcatctactttgtcttaggtgttttaagtaatcaagagatgatttgaagtatatgggaggatatgtgtgggttttatgcaaatactacaccattttatataaggacttgcacatctgtggattttggtattcatgggaggtcctggaagcagtcccactcaggatactgagggatgactgtatacacatgtgatagggcttttgaagtgagaactaagcttacaagaatcaggatggtttttacttagccttattaagaacagaattaattaaataaaattatggagataagcgtggaaagctagaacaggagaaacttcgtttgagctccacattttatttactcctactctgctgtaatgattctcactatgggtgacacctggagtttgcaaggcagctccccccagtttgatgcccagtcctttggggccatcttccatcctcctccttttgctcctctgtgtttgaaaatggcttagtgagccaccactgctgatagatatacgttttagctttggaaaaacatggagggtgagcagtgtgtaacacaacactgcagctggatgatgtcttctgggcccaagggctctcaggggctgtcagccgctgggggtctgctttcacttcctggcctcgcttccttctcacagccccatccagggaacaggtgtctcccctgcctgctgtttcacacagagatgcaggtgtgccgatcctcacctgtccagaggtgctgagccagtcgtcctctcggttgctgccagggttatctgcctccccctttagttgcccttctggtacctcccagaactgctcactggctttgcagcctgtgctctccctgcaggcccccacccttacccccatcagtttcatcggaactattttttcaggagtttctcaattctgatccaggcacaagcaagcactcttggtttcaaaaccttgttcttttttcccccttctcttcctttttggcaatttccccacttcccccatcgcctgtcgttttgagttaattttagctgggtgatggatatcagtatgcattattaatttaccatcttaacctaattttctttcttaaaaaaattaaccttttagacttctggtccagataatcttgtgagtttacacagaaacattctcctgccaacatcaaaattatagcagagatagataaaatattttagaatgtgcgaatcatgtaatcaaactcgaaaacaaatttagactgggcatggtggctcacagctgtaatctcagtacttgggaggctgaggctagaggattgcttgaggccaggagtctgagaccagcctgggcaacatagtgagaccccatctctacacaaaactagaaaaacacaacaacaacatatataacttcaaggaccagcagtaagcgagggctgaagtgacatatttccagggctttggaatcagaccaggtgcctggaggtgattggaagttcaactcttgccgactaatgggggcactggtgtatggttggggactggagccaggctcaccatgtgaaaactgatttgggcgagccttctctgtgagtgaaagcttacagtcagtttttggccaccaacattgagctaatgtctgtgttaataggaagggatggagacattgggccttgagaagacccaaaatctgggcttcagtaatggaaatgacagcataaactagtcatggaaaggtggccatcaggagaggaaaaaataagcaatcatgtaaaccataaaataaacactccctgctaagatgtacctgcaaactaacatgcaaaccatcatcaggaagcatagcaacagactcccaaagtgggagaatgtgacaaaatgtgaaccgagatacattttaaaacaattgcacttaaaatctttacggagataaaaatcacaaaacacaagtaagtagatttcaaactgacagaaatcgaaaaagtgaaagatgcagtcagtgaaaaatttgcctttgcttagttggtttaaaaagaaataattagtgaaaaagaagcttttcaaacagtgcaaaagaactatgtgatattctagaaagtggtgataaggtgaaagatcaaaacagatcatctgtaagatcccaccaagtagcattttaatacagattgttcctgctttttatgcatatagttttttggtacaaatatggaatcatactctagacttttataactttttcattaacataaactttttttaaattagtaagtcttctataccctcaaatctatacttgcacatgggcatgtcataatttatgtaaacattctgctattttaagctattttggacatgctatagtgagcatctttaaatgttatttaaaaaatatctttttctttgactacaaaaataaaaatattgaaaaaatataaaaacatgaaacagatcactaatttcgctgcaaaaaaataaactatagatgtaattctgtgtgtgtgactgtaggtgcatgtgtgtgtgcaatagccattttattacacattttgtgaatagttttccatgtaaaatatagagtcatatcacctatagcatgtttagttctcattgtaagcctctacatacataattaattcccattgtatgacagtaagttgttttatttcactattatgaacagttctatcagttatggtttataagtaatgttgaggttttcttaacacacacttatgttcattttcaacaggtgtttgcttatgatcattgtttctggtctatggatgaatctgtcaaagaaaagtatgcaggtaatagaatccagcatcctgtcaactactgatggtgtagaagaggggttcagtattttttcccttacacgattgcttggcaaaccccccaaactgtgtgtttcctctgctgtcacaccacaataacagtcatcaacacagaagatgacttaatgtgaccaaatgttgggggagttttccctgcaccccaagcggcagacactggctgggtgtcctctaactcagttccgatgctctctacctggggacagcgtcagatccacagactgagggctcagtcccacaagaccgctccctccttcccaccagcgcaggtccaggcctctagaacttctgacctactggcttccaattagggttcccacaacctcctctttgggtttgattaatttcctagagcggctcacagaactcagggaaacacttgtgtttaggggtttattacgagggattttctttaaaggagacaggtaaacagccagatgaagagatacagagggtgaggtctggaagggtcccaagcgcaggagcttctgtcctcatggaggtggcgcggcgccctcccggcgtgtggatgagttcttaccttcctattgggccctgtgtgtttagcaatccagaagctctctgaacccagtccttttaggtttttatggaggcttccttatataggcatgattgtcaaccgattagaaatgtgattggacaaaaagtgcatgactgaacacagcacgtcctgtctgttcagacttttcttggccattctgtgtagcattccttcctttaggatatgaggcaagaccttgtggaatgagaagctcttgacccacaatcagatgagagtcttgcctccggcaggtaaaaggagggcaggagatcagatagtttcctgaggctaaaatgccccaacatgtaaaagactgcaacaagggttaatgagccaggaactgcggatggtaacctacatctctataattaccataggatatatatgagtaccataggattcttttgcataactgtagaaagtacagacaacaccctcccgtgtttgctattagagtttttaatgttgattggaaaatgggagattcactgtgtgccattcttggtatacgttgatgaaattacatcactagtacacacagtggctattccacattcacacgccccagctcttacatgaggccgggagcacaaggtcgccccttagattgccctggaggcctgagactgggctggagagacaggatggcatagtgaaagaaggggagcaccggccaaggagaaaaggaaccctaggctgcaggcccagccctgcttcttaccgcccctgcgcctttcagtaaatcacctcacctgtcagagcttcagttttctctttttgatggaaaggaatatgccatattctctctaaattttcttttggctctggaagtctgttactctattattcttctaaatgatgactgtctcaagccccatctcaccacaagtttaggactgcagtgacagcctttgattgcctttattccttactgcttttgtcgcctgtttttaaacaatctcttttaaatattaagcatcatattgttttggcttctgttatgagaaagatgaatattatggctgttttgaagttaagattcatttggtctaggtggcccaatatcagaagtataagttaactggtattaaaaaaaaaaaaaaaggaaatgagacataatggaatacccttgccataacataaaagcatccagttcttccatgtggtattgagactaagtgaggtagggtgacttgtcagattcacattcaattactgactagtgacatatctcatttggcctgtcggggagaatttgactctgttctttatgtccatgattgaaagctgagggaaatttccaggctctgactccctgtcctaactggtatgtgttgtagatcctgtaattagaaattgtcactgagggaaaggagagggggttggtatatatgattattctaaactctggtacccaccgaataaaagcattgcctgagtggtaaatagttaagtccaggtacacctgggtcccaagtataaatttcagatatttataatcattgattataaagtgagcagctcattggctctgcattgcaggggattcttagtcgtgtttatttattcaagcatgtattacagggagctgattttccctcatgtgctaactagaaataacctggaaggcataagcctttgggagcattcgtcaaatttaaaaatcttgtttggagataaataagcagattatacatttttgagatttttgtttttgttttgtgaattgttcatatgtagttttggcttaaaatatcttttctcttattctctctctctcaggtcaagatattgttttcaagtgccttggagagaatatcctgcagaatgcttttgatggctacaatgcatgtatctttgcctatggacagactggtaatgttaaataacatgaaatcacataaacaaccatcaatgaaagaaaatagaaccatgtttattttactgagtaacattgctgatttattccttgttgtttttgctttcagaaagtactgtagatgttgaaagtagtcagtaacattattttaaaatgagtgtaataaaattaggattgggatcttttatctttactgatttttctcacaaggcactggctgcattgtttttcgaaaaaatacagagctatgactgttgaacacattactagccatgcctatagatcatgcttttttaaggctttcagaaccataacagataaaataccaaaaagaacatacttgttaatatctcaccagtaataactaagaagctttttggcttttgagtctctgtggtcaagaaaagaaaatttgaagtgaactagttacttttgtaagagtaaagtatacagcttgtccaactagaaatgttctcacagaagaatgtgttggatattttcaagaagcctcatgtgtcgtgttgaaagggcagaaagctggggccaggcggcgacagctccagtcctgctcctgcagctggccagcagagagacctgggcagttacttaacctctctgcccttcagcgtccttatctggaaaggctgatgatcatagaccttcttgtagggttgtcataacgagttcccatgtgcaaactttttacagaagtcctggtacttaggaaatgtggcacattagctttaggtattatgataacaataaaatgttgcatgacaaaagcagcaacttgtaggttaaaagcatatttgcaaaaacactgctactaaaaacagaaggaattatacttaagtgtcagtagttactggttttcgggcagtaggactatggtaatttaagttttttctttctattttcctgtgttttctaaattttatttaatatatatttcttttacaacggagaaaatcttttattttgagacggagtcttgctctgttgtccaggctggagtgcagtggcacaatctctgctcattgcagcctctgcctcccaggttcaagcgattcttctgcctcagcctccggagtagctggcactacaggtgcctgccaccgtgcctggttaatttttttggtatttttaggagagaaggggtttcaccatgttggccaggctggtctcaaactcctgacctcaggtgatccacccaccttggcctcccaaagtgctgagattacaggcgtgagccaccgcattcagccgagaaaataattttatataagaaaaaagattattctttagtttccacactatagtgaaagggtagtgagttaatttgctctggggtccacagggagaacctatattttttgtgctgtgatcactggttgggagcaggcactatagtattaattatatggctctttcagcttatttcggaaaacttttagacctcactatttctcacttgttttaggtattttcttaaagtatgaggatgattaaataagtttatttttctttttttttttttttttggagatggagtgttgctctgtagcccaggctagagtgcagtggcgcaatctcggctcactgcaacctccgcctcccgggttcaagcaattctcctgcctcagcctcccgagtagctgggactacaagcacgtgccgtcacgcatggctaatttttcttttttttttgtattttagtagagacggggtttcaccttgttgcccaggctgatctcgaactcctgagctcaggcaatctgcccacctcagcctcccaaagtgctgggaattacaggcgtgagccaccgcacccagcctatttttctttctaaaggacatttgcttttcactttcacatgtgcagtaaaaaagcttctgtacttattattctcattatatttgggtgtatttctcactgcattttggcgttttgccaagtgtttattatgagcaacggaaagagggttatgtatttaacgtctcaaagagacaatagtaactctgatttccatttttttaggctctggaaaatcttataccatgatgggcacagctgaccaacctggattaatcccaagactttgcagtggactctttgaacgaactcagaaagaggaaaatgaagaacagagttttaaagtagaagtgtcctacatggaaatttataatgaaaaagttcgagaccttcttgatcccaaagggtaaaggactttgagactttagtgtttcagcattgtgaactgaaacagacttaaattggcttaagtgcaaatctttttaattttttcagagggtctcgctctgtcacataggcttcagtgcagtggcacaatcatagcttacttcagccttgaactcctgggctcaagagtttgtttgtttgtttgtttgtttttaaacccaagaaatttcaggtggaattcagctctttgtgggctgtgaggtgagggagaggcataatcagagagatgaaacctagtctttaggacagtgagtttttaaagattctcaggaacaaaaacaagtgcccatgatttcatggcacagacttgtaaagagaattggattggaagtcttaggaggccttcacaaacgctggtttgactctacagctgtaactgagtgaggaaagtgcacggtatctagaaatctgttcattccacagagtttttcgagttcagattttaaggaagcgcaacagtggagaaagatggagataatgaccacagcctgtggcttgttgatgtaaaaacagcattaggaaggtcaaagagccaaataagctgaggcctacagaaagtttgcaggacaacaggaggacatttagttttgctggatgaggaagatgatcaaggaaaagaggatcttagaggcagtgagtcatagtgactctcagtcaagagcaaacagaaccctcagctcctctctgttgtcagttttccttgaccaagatgataatctttaggattctaacagggagattgaattgatgctcagtgcttctgtacaaactttacttaacaaacatttattgagtgatcattatatgccaggcactatgcaagaactcacagtgtggacagaatgagagttttgtaaacaaataattaaaatacaacgctatctgcttttagcttgtgaaggaggctcctacaaattagagagcaaagggacaatgactgatcttgcccctaggagaagggaagattccagagtgtacttgcttgataacatttgtgcggagtgggaagttggtccactgggaagttgggtgagaactactcaggtgtagggaacaacctctcccacaccttgaaggtgtaaattaatcacctttggagaatgatccagcagttcagtgtggtcggagagtaggatgcacagaagtcaacatggaacaaaaggaggccaagatgggaggatcgcttgagcccaggagtttgaggcttcagtgagccaagattgtaccactgcaccccagcctgggtgacaggatgagagattcatcctgtctcaaaagaaattaaaaataaaaaatgttccaaaacaaagaggctagagagtaccttacggtccaggtacccacatcctacttaatattatatccctgtatatttttttctttgttctgccttgaacactttttcttggactttgacctcgcaaagatcatcacttttctgagatccagcccagacctactctttccagaaattcttagctgactgacttcatacctgttcattcttctgcttaatccagagtgcttgtatggcatctttttaacttatctgcacatgtacagtctttagtaatttctcctatgtttgtcttgggtataggttagtaattaacagcttacttacggtaattacttacagtaattaacagtgaattctgaagagcttcggatttgcatagctcaggatctaggtcctctacttgttacctattgaacaagtttcttaagctttccaggcctaacttgtcagcctagagggaacttgaagagggaaatgataggatacaattatctcagagggctgttgtgaagatagactgggatgatacacctgaggtcttagaacatttgctggcatacagtaagtgctcaataagtggtagctgctgctatctccccagtgaaaatttcttggaaattttttttttttagtttctgaagattcaaagtaaatggattaaaatctctaaaggtgatctcatttcagtcaaagaccatttgagaaaacttcattttttattcacgtactaattatattaattcagcatctagtatatagtaatgtaattatgttgttttactcaggagataatagaggatacattaagaaaaaggaaatatgaaaggaaaaaagtcaataatagactatatcctgggcgagaagtaaatcaaatattctatatctactttatccagttacatggtaataagtgacatttttaatggttgatcctagggtactatagattttagatttaagagtcatttccttatcccctgattttactgtttatatgaagggttattctagaactatcctcttcttgctgtctttattatgggtgttagtgattgaatgtggttcagcttctgtgctagtcattcattatatgtgttctacatttcttcccttcctctcctgccttcttagttactagcactcgctctccaaatgacggaagctaacacatttggagtcctcactgtcatcttaatctctctaatcttcactttgttagtgaagtctgttcattcacttagtgattcttatgtgccaggacttgtgctaggaactgcagactcccaaaataattagacattattcttgctgttctagagcccaaagtttattataatacaaatggataaaagtaaattaattcatgcctaaggtgaggataaggagaagctgactaagaggtggtcaagagcagattataaaggagcatgcgtagcaagctgaggagtgtgcacctctcttcataggcgtcaaagaaccacccaaaaacttgacgcattggttgggcacggtggctcatacctctaatcccagcactttgggaggctgaggcgggcagatcacttggggtcaggagttcgagaccagcctggccaacatggcaaaaccctgtgtctactaaaaatacaaaaatgagctgggtgtggtgatgcacacctgtaatcccagctattcgggaggatgaggcaggagaactgcttgaacctgggaagcggaggttacagtgagctgagatcctgggtgatagagcaagactccattggaaaaaaaaaaaaaaaaaaacaaactttaaggattataatttattacttattttaaaaaagattttgtgtagttcaaaagtggacacacattcgtgatttaaaataaggataaacaaaaatataaaatgaaaatcagtaaccttatcattgacattcttttttataatttgatttttaattgacaaatgagaattgtatatgtttatggagtacagtgtgttttgatcatgtatatactatggaatgattatatcaagctaattaacatatccatcacctcacacacttaccattttttttgtggtgcagacatttaaagtctgtctactctcagcaattttgaaatacacattatgttgctgactatagtcaccatgctgtgcagtagatctcaagaacttactcctcctaacagaaactttgtacccttattttttggtttattcttaatatttttggtttatattattattcttaatatttttggtttatattattaagtatgctatctgtgctctacatttttctcagatgtcctttattgggtttattagttccttctttgctaagaggggttttcttttaaaaaaaaaaaaacttaatgaatatttaattttaattttattgaatcttttttcatgcgtttattgaaatgatcatacttccctcctccgcccccttaggctgtcaatgtgattaaagcgcatggctcttttttccaatggtggatagcctagaagccctgagataagcccagttttgtattttgaaatcattggattcagtttactgtctttggtttgtctttcttcatgactgagactggtctgtagttttcctttctcgcacagttaacatttactgagtttctgctctttgtaccacattctctgtaagacaaatagattgttcatatttatttgactctgcattctttgtagtaagtaaataggcatcccacaatatacccttttgagtgatgtgatatttaatcacattatgaagttttcttcgcagtgaagattttaaagtttggtttaaattcttctgggatcaagtcagttggttttacttatttggggtctttcttggattcattgtatatttttatggagcagagctgagtcctttttaaaaataggctattgttaaaaaatcatttctttgtttttcatgaacagaagccgtcagacgttgaaagtcagagagcatagtgtgttgggaccttatgtcgacggactttctaaactggctgtcacaagctacaaggtaacaacatcctgtatgtgaactatttaaatttagtgtagtagggtggggctcttttttttcttggcttaatttgttatttttaaaaattgcatatataatagcatcacttaataaatcactttacaaaaatcctaaaaatgagatagttgatcacagacaagcgaataaatatagactaaataggatgaggcttttaaatgaaaagttatcagacttagtgaatctaaagtgggtttggaatcaatctagaaaattgtgaattttatcttttgttgttgttttcccattctggggcctacttatacttccttttgcagttaatgtttttactttgaggctttttatgtatcatggtgaatttttttgtaaacattcttcttctaatagaaaattgtgattttcagtttttgatgatgtgtgtcaggtaggattgtgttcagttgcacctaacattaaaaaaatgtatcagagttatttgaaacatggattattatctgttttgtccattatatattctcagtgtctgaaaagtacctgtcctatggtaggtgctttcagtatacatttgaaagtgtgaatgaatggtgattgaaacaaggcttttcatggaaaagaaatatggaggtagactctccagggctggtatggtggccccaaatgtgttattagggacctagattccttccagtggtcaacacagagaggtgtggtaatgtccttattcccatagttcaagatggctcttagaaccaacacgagatagcatgcctacacccttaaggagaattcccagatggcgtattttaattttaaatcttattcactaaaatgtcatgaggccagagtgagctgcaagggcatctgggaaatgtagtctcttagctcggccatatgtgccaagttgaagattgggctgccctactggaaagaagtgaagactgggtaatgggaagcatctagtcgacttttgcacatacatttttctcactcctcattaagatccttgtaaggcagatgggtgtcatagctctgcattgttattaatgcagttaaaatccaggttggttaactgttttagagcttataacattaaaaaaaaaaaagaaaatcccttgaccttcctattgtattttgttgtttctcttttttagtagtagtagcaaccaagtggtaaatcaatgcagaaaattagtctcttgaggttctcatttttaaaaccaggtctgctaagatagtggtagtcggtgatatgcctgtatgaagcgacaaatggcacaagttatttaagttatttgtgttgcttatttgtataatctaatttaacaataaatttgtattgcttctgtattaaagaaactacgttttttcaaatttctatattagatgagggttggtgtggcatacttgttcatcttgtgtgaccaaaggtgtagcttctgaactttgagtcaaggctgccacctctgtacctgtagcaaatgatgtactttgaaagttttcagagacagtattggctattgtactccatggggctcaatattcattgagaaacaaaatgttaactccaaatgttgttgactaagtagcaaaacttgcaatgaattttgtagtatagcaggattttagtgtgtattacacaagtaatgaaacgtgggtctatgacttgtttccacttaggatattgagtcgttgatgtctgagggtaacaaatctcgcacagttgctgcaaccaacatgaacgaggagagtagccgatcccatgcagttttcaaaatcaccctcacacatactctctacgatgtgaagtctggggtaggtgttcagatgcatgacctgtttttatatttctaaagtggattgtggttttatttttttcctcttcaggtgttagatgaattaaagtcctggctagacttgtgtatcaatgaggactctggacgagaaacagaagctcctctaggtcaatagaaaaggatgtcatgtagggaagcaggtcattccagggttgttgggacatctgaggaggaccaggttctagactgcctctcgaggaataactttctgaacagcacacatctggctcccggggtggtgacacctttgaggacacctctagaactctgtgttccaggcatacccatagctgtgatccaggaagcaggaatagagaagttgcttctgtccatgctgctgcctcgtagcaccctggaacctggagaatgtgcttgcatttccccagtcccgctgccagcagaaagagccagaaaggggcagcaggcagcctctgctctgcttttgcgttccagcctctagcaggtgtatcctgagcctgggtggccagggagtctgagaaatgtgggtttaagcttcctgcccactcccactaaaggaaggtggagcagaagttaagtgcaccgatggcccactgtctgccccagcagtttttgagttttaaactgtgacggctaactgcgtgagccaatggtaatgctctcgcttgcccaggcactgtgcctcacacctgtaatcccagcacttcgggaggccaaggcgggaggattgcttgagcccaggagttggagaacagcctggtaacataatgagactccatttctacagaatatttgaaaattagcaaggtgtgggtggttcatgcccatagacctagtgactagggaggctgaggtgggaggattggttgagcccaggagcttgagactgcagtgagctatgattgccccactgccctgggcaacagagcaagactctgtctcaaaaaaaaaaaaaattctagctgatttagcagaggttcttttgcagtgttgccttctgtgaaacactattagaaggaataaatgacactggggcaattgtactataaaatcacttgcttttgtggaataactttttgagtgtttggttttgaatctagtgaagagtaaacccagtcagagataaacatgcttctgctgcattgcaaacttctctgttgcctagtatatttgcgttttccctctttttatgtgaattttacatattttattatgatgcctaccccctagtgtgtccattttaaataccagaaggtaaaataatcaccctggcaaagtgctatattttggcaggattttcatctgctgaaagcatatttttctccttttaccatcacagcaagattagtgtaacaacaaaaagttctttgtttcttatttccttttcagcataaaacaaaaaacatactgaagacttttttttttttttttttaactaaaagtacttttgatttgggacactgaataaccttttgttaacagcatgtttatttatggaaataaatgtctattttaaaggaaagctttaaaaatgattcagtctatagattttggtgttggtttcctacattccttatattgctattgaagtacgaagtatgttacatgtatgtgcttgataagaaaacacttttgataaagatatctatgtatctgtatgtatataatatcttaattagaaaaagatgtaaatctaataacacctgacatgaaatggaattatatatgaataagatgtaaatgttacaaaatgttttgagattttgaggggttcttctgttgtataaaggtcagattttttttttatgtcagaattgcaagtgttttgtctcaggattattgataaatatccatgaaattttaaacacagtttccaataatagtaaaatttgagtcttataagtacttttgtatactgctctgaaaatttcattgggcacccttcaaaatggcccattttggaggcactgttttcctgagataattagctttcatcctggctggattagtagagttttataaattttctgtgtctccaccgttagattgtacagttttcttacagtgtgttatagcagcacaaaataattttgaagtaacagtaaatacttttaataaagggtttagatcataacccatttggttgtgacagaactgctttttgtattgttttttaagagacagggtctcactgtgtcgctcaggttggaatgcagaggtgcaatcatagctcactgtagcctggaacttctgggctcaagtgatctcccacctcagtttcccaagtagctgggactacaggcacacgccaccatggccagctatttttatttatttttatttttttgtggagacaggattttgctgtgttgcccaggctgtttttgaaatcctgggctcaggtgatcctccttccttgtcctcccaaagtgctgggattactggcatgagccaccacacctggccctgtgttcctgttgattagtattgattgatttcctttgtagacatctggagagaaagtgggcaaactcagcctggtggatttagctggcagtgaacgagcaacgaagacaggcgctgcaggggacaggctgaaggaagggagcaacattaacaagtaagtgctctcaaagcttatttttattgctttatttatttaatagccaataggggaacatctgtggttattaaaatattaaggtgatttgaaatttttttctggtattttcaatgggcctgggcccattttaggttttgttgagatgcctgatggggctgaagagcacagcctcagtcaggtcagagtttctcagcagtggccctattgctgttttgggtcaggtaattcttttcatgggaggggtgatgctgtgctttgtagagtgtctagccgcatccctggcttctccccactagatggcgatagtagctgccgcctcttcccccacccccaggtgtgtcaacccaaactcactttcaacaaccatggctgttccctgtgggggcatagtcaccctccagttgagaaccactggtctaagctatagagaggatcaaagctaattggtctctcagagtggaactgttgatcttgacctgtgtgttgctctttggacaaacttgtactaaccacgttgagcttttcctttactaaacactgtcatgcttgtccaagtccaagaagctaagactttacgaagtaatattttgtttaccagttccttcatgtgggctcattttaggttttgttgaggtgcttgatggggctgaagagcacagcctcagtcaggtcagggtttctcagcagtggccctattgctgttttgggtcaggtaattcttttcatgggaggggtgatcctgtgctacgaataatacgaagtaatattttgtttatcagttccttcatatggacttcacattttctccctcaagccaaattgttagctcattatgggtaggaagtttttctgtccttggctcccagaaggacacataggagtcataaagaaaccaaatggagatgataaaacactgtcacccagatgctatcctattattgaatctcatatatacaatttttgctttgtactatggtttaattattgtgtttctggcttcctttcttaaagatacatggttttggtgttatattgacctgaagatttatagctcacatttttaggtactacaaaatattaggctaagcatttttattgcttatagtagtattgggggaaaataactattttgagttgtgtgcttttgaactgagcggcaaaatgctgacagggtgctgctcacatgcaggtacaagggcatcttagtgttcaatctttgtgctaaaatgtgacatttgatatatttcatttttgtaattattttggtttgttgcaccatgcaggtccctcacaaccctcggtctggttatctcagctcttgcagatcagagtgctggcaaaaacaagaataaatttgttccatatcgtgactcagttctcacttggctgctcaaagtaagtttgttttttttcccttcctggcatacttttggtggttggcaagaaggaagaaaaaagagtagactgttaatcccttccaggtatcatttcctctatcggtgtgcaaatgtataattattaggctcttatggtaatgacatttttgatggaataaacataggttttttcctagcaattcacatcctagcttactagaacctggatgcagtggggttgctggacgcacacggaatcacacgattgcttctggagatttaggggagtagagaaagggcctcctgctaatctgaccactgtgtgagtcatggaggaggagcctccgctggcctcacactcagctgggccaccctggccttccacagactccttttgttgggctaacattttggagcttgttttctgtttaactttgggacagtcagaccttggtttctgtttagctttactcatgatgcctttaatttgcttttggcttcttaaagatgttgttagaggctgcagagtagagcacacagtcattcattcattcattgattgattcagtatgaacaagagcaatggaagtgagaaagaagaaagccaatgtgcggtggtaggagaagaacgtagcctccattttaaaacagaggaaaacagagggcgcttcttgccctctctggctcgtaagggagataagatgtgcacacacaatattagaacatgagtttgtgatagatccatgacagagatggtgataacatgtaataggagtctggtgaaaaaagagagacttatttccagcttcctctagccttccagagcccctttagtcttcataaggtggtgtggtgagttggatatcggactgggaattagagggtataagttgcagtgacaatttaacccatttatagaggtgtcacctcactaaatcctttaatactcttttttttctatttttaaaatggagaaataattttatgtgccctgtttaattttgtgatgttttattttcttattgatcaagaatttgttgaacacctggcatgcgttgcattaggggttgaaaatactaagatgagttcaacacgggccgccccagtagcttagtagaggacatagttactgatttagtccatagcatgtttagaaaaaggcctttgtgaaatgaagtaggggtttcttctggtttcctcctcctctcaagagttaactagtattcaactttttaattcaaaactctgcacactatttgaatatcttttgttaaaataaaacattctttacgtaaatgtcagtgtgttctctcttaaatgtaatgctaaaattcagtaaattttccacagtagaatatcaggtccattacttcctttggccaaaatgcaggactgttagaaatttaaacaaaagtgtaaacaaatcatgataattaaaaccgcttgtaaaggttcgtcaaacaacctcacaaacatcagatagtaagagataattattaggaacaaaattaaaacaccttggcccaccataaagacaattctaaccttgtcttttaaaatagaacattattattcagatattgttacttgaatcctgacgtcagcttacataactaaatacctcaagtgcttttaccctaaaaaaaaaaatttacttttctttcctgtctcaaacagcataagaacttctgcttctgtaagactaacaaaaatgttttgtagttttttttctgtaattagaaaaacaagcaaactgcaaaattcaagactttggaggatgaatataattattctttttcataaaagccattaaaatcatagagtaaataggtttctttaaaaaattagtgaacaaacttgcagttatataggatattaagtctagagatcaaatgggcagtctaaggactatagttaataacagtgtattgtatataaaaaaatttgctcaaagtatattttaggtgctcttatcacaaaagataaccatgtaaggtgatggatgcgttcatttgtttgaatgtagtaatcaattatattactatgtttacatatatcaaacgtgctctataccttaaacatatgtatttaaaaaatttttttttaaatcgtttcattaccaaatgagtttttttttttttttttgagacggagcctcgctctgttgcccaggctggagtgtagtggcgcagtctcggctcactgcaacttccacctcctggatcaagcgattcttctgcctcagcctcccgagtagctgggattacaggtgcgcaccgccacacctggctaatttttgtatttttagtagagacagggtttcgccatgttgaccaggctggtcttgaactcctgacctcaagtgatccacccgcctcagcctcctgaagtgccgggattacaggcatgagccactgcgactggccaggaatttgttttttttaatagaagaagtctttttttttttggagacagggtctctctgttgtccaggctagagtgcagtcgtgcagtcataactcactacagtctggaactcctggactcaagtgatcctcccacatcagcctcctttagtagttgggactacaccaccatgcctagcaatttttttttttttttcaatttttagtagagatgaggtcttgctatgttgcccaggctggtcttgaactcctggccttgagcatcctcctgcctcggcctcccaaagtgccaggattacagttgtgagtcaccatgcctggcctgtagaagaaatcttgataagatacttcttcttcaaactttccatagaaacatttcctgatcatatattgtccttgtttcagtgttgctacttgagtccatttaaaacaacaaatatcttttgttggccgggcatggtggctaatgcctataatcccagcactttgggaggcctaggtgggaggatcagctgaggtcaggagttcgagaccagcttggccaacatggtgaaatcgcatctctactaaaaataacaaaattagctgggtgtggtggtgcatgcctgtaatcccagctactcgggagattgaggcaggagaatggcttgaacctgggagtcggaggttgcagtgagctgatatcatgccattgcattccagcctggtgacagagtaagacaaccctctcaaaaaaaaaaaaaagcaccaaaaaacaagaaatatcttttgttaacttaatcgacatagtgaaaatggcacgggtaatcactgagtggcttcattggcctggaggccaggagcacctgttgcaggagtatctggtgccatgccaagggcttcatgggtatcgtctcctttccttctcagaagggaaagggtggtgttcccagtggtcagatgacacagagggtgcagaactaatgaatggcaggatcgggattggaatcatcgctgacttgactgtgcagctgtttttgccaaggctgtgctcttcttatcaaaggttaattttcattagaaggatactcacttcatattaccagtccttgatagaaaataatgaaaaaaactgttcatagtacttgaacttgaagaatgaaaccataacattttttaaaaggtcacttaatctgctgtttagttaatttaggttatcattgcaactttcatgtattaaaaataactcatgtgtttgctgaatatttgtcattatctttttccttaaaaatgtatgtgattggctgggcatggtggctcacacctgtaatccctgcactctgggaggccgaggcaggcggatcgccaggtcaggagatcgagaccatcctggctaacatggtgaaaccttgtctctactaaaaaatacaaaaaaattagccaggcgtggtggcgggcgcctgtagttccagctactcgggaggctgaggcaggagaatggtgtgaacctgggaggaggagcttgcagtgagccgagatcacgccactgcactccagcctgggcgacggagtgagactccatctcaaaaaaaaaaaaaaaaagaaaagaaaatatatgtgatctggctgggcatggggctcactgaggcctgtaatcctagcactttggggggccgaggtggacagatcacctgaggccaggagtttgagaccagcctggccaacatggtgaaaccccatctctactaaaaatacagaaatgagctgggagtagtggtgtgcacctgtaatcccagttacctgggaggctgaggcaggagaatcgattgtacccaggaggtagaggttgcagtgagccaagaccatgccactgcactccagcctgggcgacagagtgagactccatctcaaaaaaaaaaaaaaaagaagaaaaaaaaattatatgattttttttaacgtcatttggacttcacagaagatcgtaaataggggcattttttttttttttcgcaaaacatgttccagagcttaagcagttttcccagagctctctccaaattggttgaaatggagatccttttcctttaaagtgggttttaggtccctgttgctttttccttcttaaattcttagtctgactcacccagatcctagtttgacatgggcatacttccagtattcttcaacataatttccattgaacttgtacaattgcccatcttctataacattttcagtttcacagcgtctttttttttctgcctcatatttgcgttgtaattgtgttgtgctcttaatgtgtgtaacatctgagaatgagagaagctgtggcttttcttggtgatttggtccagaatagatgtgagtgctcttctcccagggaggatggaacaaccattaaatgagggttacgcattcgctgagtcatcactggagaactatttcatattaagatgatttttggtcctctgaataaccatctaaatgtgggcctcttaacgtgaagtaacttctggtagtgagtgctcagataatgagtatctttctaattcatctccctcttttcgttcctactgccacctccctaatgaaggccacttttcatctgtcgcctggatgacagtcgtttccctcgagctttcttagtccagtcctttctccatggttaggttgcaacatctttctacattaatacttttaaccttcagtcttttcagtaactgtctataggcccttaggataaagtccaagttccttttttttcttttttgtataaacagggtctcactatgttggccaggctggtgttgaacttctggactcaagtgatcctcctgccttggcctcccaaagtgttgggattacaggcgtgagccgctgcgcccagccacagagtccaaattctttaatggcgtgtgacttacaaggtcctttatgagctgaccccttttactttttttattgttcatcttgtgcttcttggtgttacaaattccagctaagtgatgagtgttgtcttgcctctaggactttactcttgttccacttggaacatgctttcccctcccatctcttcagtctctcctccctcctctcccctctccctttacctgggtgatgcttctctatctttgggtctcaagtgtcactttctgtgagagtcttccttaacctttcaagatttggctctctgctgtttgttttagaccatattgtatttatctctatcatcttagtccttgttatatagtattacttaccagcatcctccctagtggtgaactccaggaagagtcgagtgaatgagtaatttcagctctgttctgaatcagctctgtgacctttgaaaagtctgtcgttttcctgggtctcactttctcatctgtaaaatgaaataattggattatatgtcttcacagagttctttcagcttttaaaaattctgacttccaaaagtaaattctttcctatgactatttaatttgctgttgccacctttgaaacaaacctcatctgatttgcctaaacagttaaagagtaaacaagacactttctactttctccttgaatgagtgccagttcttttgttgtgatttcctttttgctgatggcatgaggtcatttttaacataagggtattgttgctccatgaacaagggcttttaaaatatcaagcatttgttgtttgccaggtttccttttctcagcataaattggagcacaatatacatgcttttctcctttggtagttatcgttacaaatcccctttcagctgagagcatttgctgttcacgtgggctgacagtgtgcagtggttctcagaggacaatgcgatgctgccagtgaaccaaatggtgatgagattgaattcctgtgctttcgttatatcacatttgaatttcattcatgttcatgggactcttcatgaattttttctggaagttgccaaatctggagcaccagctatgtgagattaatgtctaggagtgaagagcaaagcaaacagtcatggcttttacctcctaaagtccaaattagttatagttcttcccatgtcatgcattaaattatattttcttcagcaatataattatgttttctgtggaaaaccaaactttcactggtatatgaataagggacatattgtctgtgatcatattgaccttttagtaacaccttaggaatcattttgtttctgaaactagggcaagataatttggaaagatgtcaggtcaccttatttaatcttcaggcctgaactttctctgtgttaccaaatgtgtattgtgggcagctgtgggggagtggaaatcatgttggacttgaaggcagagtctaactgggctaggatattgttcaacttaccagttctagatttttaggcagagtgcaagatttaacctccattgtccgaacaaacctgttttctcaccgataaaaccaggctctgtgataaatcgaactcacaaaaggtggagacctaagtaaagtgtgtgcacaaagactggggaaatcacagattgtaccaactcattttcattgtaataagattggaaaagccttttattttcaaaagcagttttccataggttaatgctgccccaaagtagagttagctttcttatgctctagtgagtttcccattactggcccattggagtgttccctctaatcttgagagtctgtcattcagtgacattctgttcctaaaaagagtatattcaatctttttgtttgcttcgatgatttgtctcagcctgggttggtatcctaatatatgagtagttatctattgattgtaacagattacccccagaggaacagctgcaaacaagtcatttattgtctcagggtttccataggtcaggactccgggtgcgtgtggcttaatgacgtggctctagccgggttgtttcacatggatgtaattaaagtgttggggatggggggctgccgtcatcatcatctcaaggcatgaccggtgtggggaggtgtctgctcacttacatggttgtcagcagggtccagaagatctgcttccaaactcgtgcctgtgggcctctcttcgtagggccacctcacttcacggcagcccgtttcccccagagtgaaagaaaacacccaagacagaagccaccatcttctttgaatctacccttagaggtgacatgccatcactttcattccttggagaccgatgaataagtcctggccaccctcaagggaagcagagagtactagggtgtgggcgccaggaggtcgcctgcataggcagccttgtctgtggtgcagcagagcgcagtgggcttgatgccccaagtcttcttttgtgcttgagttaaatctctatttttaatgttctcaagtgagggtggtttttcattctgttggaagccagtcggtcctaaagccgtttcactgtacttagcagtttgagtgtcatgaagacagtatctcttctcaggaccattgtctgaacggtggaagtgcttctgtagaacttgcaatcttagtagcttttgaagtgctatcagagcgaagaaaatgaagttgctttaacatacttttttgtgagactataattgtaccttatgttttaaaaactttacaaggtgcttgatagcttgtaacagcaactttctgagccattattaggcttcacagagactcccagtacagggggttgtggaggaggttgccaagtaagtatcatgcttgttcctctaaggaggaagatgttggaggcatttaaggagtccttttttattctgagtagtctgtgttcttgtggtatcatcttgcctataaaatagggcagatgacttagaattaatttgtgttaaaccgaaataaaggtaggtttcatgacatttccccgtcctttatcaaaggctaaaactccctatttttagtgcaatggcttggcagagaagaaacagcacaggactcgagtccatacacctgcattttagccctggctctgtcattgaatgtgtttgacctggggaaatttgttcaccatttttgatttcaggtttctcatatgacgtcttcttccaactttaatatgctactcaactttctgttttctcctgtaggacagcctcgggggtaacagcaagaccgccatggtggctactgtgagtcctgcagctgataactatgatgaaaccctctcaactctgcggtatgcagatcgagccaagcacattgtaaaccacgctgtggtgaatgaggaccctaatgcccgaattatccgggatctccgggaagaagttgagaaactccgggagcagctgaccaaagcagaggtaggaggcaccaccgcgtgcgccctgtgagtccaggaagaggaatcagcctagagcttgaatttccttcccctgggctgtgagggatgagtactctacttaaaatttgcgaatttcttacagcaagagaactttgggatgagtaataaataaaggaaggttgtcatattagaattccaaagaggttttacagatgttaaaaagattgaacaggagcaaatagaattgagaaaatgtttgcatttctattcaggcggcagacaaaagagagaggtataatagaataggagaggaagagagatgctggagaccatgtgtatgtaattttaatttttgtgcagaaaatgatggagagcaggatttttgttgaatctcatttgttacctggtagaagtcggaatgaaaatcttgagtcttctacaccttcataatctagcttttccatgttgtggattaattacgtttgtagaaaatattttgtagtagaagtacccatgtatttagtggtactctattacagctgttttctgtgtattctgtaatggataatgttgcattaataaatttgaaaatctaccaactctgacctgcaatcccaagtgctcatcttcttgggaaagtggaatgaaatattagattcaggattcctactttttttttttttttttttgaggtggagtttcactcttgttgcccacgctggagtgcaatggtgtgatctcagctcactgcaacctctgcctcctgggttcaagtgattcccctgcctcagcctcctgagtagctgggattacaggcgcacgccaccacgcccagctaattttgtagtttttatagagacagggtttctccatgttggtcaggctggtcttgaacttgaactcctgacctcaggtgatacgcccgcctcggcctcccaaagtgctgggattacaggcgtgagccaccgtgctcggccaggattcctactttcattagcatttctcttcccacagttactcagcactgtggggctctttctggagtttgctttctttctcatacctgttttctgggaataaatcagtaagagacatggtcaggatgattatcttgatcgtatttttacctgttgaattttatcctgtttttataggaataattttatagtccatgaagactgttgtctccttggtgttaataacaccatccagtctgcaacatgtacacatttagtctgtacatatgtggataaattcctgaagtcatcaataagggctagaatgaatcatgtgtctgagtctagatgtataacctattaggattttaaagataaacgcttagaagctttacatttttgcatccttaaatgtaattatatcttcacaatagagtgtcagaaaaggaaaaagccttctttttgggcatattttggataactcaatgagtttgtggtcctcagacaatcgaggtacttcgatctacaatcgaggtacttcgatctacaatcgaagtagatgtcagacctcagcgtgacattcagccatgaggaggcagattgttacttttgtccttttagagttggccacttctttttccagggcatcttctagacatttcatgaagtaaacattttgcttgtaggcaatgaaatctccagagctaaaggaccggctggaagaatctgagaagctaatccaggaaatgactgtgacctgggaggagaaattaaggaaaacggaggagattgcacaggttcgtgtttcctgatgatgaagcgcatgaaacctcatggcagtttgcacaatgggacacatggtgtttctggttcctttttgatcttcagcttggctgatggcaaatctcacactatcattaggaatctagatctgaaagaatctatactttgcaaaattaatttgaaggataaacaggatataattgcacttgattgtttatgtaagaaataattttttagtatcagtaatctttaaaaaaaatttaatgaaataactcctttgtagcccctggctcttaacaccgcattctattaagtgctttggagacctaaggaacttcctgaaattacaaaattactccatctagtgcatgtggccaagaaaaaaaaatactgctaatagatattaggccatgaacttcttggttccatgtgaaaacccagtgaaagtaagatgaaattcctaaatctgaggtgactgtctctcaccattttctagtgacagtgatagttatgaaatcgtagggtggtggctgggtgtgatggctcacacatgtaatcccagcattttggaaggccaagacaggtggatcacctgaggtcaggagtttgagcccagcctggctaacatgtcaaaaccctgtttctaccaaaaacacaaaaattagctaggcgtggtggcacacacctgtagtctcagctacttgggaggctgaggcacaagaatcgcttgaacccgggaggtggagattggagtgaactgagatcgtgccactgcactccagcctgggtgacagagcaagactccatctaaaaaaaaaaaaaaacacgttagggtaggaacattagaattcgtctaggaagatctagttaagtttagcattgggagaaaaagtctgtctacctaataatagatttacactgtagctttcctgtttcatgattttccaactgttttagaaatacatatggtaatgtggagctcaggaccccatctaacaggcttttcataatcagacaactccagtagtagcgattgaatcagtcttttattcttttacttctactcactggccctagtttgttcttttgtagctaagagcgttaagtgtcccacccaaacacagtaactggtgatggcagtaacagccagcgtttattggatacacttatgtattgagccctatgctaagcacttttaactacagaacttgatgtaatcctctcagtagtctaacaagatagggactgttactacccaagttgttcatctatttaaagtcatctctctgcctcttcctcttccttttctaagttaaaattccctgttgtttttaactgttccttgtattagagaatatatagaacttgctcaatctgttttcactcagtagattccatcttgaaatgtgctgtccagaatcaatctgtgtatcagatgttgtaggatgatactgttgttacttagcataaagtggatgttatattagcacagactgggattaaaatagattttaaaaacatttttattgcagacattttcaaagtagataaaaattagagaagagtatactaaatctataggtacccatcacctggtttcattaaagatcagcatatggccagtgttgtttttgtgtccctgcattggcttatcttaaagcatatccctaaaattatagagaagagatcagtgtataaactatttctcattacatatctccctgtgttttttataaattataagtcattctaataattgtcccatttggaagctactttgtgtgagccattctgagctgctccaacagtaaacatttgttgtcatgagtcgttgtgctgatagaaaacagggcaagtctaagtgagcctacatcttggggagcttagtgttggcaccttttcttttcctctctcaggggtcccttctgggggcactgcctgattttattcaacagctccttcaatgccttaaccttccagagctcccaggctttagtgctgttgaatgtttttcttttctcattgaaaaaacctggtctcttgatcacttacttcttcctaatccaaactgatatctttcaaaatctatttctgacagtagagctacaaagtgttaataagtcttctggaagatgacttgagacatgtcagttgacatggtccatggtcagataaatttggcaatttccgggcaaactgaattcaatgaatttcttttttgaaggacttctcacgtcattctgggggcagttgcaagttagctgggttctccatgggtcctctgggctctgtaacatcttcctgtggggtgcaagccctcggatggccctaccacagaattctctgcagcctctgcaccctttgacccttacatcatccaatacttcaccattgtttaattgttatgtatagttttagtccctgttgagtttgtaagttcttaagaaaaaagactgtatcttttagtgttgtatgctcagtaatatttttgcatagaaagaactcaagatgagtattttctaattccagtgccatatctgctataccacattgtcccttatttttatcttttatgttcccattaaaagatacacacttaagtgaaatcaaaaccttgagatagatcaggggttgacagacaatgcatgtgatttaaacctggtctgccacttgcttttgtaaatttttttgtcatatagctgtgctcatttgtttatgtattatgtatggcttcggcagcaggaatgaataagacagagaccccatggcccacaaagactaaatatttactatccgacattttataggaaaagttaaccaacccctgatatcagaagcaatatttgatgatatcagtaaactgtattttatcatatagtactttgttatgagctgattcctagatgttacaaacatttgtaatttttttagatgatttaaaactttagtttttggtggcaaacggaataatgaattgacagttttccaccattgtgcctctttcggctttgacaaaaattttgtagcgtttttaccattatagaatctcaaatgacagaaatatgcacagggaagtagtgtaaaacagtgataactaggataacttagagaaaggtatagttagttacctcatcttatggacatgagtctttttcaaggagaatcacttcttggaattgagtgcagaaaactctgatggttagcattaaatgactcaaaacttctgaaagaaccctgtagttctttttgttagaactggatttaaagacttgatttgaagacccaggaccaaaatacacatttcaattttgtggtagtatacttctaggcaggatatattggctgagttgcagtgattgtataaattacgatggcatgcctagaaatagcaaaattgtgaaactttattttaattatgctgcgaacttactttgtggctgtagttaaatgacttagtttgtcttgcctttccccagaatcagaggtcttgggtgattgactcattgctacttgctatttacccatagtcgaagataccctctccagccccgactgtaccctaactacagagcatctggttgtgagatccatgcccatatccttacgatgtacagatgttcatatattgtatgggttcagaggcaggcacaaaaaaggaaaggcccgtgttatgaaaataacgcttgagtgcatatgcaaatttgtttgtttttggataaattcaccacactgatgttttgagtgctcaccatgtgtccttcactgtgctaagtgctgggaacacaacagtatataagataggatccatacccacacagcacacagtcctgtgtgagagaaatggcccggtgaacagttacgaagtagaacacgtctgctccagatagaaaaaagaggtataaaatcttttcagctaacgagaacacagagaacgtttgttttgtttgtttgttttttgtttttttttggggggggggttttgagatggagtctttctctgtcgcccaggctggagtacaatggcatgatctcggctcaccacaacctccacctcccgggttcaagtgattctcctgcctcaccttcccgagtagctgggattacaggcacctgctgccacagctggctaatttttatatttttagtagagatggggtttcaccaggctggtcttgaacgcctgacctcaagtgatctgcctgccttggcctcccacagtgctgggattacaggcatgagccaccacacccagcccagagaacattcttagcactctcaaggacctggaacttgtttcatgcagtgctgggtttgacaggagtgagaagacatgaagccagaggggaagcaggccaggttgaagggccttgtgatccttactgagggagtttggcctttatcctgatggggaggtcactgaagatgtcaagcaggagagtttattgatcctcctttgcttttaagaaggatcccggttgaggaaagtgcacacacttttgcttttatatatacagagttaaatgagatgaattcaagacatcagatattttcaagaatgaaaactgagaatcactagtacaattagttactatatgtaatagactttatttttcaaaataaaattagaattaacaaaaaaatcatatagtttggaaagagaaaaatgcaataaatctataatgccatagcctaagagaatgtatttgaattacaacactattgaataattgtaacattgtaatgtaaacgcttggatatctcactgcctcaatagctgtgaaattaatacttctctgataacatttacaggaacgacagaaacagcttgagagtcttggaatatctcttcagtcttcgggaatcaaagttggggatgataaatgcttccttgtgaatctgaatgctgacccagctctgaatgagcttctggtgtactatttaaaggtgaagtaatgtgctttgctactagattcttgttacaaaataggacaatatttcacagtactttagtaaacttggggaaccatgcttactcagaaaacagcaaaaagttatagaaccatcttgggtttctggactcagttttcttttttagtctttgatgccattcaacctgacaatataaaaaaatgatactctgatattatttccaacaagtcaaataccttacctaccattatttaacgtgatttgtatcagggaattaagtagataactttaaaaatggatgactttgaagactaaatgattcatttagtaagtatacgaaagcttttatggtttatgtgaagcacattcttttgtgagcagtgtgttagctcacaagaaaaaaatgtataaataaagttcttaggaccagttggtatgaaatttatgtttccagtaactcttaggaaaaattaaaaatttgggttatcaatctattaaaagagagagagtataggttatttagagactcagtgagtcagagcacagaacagaaaagaagacaaatattggtatccactgaaatctataaatcatgggatatattagtaagataagagacaacttcagaataagtctgaaccctgagacaccacacagattcgaggagtgcccagaatgggctgtgtcaagcccagagcacaaattacttatcatatatgatggactacacgactctaacacagagttgataactgttggcacacagtttctttcccctcacatgtgtgggtttaatgaacatgaccaggaaagtaaagctaacaggctgactatgtgggaaacagctctaagagaattgtgtggtttcatttcagaaaagcctggagagatcctgggtcagtgactctgtgtcattttgagaagccctgttgttaataagtatcttatatgatgtattgtcatgctgtgagttaggctgtgtctttgatgcataccttcatatgtgcatgtctcaagtgttgtggttcagtggcggcaaagctggggtaggagggagtgacctgtctctctagtctacggccaagccctttgccccctctagtctaattcctttgtaaatggagggaaggtctctggctactttgccaggttcctgtgagggttggagatacagaagcacttcgtaaacagaagcactatacaaatagaaaagatcccacattccacttttttgtttgatacctgtatggtttcttatacacatattatccttgcctattaaaaaatgatatattattggctgggcgtggtggctcacacctgtaatcccagcactttgggaggctgaggcgggcagatcacttgaggtcaggagttcaagaccagcctggccaacatgatgaaactccgtctctactaaaaatataaaaattagccggggtggtggtacatgcctgtagtcccagctacttgagaggttgaggcaggccaatcgcttgaacctaagaggtggaggttgcagtgagctgagatcatgccactgcatcccagcctgggcaacagagcaagactctgtttcaaaaaaaaaatgtattatcacattacttactttgcttctgaacagtgctggtagcattctgagttaggatgtcagctggggatattcatatgaatgtgaccgggaaagtaaagctaacgagctgactacgtgggaagagatgcgatgttagaataggacctaaatattctgtccttttctcagaaccagacattctttttctttgcattgtactgtagttcaaattggtacacacaaacacacatatcaagaaaaaactctgattcatatctgctccttaactaaaaacgtaaacaaagaagctgtttaaagatgtttggagagtcatcaaagtttctggtcatcttgtgtggaggtgtttgggttgtgtttcagactgtgtggccagccctgtttggccaagtctgaggcagtgttgatttcttgatcgcccaagctaaccccacagcaagcatatcttcaagacaaagcacattcaaaaggatgatctcagtccaagaacagttttatggtggaatttggaggctgagcattattcattactttgccttccaattcaaaagtcaatttagatgctgggcagatgaattcacgtctctggatgacttcagccactccatgtgtaagtgaaggcattggattaaaacatctccaaagttctttctagttccagctgtacagttctcttagtcttctagaatataacaccccctttatttatcctggaattctttatagtagcatacttcagaatcattatacccatctatcaataaagagactgagatgctatccctgcttaactttatcttattttgattacctgggcacacaaaaggaaatgattgtgcatttatttttatatttttttaatgcctacatatgccaggcctttgttaagtgcttggaatacaagatggacagtaaacccacagtcagtcagtgtcatggaaggagttaaaatagggcaggatgacagtggctttttccaattgtgagctcaggaagcacctctctgaggatgtgactttaaaagctgagatagaaacggtaagaaatgacccatgtcaggatcaggggaagaacatttcagacagaggaaacagctagtaaaaggcagtaggatggaaataggctcagtgtgctcaaagaacagatgggaggccgatgtagctggcacatgctctgtgaggggaagatggtgagtgtgagggtcagagacaggcagggacaggttgtagaatgctttgtaagcccgggtaagaatttgggctttattggaagttcaaagagaagccactagaaggttttattcttactttttttttttttttttttgaggcagggtcttgttctgtcacccaggtgagagtgcagtggtacgattatggcttattgcagcctcaatctcctgggctcaagtaatcttcctgcctcatttttatatttatttatttatttattgagacggagtcttgctctttcgcccaggctggagtgcagtggcacgatctcagctcactgcaacctccacctcccaggttcaagccactctcctgcctcagcctcccgagtagctatgattataggcatgtgccaccacacctggctaatttttttgtattcttagtagagacaaggtttcaccatgttggccaggctgggcttgaactcctgactttgagtgatccacccacctcagcctcccaaagtgctgggatcacaggtatgagccaccgcacctggccacaatttttttttttttttttttttttttggtagagacgaggtctcactgtgttgcccgggctggtcttgatctcctaggttcaagcgattctcctgccttggcttcccaaattgctgggattacaggtgtaagctaccatgcccactcttagaaggttttaaataggggatggtgtgaccagctgttgtggcaggagtggaagggagtggcatgcaatggagacacagtaggaagctcctgtatccacaggcaagagatcctggaggctgaatctaggatgtagtcatggaggtggggatcacaagcttattcttgatagaccttggaggaaaaatctgtaaggttttccctgattgacatggggtgggtatgggcttgtaagagaaagaaagaggactcaagaattatatctaagcttttcagttgactgactggtggtggtagtgccatccattattattggagaaggaaatagacttctgttgggttaggggagatgggaacaagagtttagctttggcgcttattccatttgatatatcttcagacatccaagttgtgtcaagtaggctgagtaggcagaaaataatagtggctgaggctgggcacagtcgctcacacatgtcatcccagtacttcaggagggtgaagtggaaggattgcttgagcccaggagtttgagatcaacctgagcaacatagtgagaccctgtctctacaaaaaataaaaaaaaaaaaaaattagttggtcaaggtggtgcctgcctgtgatctcagctactcagaggctgagacaggaagattgcttgagcccaagaaggtgaggtttagtgagcatggatagtgtctctgcactccagcctgggtgacagaaaaagaccctgtctcaaaaataaataaataaaaaaaaaataagtgactaagactgcgatagtggttgtggaggtggggaaaaaaacggaactaaagtatgtagctctagggtggtgatagagatgtagtttatttgtagatggcatttaaaaccatgggagtaggtgagttagtctaggtcagggtcaaccaactgcttttcacaggccaaatctcgctcccttcctgtttttgtttcaaccatgcctggcttcatttgcttttaaaaaatcttttaggccaggcatggtgactcacacctgtaatcccagcactttgagaggccaagacaggtggatcacttgaggtcaggagtttgagaccagcctggccaacatggtgaaaccctgtctgtactaaaaatacaaaaaaatgagctgggcatggtggtgcatgcctgtaatcccagctactcgggtggctgaggcaggagaatcgcttgaacctgggaggcggaggttgcagtgagctgagattgcaccattgccttccagcatgggggatagagcaagactctgtctcaaaaataaaataaaaataaaaaaaattttcgcaaaggtaataggacaatataagagggctcagtgtaaatgatttcaattgtgtatatgtaagaatacagtattaatcagtgaatttggttttttcttaggaacatacattgatagggtcagcaaattcccaagatatccaactgtgcggcatgggaattcttcctgaacactgtattatagacatcacgtcagaaggccaggttatgctgactcctcagaagaacaccaggtaacatacttgaattagtgttcatatcacaagagtttttcagaggaagaaagtactctagtggcaacagtggcctttgttgcttttaagttgaccacattaagtaatccagttggttgggcgggccccttacatttagctttaatgcctctcacacccattccttcctctctatacccactgccatggccttacgtatttaggccctcatcaagtcttgatcagagcccctgccaacaccacgagctgcctcctggttcactcaccacagccctagaaggctttcctctgtttgtgacagaaaatcccttataaccccccagtttatctcctcctcctcagcacctgccaatcctttgacctgctaactcctgttgggtctgcagggttaagtgctgccatgttctcctgtggggagtcactgtttggtctgaatgcactgcccttaagaggtatcggaccatcgccctgttgtggcagtgcttcttagtgtctgcctgtgggctgtgaacccttattaccccattagaccatgagctgcttgaggacaagggcctttctttttttgattctccattcctggcgcataatatgagactagtacacaggaacttaatacaccatggaggaatgaaggggctccaaattttatgaatggcacgtttgtcactttgtttccttcagctatagagctgttatcccctgttacagagttggaagtataacagtctgtaactgttagagacagtggttaactgaattatgttgacctttcaaatgctaatttgtttcattttatgatgtcaaaaaatcattaatatcactgattttatccataaagtcttcaagtattgagactatcaagctctggggaaggatcaagtgagaaaacaggagcagaagctggtgtggccctcacagctgtgttgtgctgttctctaatgaggccataaataatcacacagaaccccagcctcagcaagggttctccaagaccaggatgcaataagacagagcaggccacgtcatcgttgcgtttaagtgcagatgaaaacatggtcactgtgccacccaaagaatacccttctctgaaccagtatgagtgactgctacttcttcaccagttgcagcgttattctgttctagcctgaacccatggatacgattttgtgaaatacccattcatacgattactcccactttctgacagtacccagcatatgtggaacccctgcgttcttaaattctgtctgaagtcatccacccagagccaaaatcttacaacagtttctttctcacaccggctccctgcctcccctcccctcttcccctctgccctcttctgtgcctcacttcctcctctccccttcccttctcccgatcccttccctcctttccttccctcttcttgacagggccttattctgtcacccaggctgtagtgcagtggtgcaatcatagctcactgcagcctccaagttctgagctcaaatgatcctcccacctcgtcctgctgagtagctgggactacaggtgcgtgttaccacacccacctaatcttttaaaaacttagttttgtagatacagggttttgatatgttgcccagattggccttaaacttctgggctcaaatgatcctccctccttgacctcacaaagtgctggattacaggcataaactactgtgcctcgccaagatccagttacttttagtgtgtaaaaacctgcatcatgaaagaaatctagataggaaataaaattttgcatgtatgcatacacataaatcacgaatactatatcaccaggtaaatgctccatagctttacagagtttaaagaaactaaaatactgtaggttgaggtgattggcatctcttacagaggaagtagaaacccagctgggcttggattacagagtaagagtaggaggatgagaggaatgggaacctttctccaggttgtaggactgatagaagcctggatttggaggaagagttgatcatgtgtagtgtacagaaaataagccttttcttttttttttttttggcaggagttaagaggccttccttgtgggaggaagagcctttaatgtaaagttaaaaaaattgtacttgatatcctgtatcttaataaacgagtccttcagcaggagaggggcatgatgacactggtgtcccaggaatatcagtgttaccatgctgtgcatactctaattatttcccgcccttccaaattcttcccttagtggtattctacccaccacttctgttgaatgccattttcatgataagcagcacagtggaactggtaaattttccttatattgataggatgtgatcattttccttgctatgggaagttaccgaagactttaatataggtctcatttctcattactgatatcaggagatgtttgtagagtctggttgtttggttattttcattcacgtagattggacatatttgtttttgttgtatattgctaccatcttttcattattggctgtaatggttccctctttactccttaatatactgtggaacaaatttagaacttttaaaaatggaggttatttattgatctctaatacttcataccataagcatcttaagtaactacatagcacttggaactttgaaaaatgggggataataatctattatacaggcatacgttggagactttgcaggttcggacttccacaatgaagcaaatatcatagtaaagcaagtcacacaaatttttgattccccagtgcatatataagttaggtttatactatagtctactaattgtgcaataacattatatcttaatatatattccttaacttaaaaatactttgcggctaggtgcggtggctcacgcctgtaatcccagcactttgagaggctgaggtgggcggattacttgaggtcaggagttcatgactagcctgaccaacatggcaagaccctgtctctactagccaataatcccagctactcgagaggttgaggcaggagcatcgcctgaacctgggaggcagaggtttcagtgaaccgagattacaccactacaccccagcctgggtgacagagagcaagactgtgtctcaaaaaaaatttttttttaattaaaactctgttgctaaaaaatcactggagccttcagcagggggtagcctttctgctgcaggaaggtcttgcctccatgttggtggctgctcactgatcaaggtggtagttttgctgaaggttgggatggctgtggcaatttcttaaaatgtgacaacagtgaaatttgccacattgattgactttttctttcaagaacgatttctctgtagcctgtgttgctgtttggtagtattttacccacggtagaacttttcaaaattggaatcagttttcttcgaccctgacactgctttatcaactaagtttctggaatattctaaaccctctgttgtcatttcagcaatgttcacagcatcttcaccaggagtagattccatctcaagaaaccactttctttgcttattcataagaatcaacttacccactaatgttttgtcttgaggtcacagcagttcagccacatcttcagtctccacttcttattcatgtctcttgctatttccaccacacctgcagttacttcctcccctaaagtcttgaaccccccgaaggcatccatgatgattggactccttccaaattccttgttaatgttgatatttttacttcctcctctgaataacaaatgttcttaatggcatcttagaatggcgaatcctttccagaaggtttttaacttactttgccaagatccattagaagaatcactgtctatagcagctatagccttatgaaatgtattttttaaatgataagacttgaaagtgaaaattcttgatccatgggctgcagagtggatgttgtgttatcaggcatgaaaacaacattcatatccttgtacatctccatcagagctcttgggtgatcaggtgcattatcaatgagcagtaatattttggaaggaatcttctgagcattaggtctcaacagtgggcttaaaatattcagcaaactgtgatgtaaacagacgtactgtcatccaggctttgttccatttacagagcacaggcagagctgatttagcataattcttaagggccctaggattttcagaatggtcagtaagcattggcatcaacttaaaagtcaccagctacattagcccctaagagaatcagcctgccattgaagctttgaagccaggcattgacttctcttctctagctaagaaagttcgagatgacatcttcttccagtagaagtctgtttcatctacatcaaaaatctcatcagtgatcttgctgcagcttctccatcagcacttgctgcttcaccttgcacttttatgttacagaggtggcttctttccttaaacctcatgaaccgacctctgctagcttccaacttttcttctgttgcttcctcacttctcccagttcatagaattaaagagagttaggaccttgctctgggttagggtttggttgagggaatattgtggctgggttgattttccatccagaccactgaactttctccatatcagcaggaagactgttcagccttatcattcatgtagtcgctggagaagcacctttaatttccttcaagagcttttcatgtgcactcacagcttggccaactgttggtacaggaggcctggcttttcgtcctgtcttggttttcgatgtgattcctcactgagcttaattatttccaccttttgagagatgtgtgactctttcttttacttaaacagttagaggttattgtagttattaattagcctaatttcaatatggttgtgtctcggggaataaagagacccgaggagagggagagagtcaaaacccatactacatttactaaatttaccattttacatgggtgcagttcacgatgttccaaaaacaattagagaggtgaggtcagaggtcccttatcacagacctccatgacagacgtgaagtgagcacgtgctgtttgaaaagtatctcctgtagccttgcttaacataggatagcgtttgtaaaaaatgtgatatctgcaaagcacaataaagcaaagcgcagtaaaatgagatgtgcctgtgctttgtaccataaacattttaggtgaatcagcaaaggagtaaatgcaaatattaaaattcaccaagaacaggttgtgtttgggggaattattgttttccctagtaactatatctctatgttattgggaaattaaagcagaagacatgatactgtactcatcattcacgtttgatctcttctccttacagaacatttgtaaatgggtcatctgtctccagtccaatacagctacaccatggggacaggatattatggggaaacaatcatttcttcaggtatgatgttgttcatgtcccttaaagagattgttgaagattgtgctctgaaatagaaaatacatgttaaaaagtaaacctttctctacaacaattatgttattgtgtgtgtacgtatatatttgctgcatgtgtattatatatgtgtgtgtgtgttcattcactgtatatggtctgaaccctagggacatataaacaatatactctggaaaaatactgagtttacctacatagtttttcccttttatttcccactagaagatgattcttttgccgtgtggtgtaagaatttattaatgtttttctgacatgtttatctttttttttatttatttttttacggaaacgtagtcgtggttttagtttccttatctataaaataaggttcttttaggaattcttttcagctctaagtcatggcaaattttactgtaatgggttagacagatcatttattcccctgacagaaccagaaatctaaaggaacatagttgttagtgttggctaagcctctcaaaaaaagtcatggctaaagtctggtcactgtcttggcatctctctgtggcctgaagttggccatgctgcactgccgtcaaagcagcattcaggtacaggaagaaaaaggagaaccatagctgcactagccctgactgtcctgttcatccaaaaaaacagagaagtcttcccagagtccccagcaatcttctccttctgtctcctttgctagaatttgcctcttagctacaaagggggctgagaaagactgtgtctcacctggggctgtacatgtggtttcccaaacaaaattgatgttgtgttgacaaggcaggcaggctggatattgtaaaaagttaacatcctggtctcttgttattgtcactggtcggtgtgctccagatgtcatactgacttttctgtagctaacagagatcctttgccatgggccagtgatattttggttactgagaaaagggtagatgggcacaaagagcatggagcatttttttccttcctaaattaaatgacgtgtaaactgctttgttttgtgttcaaaaccctcatcgtttggattaagctgatctttccagctttagctctagtgtgccctacaaattttgaatatcccgttgttttactcatttctccagcgaatatgaacatttccattttcacatcttttcccacactgttccctctgtcctgctttctccttatccgtgaagactcagttcaaatgatttcctcctgtcgcaccttcctttatcaccttgctctgaaaacgtcctcagctttcctttcactctgagcttgtcacaggcgtgtggcctagtgtcatactttctgttgtaagtttttgctggcacatgagtgtcttatttctacgacaagattatcaacttcctgagtacagtaattgccttgtacttacatggtatccacttggcttctaacagataccagtacttaatgaatgacatgaataagtgcctatcttaacttcagaaaataatactctttttcccaccaagactcaatttgcctaaaaagaaaaagaaagcagaacgagaggatgaggaccaggatccctccatgaagaacgagaatagttctgagcagctggatgtagacggagactcctccagcgaggtgtccagtgaagttaactttaattacgaatacgcacagatggaggtcaccatgaaggccctgggcagcaatggtgagcaagtcgggcgtgcacttgagaatcagttccagttggtagaggctgaggtggggagatcgcttgagcccaggagttccaggctgcagtgagctgagactgtgcccgtgaataaccactgctctttagcctgggcaacatagcaagacgttctctctttaaaaaaaaaaaaacggtagagtgttaaaaatgtttatgattggggactttcaaatgttaacaaaaaggaaaatctttatgttgctattctctgtattttgtgtctttggctttaatttatatttatcaaaatgttctgccttaatatgcagtcagatcactttgatctgatggatagaatctctcttgtttattttattttaattttttgtgagagagtctcgctctgtcgcccaggctagggtgcagtggcacgatctcggctccctgcaacctctgcctcctgggttcaagtgattcgattctcctgcctcagcctcctgagtagctgggatgacaggcgtgcacaccaccatgcctggctcacttttgtattttcaatagagacaaggtttcgccatgtcggccaggctggtctcaaactcctgacctcaggtgatccgcccacctcggcctcccaaaatgctgggattacaggtgtgagccactgtgcccggtcaaatttctctgctttagaaacttgcctgtcattggcttatgattgtatttctggaggattcgccatgtcttaggttatgtgtagaacatataatagacctgctttttctgcagggaagatggttgaggatatgtctgagaatatataacaacatgagtgattgaaagtcaggaaagctaagtttatgccaaattgtctttaaagtattaggtggtatagttaagatgacagacaacattaccatatagaacaacatttgaagtttattatgttgtaactctcgatcatgtatcttttttaaaaacgtgtttagatccgatgcagtccatattaaacagcctagaacaacagcatgaagaagaaaaacgatctgcactggagcgccagaggcttatgtatgagcacgaattggagcagctccggagaaggctgtctcctgagaagcagaactgccggagcatggacaggttttctttccactcgcccagcgctcagcaacgcttaagacagtgggctgaggagaggtaggcggcacagaggggcctgttaactttatagctcaggcttgccacctctaacacacctagggaaagtgtcaaatgggaacattaagatggtgcttacaaaagaattatgttaaaagataagtgttaacagccaagaaccactttgcatttgtttttaaaaggggaattgcccatttatattgcattatttaaaactgttggtgttaggtgttgctccattttcagttggtatggcttttggatttggatatagaagtacacttgatcattgtattatgctttaggttctgaagcttgggtagatgatttttagaaaaacaaagttggttatctggactgattagctcaggtaggtaaagcatggtgctgatgagatgcagattgcaaatttgatctctgtatgggctaattagcattgcattgaaatgccttatcccatggttgcagactgtacttcactaacctcatactatttaaagtttggtctgcaggcaggcagcttcccttttacctggagattgatagaaatgtaggatttcaggcctccacctcagacctgctgagacagaatcttgagttgatgaagatcccctggtgatctgcatacaggggcactgctgttatctacagccggcttgctgtgtggctgctttccagtgcttatcgtgtagttgaggttcaagcgtgtgcatgggtcagtgtcagcaacacagtccctgcgtgcagacgaccacggaaaaagctcaattcacactttggcaatgatgtactaccactgtatgattttctgactagctgctttgtgttaatctcttccctacctctgccgcttctttatttttttttagagaagcaacgttgaataacagcctgatgaggctgagggaacaaattgttaaggccaatctattggtgagagaagctaattacattgctgaggagctggataaaagaacagaatacaaagttaccctacagattccagcctccagcctggatgccaacaggaaggtgaggttgccgttccttgaaaaaaacaaagatctcattggataagatcgcctgatatttcctggtgttatttaagcttcagatccctgtctgtgcctgccccaagtccagatcctttgtcctccatgcttttgggtagaattgacttccttttccattctctacctttgagtgtatgtatattttatctgctaggggaatatactctgcatctcacctggccctgacagttcatttcactcaactttcttccttcaaatctgtttaaattctttcttagaagtcttttctgattaatcttccccgaatgtctttttttccttccttatgctaccactctacaaccccttctccacaagttaggtgttcattttgcttatgttattttctacttggaatagcttgctctgtaaaactgctcattagttgtgtcatggtgtcatgtatatattcaggatcatactttttttggtataataaatttaataaaatgtagggggaaagtcccatcacaatcttctatctttgccattcagttgggtttttttccttcatctttttttttttttttttgaggttcttttctagctcttgatcacattcatacataatttttgatggattaggtagaattttctattcagatgaattttttgtggatccgtgtgttctgtttagcctgcggtagtcaacacagcaaaactttaatcaatccatcttggatattctatttttcttttttttgtttgagagggagtcttactctgtcacccaggctggaatgcagtggtgtgatcctgggtcactgcagcatctgcctcctgggttcaagcgattctcctgcctcagcctcctcagtatctgggattacaggtgtgtgccaccacgctggactgatttttgtatttttagtagagatggggttttgctgtgttggccaggctggtctcaaactcctgacctcaagtgatccacctgctttggcctcccaaagtgctgggattacaggcggatattattctaatttgatagcaaggattacatctttccctatgacatcatagcatcaaggtcagcgttttgtacagggttagatatttggcaaatatgattcttagtattttgagaaaggtattgtaaatatgatatgatcgttactttacagatcattgtttttgtatactctgtgtgtattttgaaaatttttacttaattagaacactagtatttgtagggcaaagtctgggtacagtaggactcaccaaaaaccgaagaggaaggccagtcacaaggagaaggttcagggcctagtttctccttgaaggctgagaagtacaagatcctctttgattttatagtgtataagttgaaaaaagcagaaacctgaaagatttttccccagtaagcatgaccgcagcccttttctccgtaacctcttttgggctttgttgaaaggtgtggctctgcactggggcagccatgtcaacgcctggaagaactcatgtcgcctggcatctctccttagttaggctgactctgtagtctttcgtgcaacagactattttttggtatttgaaaagttgtttaaagtcctgtccattctgtgaactcttctctggtgaatttttttcttatttccagttttgcaagagggctaagttatggtagctgcaccatattgcccgttgctattatagtcccaggtccagcattctcccccaggaaagccactacccacacaggtcacaaatgggatttttgtatttattcactggctggctgaatataaggtaggagggcctttaattttgactgtaagatggccgggcatggtggctcatgcctgtaatcccagcactttgggaggacaaggtgggcggatcacctgaggtcaggagttcgagaccagcctggccaatatgatgaaaccccatctctattaaaaatacaaaaatcagccaggcgtggtggcaggcgcctgtaatcccagctgcttggggggctgaggcaggagaatcacttgaacccaggcggaggttgcagtgagccgagattgggccactgcaccccagcctgggcgacagaaagagactctgtctcaattaaaaaaaaacacacacacgcattttgaccgtaagaattctcaaatgtttgttttattatttaaatttttttcttagaaaatgattgtaggcaagatgttaatgaaacatcaatgtatttcaaagttctcttcagttttaagtagaacatttgaaaaattaagccagtaaacctaaattgattagataaccagtagatatgtctccctcggggaaatgtataggggctttttttttttgaactttgtggttttttaaaagttctaaaattttttctacattaaaaacacattgctcaagttctactctgaaaaaaatccacattgctcttataagctggaaaaacttcagagcatactttttttgggggggaggtgtgatacttgcataatagaacattacttttttttaattttattattattattttttttgagacagagtcttgctttgttgcccaggctggagtgcagtggcgcgatctcggctcactgcaacctcctcttgggttcaagcgattcttctgcctcagcctcctgaatagctgggactacaggcgcccaccaccatgcctggctaatttttgtatttttagtagagacggggtttcaccatattggccaggctggtctcaaactcctgaccttgtgatctgcctgccttggcctcccaaagtgctgggattacaggcgtgagccaccacacctggccaaacattactattttaaagtgaataactcagtggcatttggcacggtaataatgtggtgtgagcaccgcttccatctagttctgtatgatcttaataagaaacccaaacaatgcatatttggaaactggtatcattaattgcttccacgtgggtgaatcggggacttttcagtttactcttttaagtgtttcatgttttataccccctgaagatgccatccattacaataaaacaaaattcagcctctgagagggacgtttcttccccatacaccgcagcaaactttccctctctccccattgataacgttgtggtcatatggtggcctgaataaaatacttttatttcaacttgctgttaaatgtggtcttttgggttttaaacttaaaatcatttccaactacagtcaaaatttaaatgtggtggctcatgcctataatccctgtgctttgggaggctgaagcagggggatcacttgaggccaggagttccaaaccagccttggccatatagcaagaccctgtctctatgcaaaacagacaaaattagctgggtgtattggcatgcacccgtggtcctaactacttgggaggctgaggcaggagtatcactggagcccaggnnnnnnnnnnnnnnnnnnnnnnnnnnnnnnnnnnnnnnnnnnnnnnnnnnnnnnnnnnnnnnnnnnnnnnnnnnnnnnnnnnnnnnnnnnnnnnnnnnnnnnnnnnnnnnnnnnnnnnnnnnnnnnnnnnnnnnnnnnnnnnnnnnnnnnnnnnnnnnnnnnnnnnnnnnnnnnnnnnnnnnnnnnnnnnnnnnnnnnnnnnnnnnnnnnnnnntagctggcattacaggcacgtgccaccacacccggctaatttttgtatttttagtagagaggggtttcaccatgttggccaggctggtcttgaactccttgacctcaaaggttatccacctgccttggcctcccaaagtgctgggattacaggcgtgaaccacccaagcccagcaactccccccaaaaaatttttaatgtaagtttatacttaaagtgaagtttataaataggttttgattgcacttgggtaggaaggtattatgttatagcttgtaagactttttggaggctttgtaatcaacagattaaaggatgattgccatttgagttttggtgtaatgacatttgactgatgggggtggaattgtcagctttgacttccccgctgcctgtgtgtttctcacggtcattcttactctctttgcagcgaggctctcttcttagtgagcctgcaatccaggtgagaagaaaaggaaaaggaaagcagatttggtctttggaaaaactggacaacaggctgttggatatgagagacctttatcaggagtggaaagagtgtgaagaagataacccagtaagttatttaagagaaaatcacttaattggtaattatggaaggagccaagctggaatgagtctacccatttcaggggaaaattgttctttttccaaaattataatcctatttctggagtaaggtttattttaatcccctaaattgtttagcaaattaacaattttaataatctctctttctggtatcttcttttttcttctcatttctgtcttttagatttctagcagaattctccactttccattctgacttctgttggtgtgcgggtgtctgtctcctgtgctctctgggaacctctttaggacagaggccaggcctcattatttgtctctcctcccattgctcaacccgtttaaccttgcagataataaacctacaatatatgttttgtaagttgaacatcggtggtatcttaatatttacactccaaggagcatttttgaagaagttttgatcataacataaatgccataaatctatacattggtactctgtccttaacttgcaggttttcttacttagatcagccatgtactcatacgtatttaaaatagaagtgcatattatgtatgtctgaacatattttcattaccgttagacctgtttccgcatagagttgtttacttcctttgccttttgttttgtaaaaatgatttttccagattgttatcaataaaaatgtttcttatagttaggtgatgtttttgcttaaaacatgtttgtctctttggtacccctctcctatttcaacttagaaataaaacaacagtaataaataatgaaagagccactcccataggggctcacctttttttttttttagatggagtcttgctctgtcatccaggctggagtgcagtggcacgatcttggctcactgcctcctctgcctcctgggttcaagtgattttcctgcctcagcctcccgagtagctgggattacaggcgcccaccaccacacctggctaatttttgtatttttattagagacgggatttcaccatgttgggcaggctggtctcaaactcttgacctcaggtgacccgcctgccttggcctcccaaagtgctgggattataggtgtgagggctcaccttttattagcagcagttttatctgatgacttgctaggaataagcagagcagataagaattactgtctttcccaaaagaaaggtgaagtgtagtttagcacactctacttctttttctggtcaacatatattgtttattttgtggcaaaatttccatgtaaaggagaatagctgataaaagtaatgacctgttactgggatcgctctgtcatgggtggaggatgctcacctccattgtgaatgggaatgaggaagagtgtgtatgggagtaatacagcgctgtgctttagcaaaaactttagaatgttttactctaaaaaatacaagagttaggatgatgaaagttaagtttaataacctagagtgcatcaaaaagcagtaggttgaatgcatttattgtaaatggtttttctgaagttgtgtgttctcaatctctttacaggtaatacgatcatacttcaaacgtgctgatccattctatgatgagcaggaaaatcacagtctcattggggtggccaatgtcttcctcgagtcacttttctatgatgtgaagttacaatacgctgttcccatcatcaaccagaaaggagaggttggttttctcttcatgccttgtttcctgtagagaatagtttaagaaacaagagggtggtgatgggatattgttgctattttttgtcagtaacgtgtcttattaataccttgtgtttccaaggactcttagggtagagtaactgtcagagactaggcctctaaattcccatacaccattaacctgacaacttgactgtaaaagagaagagaggtcatctcaagggagcacgaaccaaatctggagaaatgtttctgccttccctcattgctgcaggtggcaggtcggctgcacgtggaggtgatgcgactcagtggtgatgttggggagaggatcgcaggaggcgatgaggtggcagaggtctcctttgagaaggagacccaggagaacaaactggtgtgcatggtaagtcccagcttcatcctagtattacgttgatacaaaagtcattgcagtttttgccattacttttaatggcaaaaatcacaattacttttgcaccaacctaatagctgattttgagaactgcaggtctttagatggtaagtattatgttccttttcaaattttggaagtagagcagagcctcccccactcatgataatgcaaaatcgcctcctccatttccaaacacccgctagtgagccagacctgctggtggctgagaatccctgcaggaacagttcttataaaaagaaggtgctgggggacaggaagtcagcgaggggcgcaggtgcaatgtacaagtgagaaggaggtgaggtgaagcgaagaaggcctaaacctgactcttaattcatagctcatcctagaaccagtcctctttcccagtaaacatctctagaattgaagctgatgttgaagggagtaagttacgtgtcagccacaaggtagcgggaagctggagctgttggagttgggctgctttctgtaagacttcgcgtatattgagagggcttctggtgtttcagttacttcactaggaagggggaggaatcttaattcactgaagggttcatttttattatattgtacttgatttcagagcagctcctttgagtcatgtgatgatcggagatggagacatagggttgatgaccccacaatggcccattttaaaggtgatggactagtaaatgcaactctcaaatatcaccttctactattaaagtaaaataacatacaagggcacttctcacttgggaaatttatccttattactgaaaaaaagtagtacattctaagtcatatgggcttcctaaaatgaggttaaaataccatgttttttaatggaagatctcaaatatacataaataaaagtagtgagaaatgtgttacgaatccccattcaccttcgctccacaattaccacctgtggtcaacctcgtttcattcatacactcagccacttctgtgctgcccccctcccttagcaccccagcacgccccagcatcatatcttatctgtaaatagttcagtgtgtgtctccaaaagatgagtccttaaaccaatataaccataattgccaaaattagtaatgtgtcaaaaattaataatttcttaatattaaaatcgtcagttttcttaattgtcttggttggtatgtctcttggtctgtttcagtctttaggccctggtatgctcgtgctctctcactcgctcgctttctctttttgcctctcttaccacacctgcaattcatttattgtagaaactgggttgttgacctgcagtttcccatagtctggattctgctgattggtgttacttagtatgttaagatgcatttgctgaaaattggtagttaggtatacaggtgttacctgggggagggaggcagccagggtgctttgtaggtggtggcctgcgttcttccatcaggagccacatcttgtctagttgtttgtctttgagggatgatcagccactgatgattcttacctagatgcatcattttgttaggagttacaaaagaatggttctataattctattgtcatttcatttttctccagagaaaatcttcctattaacaactgttttgctctacagagataatttgtatagaaaaggaaggataaatgttgcatctctccctttatttacaatttttatttatttattttatttttgagacagagtctggctctgtcacccaggctggagtacagtggtgtgatctcagctcactgcaccctccacctcctgggttcaagcgattctcccacctcagccttctaggtagctgtgccaccatgcccagctaattttgtatttttagtagagacagggtttcgctatcttggccaggctggtcttgaactcctggcctcaagtgatccacctgtctcagcctctcgaagtgcaaggattacaggtgtgagccaccatatccggactaatttttaaaataatgaattggttttccaaaatgtgacaagttagtttttttgtccttagtcttaaaagcatgattatgaactcttggacttaaccatatttggtgtgtgtctatctgttgcattcactacctgtatttaaacacaaatgttcccatctttggccagtgggagccgcttcagttggcccttgagtcctgttgtcataactctaaccttcctggactggggtagctttcttgttttccggtgtgatgaatattccgatctcatcttgtgtatttcctgtcccagacctggaatcagccatttctccaaggaacctgattcctttcagtgggaagtggtttttagagaccatatactggcatgtaatggccttttatgtaaaaaggacgaggacaaataagctatatgacaataaatagaacactggtagaaaaacaaaagaaaccagcctggagacagttaagatgtcatgcgtggtgagtgtaattagcccccaaagaagtctggatttgtttttttgtaacaaggctatatgcacatattaacatctccacgttttcactgatatgaagtaaagtttgtatatttaaaaacctgggcgcagcatccgtgcctgcagacattcctgggctcctctgtcttgaacagctgcaagttgaagtctgtgatactctgacaccttgtggtggttatagtttttgtgtgcaaaaacttttttgaaaaccccacaaaacccaaacagcctgtgttcatttcttatggctgacagtcttcattcctggcagttgcattcctgagaggttgcccataggcgagagttcagcatattaaatcttgtttcttgtctattttaacattaaaattgtgattaattttgaatggtaaaaaaaggttttcagatggaatttagtcactaagaagtatgtattgaacatgtatctactcaatacctgtcacagggccgggcgcggcggctcacgtctgtaatcccagcactttgggaggctgaggcgggcggatcacaaggtcaggagatcgagaccatcctggctaacatggtgaaaccccgtctctactaaaaatacaaaaaaattagccgggcgtggtggtgggcacctttagtcccagctactcgggaggctgaggcaggagaatggtgtgaacttgggaggtggagcttgcagtgagccaagatcgaaccactgcactccagcctgggcaacagagcgagacgccatctcaaaaaaaaaaaaaaaaaaaaaacctgttacaggtctctttcatttcatttcatttcattggtgtggtaagtctcacccctgtagagtaaggtagctactgatattcccatttcacctaggagaaaacgaagcctaagaaaactaagaatttaagtaatttgagccagcacacaagctgataagtgggtgagatttatttattttaattaattaattaattaattaatttttgagacggagtttcgctcttgttgcccaggctagagtgcaatggcgtgatgtcaactcactgcaacctccacctcctcccggattcaagtgattctcctgtctcagtctcctgagtagctgggattacaggcacgtgctaccacatctggctaattttttgtgtttttagtagagacggggtttctccatgttggtcaggctggtcttgaactgccgacctcaggtgatccgcccaccttggcctcccaaagtgctgggattacaggagtgagccaccacgcctggccgagatatttattctatttattttatgtaactccaatatcttgtaatcttcccaaatgccatattgccgtgccttaaataatataaatatttaaaaacacttaatgagaaaatgatggtttttaaaaactttgtggaaaaattaattgcagagtattgtttgctcagtttggtttggaggaataaaatatgtcagccaatctgtctttcatagcctgtcaggaagtagctatctaggtgtttcaaacttctgttgacatcacagaaaagatgaattataacgggggttcctgtttgttgctcacccattatatgtctagtatggaagaaaataaaattatctggtttgtgtaattttgtgtgtcatcaatacttctcgaaatgtgtttttgcttgtttgcttgtttgttttttgagacagagtctctgtcacccagagtagagtgcagtggtgcgatctctgctcctgcaacctccgcctcccgggttgaagcgattctcgtgtctgagcctttgggagtagctgggactacaggcatgtgccaccannnnnnnnnnnnnnnnnnnntatgattaatgctcagtcatgtgaaaaattggtttaatcagttataaagtcagaacttagcttaacgacttcaggatttcattttcttcgtagttggagaagttgtagaatattgcagtttatcacaaaaactccaaattaaaaatcaaaccacgccaggcatcgtggctcatgtctataatcccagtattttgggagactgaggcaggaggatcacttgagctcaggaattcaaaaccagtctgggaaacatggtgagacctcatctctactaaaaataaaaaaaattagctgggcatggtgacacacacctgtagtcctagctccttgggaggctgaggctggaggatcgcttgaactcttaaaattgaggctgcagttagccatgattgtgccactcactccagcctgggcaacacagcaagaccctggctcaaaaacaaatcaatctaatgctgcccaccaaaagaaatattaagaatatttggctgcttagaaactgttataggcatttcttctggggcctttgggtctgattagacatgtatctccagttgcactttgttacaaccgcaccctgccctcctggtccggagcacgcttcctttgatacaccttcccccaaatctgcatagagaaggctttccgtaaatgctgcagaaaatggtcatcattcactaacttcacttcccttctatctctccccacatctttaaattatacatttctggtgcttttaagttttcccaaacaatgttgtatagtattgtgtaacattttcagttgagaaccttattcctctttatactttaaaatatcaaatccatgttttgctctttccttgatatttgttgtttcttggcccatacaccgattttgttcttcattcgctatgcctgacaaccttgttctgttctatggcatatccatggttagccaagttcatatcattgaagagtgctgatgtttgagatctttcttcatctgaattaacgagatgatgattcttatattctgagaaactaacatttaaatgttcttagactttacaacgtccacctctgtagtcaaggtccttgtaaccctgtgtccagcctctcactaaatataatcattgctaccactatttcccagatgcagaagtccagtctcagggtgaatgggatttggccaacataaatatcataagcacctaagttagtgacagagccggggctggaacctgcaactctgaatgcttgttggaaccctcagatttcaaaacacagagccttctttttccttcaggttaaaatcctgcaagctactgggttgccacagcatctgtcccactttgtgttctgcaaatacagcttctgggatcaacaggagccggtgattgtcgctcctgaagtggacacctcctcctcttccgtcagcaaggagccgcactgcatggttgtctttgatcattgcaatgtgagtttgttttccagagtaggtcagcatttagattactcatgtgaaaacaaaacagaaaatgaaccttgtttctttgactaaatgtgccgttatatgtcttggagcagtttctgtagagtgtggggattgagtaaaaagtgtcaatgcacctatactcctccacaacccaaaggtaacttttgcatgagaaacaaaacacatatgtatgtatatatgcatattcttctccaaagaaaatctatgtcctatattaggttactgaagaaattatctaaaacagttaagaaacttgtgttttagagaaagtgaacacaggtaacagagaagaactaactttattgagcaccgaatgctctgtaaagctctttgttattccttcatttggatcctccaccgtagttatctttgttgatagtgcatttttttgtgtttgtttgttttgttttgagacagagtctcgctcagtcacccaggctggagtgcagtggcacgatcttggctcactgcaacccctgcctcctgggttcaagcgattctcctgcctcagcctcccaagtagctgggattacaggtgcttgccaccatgcgcagctaatttttttgtatttttagtagagacaaggtttcaccgtgttggccaagctggtttcaaactcctgacctcaaatgatcagcccacctcagcctcccaaagtgctgggattacaggcatgagccaccacacccagccaacagtgcgttttttgttgttgttgtttgttttttcccagctgaaaacacaaacaaatcagagaggtcattttgcccaaagtagttcttcactggtttgtccatggctggtgagcagcagaatgtggactattgggtccccaagtctttcttgctcctgtaccacacttgatccatttcatctctttcaagagagaggcctctttctaatccgtttaaagccaaaatacttcactacattaaagatagatagagagggggagacaacaacagagataggagattctgtgatttctttaataaactgttttagagctaaatcctaattgcaatatgctatcttataaagatggacaggctggcagaattttcacaaattagatctttttttggtgctaatgattttatttccttattctcctaatagagatagttaactttctaaaaagtgggaaaaaatgtttttgcaacacactaccttattgcatataacttttatatcaacacattatagatcagtgttgtaacactttatacaattatgctcttaaaaatagctcccaaaatattgctaacaaaatagaatgcaatggtggtcttacatactagactttcaatctgaaaagtttaaaaaaaattccgatttatacttatgtttaaagtcaagaaccttttgccatctgagcattcattatgggttttagatgatagttctgtataactaaaacattccattttctattttttttccctgatataattaagtatgtgatgtctggtataaacaatcataagattaccagaaagagtttgctcttctgtaattagctgttgtgtttcaggagttttctgttaacatcaccgaagactttatcgagcatctttccgaaggagcattggcaattgaagtatatggacataaaataaacgatccccggaaaaaccccgccctgtgggatttgggaatcatccaagcaaagacacgtagtcttcgggacaggtgaatattagatgttcatctgattccatttatatatatgtaattttttttttgttttttgagacagtctcattcactctgtcacccaggctggagtgcagtggcacgatcttggctcactgcagcctctgcctcctgggagtaagcaattctcttgcctcagcctcctgaatagctgggattataggcatgcacaccacgcctggctaatttttgtatttttggtaaagacaaggtttcaccatattggccaggctggtcttgaactcctgacctcaagtgatctgcccacctcaccctcccaaagtgctgagattacaggcgtgagccaccatgcctggctagattccatttataatttttaaaaattgctagagattagtactgccatttatagaggttactattttctgagcatgaccagtgttccctgaagggatggcagtgtctccagggtattaatcacacaattaaacttccttagggaagtggactgcagagaataatggaagaaagttcaatttgtagctgattaagaagaaacagtgaaatgaattttggagaatagtgacttaccgttatgaattacttttaattaatcagctgtggagagtatggatcaagattcactctagtgttgtctttagctcatagctctgagtggcatcagtgttggaaagaggtaggcttctttgtggacttaaaaggaagcattaaaagggattgactgaaattgcatatgtttgtgcttttcacctaattatagatgaaaacagattttctttttcttttttgcatttggatagtttagcaaatactaaattagaaagtgacatttgagattttttccttgattctcttactgacctgagaaaaatacttggcacatcactgaagcatatggcactacctttgtctatctacgaaaagacaacccctgtatttgctttttttttccttttttttttttaatagtttcaaattattttagatttgggggtacatgtgcaggttgtttacctgggtatattgtgtgatgctgagctttggggtgtgattgatcctgtcactcaggtagtaagcatagtactcaggaggtagtttttcaacccttgctcacttccctgctccccaactcctgggagtctccagtgtctgttgttgctatctttttgtctgtgaatacccagtgtttagctcccacttataagcgagaacatggggtttttgcttttctatttctgcattaatttgcttaggataatagcctcgagctgtatccaagttgctgcaagggatatgattttgtttggttgtatttttttatggctgtgtacttgctgcttctgtacatctgattagaatttccaatttttgagtaacgactttgaaatagatttgtcattacatctttttgaacaaagtaaaggagccatttctagttctgatattgtgagtttaactttgctttccattattcttgccagtatgtacatgcatggtattcactgaactacagatcattctgaattactctgtttggaggtcattttcattgttaattcttatgtgtgtaggaccctaagctgcctgtaatgaaatagaaatgtatgattttccaagaacttcgcttatttcctagatggagtgaagtgaccaggaaattggaattctgggttcaaatcttggaacagaatgagaatggtgaatactgccctgtagaagtgatttctgcaaaggatgtcccaacaggaggaatcttccagctccggcaggtaacaagattgtgaatgtttacattagattctttggtgccagaaagcttaatattggcttctttttagtggaaatgttggcaataatgaaatctagactggccaagtccatttcttacattaaaattctcctatctcatgtcacaagtattgctattaaatttttttttcttttaatgaagtagagacacagggatctcgctttgttgcccaggctggtcttgaactcctaggctcaagcaatcctcccaccttggccttccaaagtgttggaattatgggtgtgagccactgctgtcagccaaatattgatatttataatattttaaaaaccagttctgttagtgttaggtaagaaaaagataaactttaaaggaaaacttagaattgatttgtaggacataaaccaaacatatcaaacagctttagaaagaattgatttgtaggacataaaccaaacatatcaaacagctttagaacatttaggaagacaaggagaagctatgtgacatgccagaaataataagcattcagattgtaaaatgcttgggctcaattctggctctctagtgtcctggctgtctatccctgagcaagttcaataacctcttgccttcgcctgttatgtagacatgatgataacaccaccttcatgagattagtgtgaggattaagagagatgcatgtttaaagcacagggcctgacatgccaggtgttaagtacacacagctgggtagatacacatgccagaatccacagagcagagaagaatatgggagtggccacttaaccccacatgcatccgcagagtctgtgctgccaactaacagtgagagggaaatttttaatttaatttgtatacaggatttggaatttttttttttgctatactttaatgcattgtttaggagactgccatattctatgagtttccatactttaaaacagcagtaaaatactagaatcgctctagaaaacgagcgtagaaagcattcaaagcaaaatagagaaaattaaaggaaagagaacatttgcttacatgtttaagtttctgaatgttttaagaggaggatgatgataaacacttgttctctgaccccagcaaataaattttagcaaagtgaaagattagtttaaattaaagcatgtgttgtacacataaaatagaattcttaagggtgtgaagaacatctttttctgggcgtctgttaaaaaatatatgtatcttcttcgaagtcttagaaattcatctactggaaggcaagactggataattttctatgatttagtgtaaattggatatttaagtatttgtcatacttctgacaccctttactaaaagtgttcaaagaaatgttggtttatcaggaaagggctttttgaaggatatgcctctttaccttcatattgaaaaaatcatgcaagttctgaaaggatttttcttatatgatggcaaaaaccgcaattttcaccaacttaatggcaagaataaagacacagaggccataaattaggtccatttggatagaaagtcatgtggagaaagagctggaaaacaggaagagaacaggttgcagaagcttctggaggctggtttcggagggccttgaatgctaggctcatttgagtctaatatgtttgaaaattggcttgtattgttcttgaacgggaacgtggcagaggacaactggttagctttaaccatgtgaaaagtgctgtttttgtagaaataaatggtcaaatatcagtagtgacaggaagttctgtctaatagtttaagtgtacttttaaacgtttttctgtggaacagtaaaccattgccagatcctttctctccttttcttccctctccttaggaatcttcccttcaagtgcgcacttcacccttcacacttaggcacagattcacaatagatcacttcggaaagtgcttaggcaaactaagcaaataaaaggtagctaattgaaatgacaaaactgtttaggctattaaaatattttctttaggacttttcccacaaaatatctgaggcttagtccttggtgatattaaatcagaaaacatctgtatcccagccactcaaatggagtttgataggatcagtggttgcctgagctgattttcctgatcatgcagagctcttgggaactaaaatctgatggaagagggcaagagtaattgacttgcaattgaacatttaaattctgtttttcaaatgctattttacatttctaaaatttataaaccaagtttgaagtcagtaatttgggaatactgtgaattctcttttaaaatattacttcattgtaaatatataccaagtctcacataataaacagtctaaacaatcatatttactgattattttttataattatatatttatatttatattaatgatatatactgctatatcagtaaattatattttatgtattatatacaagttatttacataatatatttactgatatatttactgatactgattttttatatttactgattttatatttatatttatatttactggtactttaacatgtcatatgtttttctacagtaatactttaacaactgtatagtgtttcattatatgtttcacagtttaaggttattgttttgtataaaacaaataataaagttattgaacgtataaaatattcattcaatttgtgtctaattttttgttcttaaaggtgcttaagattttttgtgtatatgtatgattatttacttagctctctggaaagttgaattgctgggttaaaggaacttatatttttaagtcaaattgccttgcagaaaacttgcaccaatttaaattcccacttacagtgtatgaaattgtttcgtaaatgtagggcattggaaattcctcttttaaaatataattgccaatttaggaagtgaaaatacaggtgtgtcatgctttaatttaatttgtatttatttaattatcagtaagttgaacttttttattggccaactgtttgcatttcctttcttagaattttttaatgttacttcttattgaaagaatatgtaaacatatatttattctgttttttagctcacttaaaagggaaatgatttttcccgattagtttttaaatttgtattttaatgcttaacaataaggtatagtgacagtgtctgaattaaacatttttctcaacatcagcctgtaggggtctctctaaatcaaatttttggaaatcaagacactgattttaagactctaaattgtctgtgacccaggggcagtcccggagagttcaagtcgaagtgaagtcagtgcaggaatctgggactttaccactgatggaagaatgtatactgtctgttggcattggatgtgtcaaagttagaccgctcagagcccccagaacacatgagaccttccatgtaagtttctatacctgttatgttcttcttgaaagacaaaatcagaccagagtgccttttggaacctgtacgaaactactttttatgaacatttctttccgtgaatctctttgtttacctttgctgtctttttttgtgtcttgcattttcatggaatcactgcatcggactgtattactggttttgccctggtgtaggtggcaagctgagggttaaaacgtctcagccttcatagattccacagtgcctgctagtgattaactcctcaacatcaccccacccctctggagaaaccccctactggcttgtaaagactatttgccagcaggtgtttgatttcccctggcgagtgggactataaacccagcagggagagcattgcactggttcccgaaaaggtcaaatgagtgtgcttcactcttctgtgagcggctccaacttcctgacaactgtaaaacccagagtgagggtgtgggtaggtgggagatgaaatagtatattaattcaattggaaaatataaattatgggtaaagagtcagattgtttagcgtagcctgattcttggataaatcaataattcagttctttgtaatgtgtattttcttttaggaggaagaggaagacatggacagctaccaggtaatttagcacctgttaatctcatctcaaataagcatgattaaagtatataattacacattcctggatctggctatactgttatttaaggattaaacaattcatactgatttttttgttgttttaaagtaaaacagagtagggaacattgagtgttgtttcataggctgtaaagtgtgttaggagtgggaaatcattcgtgactgagatccttttccaaacctggagctccccagccaggctccctgaagatccgtttctctggatcctcttccctggacattttctctcctgagtgagtccccactcgttgcccctattatagttgtctcattctgagctttagtcaacactaggtgttttgcatttttttgtttgtttttgtttttttttttgtgacagagtctcaccctgttgcccaggctggagtgcaatagcgccatctcggctcactgcaacttccctcctgccccagcctaccaagtagctgggattacaggtgcacgccaccatgcccagctaattttttgtatctttactagagacggggtttcacaatgttggcccggctggtcccgaattcctgaccttgtgatccacccgcctaggcttcccaaagtgttgggattacaggcatgagccaccgcgcccgactgaattttgcattttttaagctagatctttcttccctacttcctggaatcatacagcatttggaatcttttttttttttttcctttgttttcttttcctaacctcctgcaagactttgtttctttctgtgcagtttcatctgttagtcatcgttcaggactgtcagggctctttggagcctgattatgtcatccgtgtagtcactttcctggttttgcatcattctaatttgatagaaatgtctgctttcctataagtcactgataaaaacactgtatcagataggattaaatacagagtcctatggcacaacaatagagacttttttcaagctgacattaatcactgttcttcggatgtgatatttgagtcctctgtgatttcacttaagtagatgcatcgcacgtttctccatcttgtccacaacaatgtcataggctatttggttaagtgccctagtaaagcccagacacactatatctgcagcattccactgacctacccagtcttgtaaccttattagaaaaggaaatgaggtaagattgatattcatgtaggtgttgactggtaggttgttattctgttgatgacaacccctatcccctctttcccctacctgttgccccacaaaatgcataaaaacaagtgagagaagcatttacatgttgtcttcaagagcctgttttgacatatagaaagcagaagttacaaaagttgattcttctgattattctaaggtacataaattgaaagtggttttttgtttgttttgttttttggagacagagtcttgctctaccacccagaccatagtgcagtggagtgatcttggctcattgcaacctctgcctctcaggtttaagtaattctcttgcctcagcctcccaagtagttggcatgaaaggtgaacaccaccatgcccagctaatttttttttttttttttgggatggagttttgttcttgttgcccaggctggagtgccatggcacagtctcggctcattgcaacctctgcctcccgggttcaagcgattctcctgcctcagctcccaagtagctgggattacaggtacccgccaccacgcctggctaatttttgtatttttagtagggatggggtttcaccatgttggggaggctggtctcaaactcctgacctcaggttatctgcctgccttgacctcccaaagtgctggcattacagatgtgagccactgcgcctggccaattttttatattttgagtagagacagggtttcgctgtgttagccaggctggcctcaaactcccgtcctcaagtgattcacctgcctcagcctcccaaagtgctgggattacaagtgtgagccaccacgcccagccatattggaagattattgagtcctgtttatcggttttatccagcaaagagaccttttagaagatttttgttgcaggtgcttaaagctctacccccaagccattagaaataaaactggttctggatacctgagaatgccctttctgttctagaaaataatgctttaaattctgaaaatagctgttttgaaagatgggcgcagtcaactggtggtagcaataaagaaattattgtatactaccttacctttccaaggcatagtagagcaaggtaagatagagcatcagtttcagatagattatcttgacattacattgaatatgattttccttgcttgcttccaggatcgagatttagagagacttcgtagaaaatggctaaatgcattaacaaaacgtcaggagtacttggatcaacaattgcaaaagcttgtcagtaaacgtggtaggaaaaacaaatagaatatttttctcccctgcaaatcaatgcataattaattattctccctttgtagccacatcagttaagaaccagatgaacacatcagtaatggggatggcaggagcagatgagtgttactctttgtttatgtcatatcctttatccagctgtcgtatcttggtggaggtcttcctcccaccccctacaaagaaagagcaaatacagtgcacaaagcatacatggtttgtcaaagataacataaaggaaggtggtaacttttcttatccaaagggctcgagtcctctgactctggaccagtcactcctgtgcggtccctctgtaggcctcccaggaactgaagatggcctctctgcaggagcccatctgacctctctagctgtgggttagtttttatcactggggagcacttgtgagctaataattgaaatataggcaaatccagtctttactcaggacaaaaagataaatggcaagtgaagttttgtcattgaatcctcattctcgatgttctagataaaacagaggatgatgctgaccgtgaagcgcagcttctggagatgcggttgaccctaactgaggagaggaacgcggtgatggtcccctctgctggcagtggtattccaggggccccagcagaatggtatgaaccctgtggtgcgtcttgtgaggtctgaacgctcaccaagccacttgcttttagcttgaattttgcgtgtgctacggttaatggaagagtcaatagcatggggggaaatgttgtttaaattaaaggaactgttaaattattttcatgagttgaataactatggcctaaaactgttttattaaataatgttgttattggccaaagtcattaagatttctgagaacttaaatcaatatttaataccactgcacttagcattaagaaaatagttaatatgttaattacttgggtcattcccttagaagactgttcggtcataagaaaattgcatctccacgcgattttggttttggtgctggcttaaactgtactgtcagcaaatgttctgtgctacgttatagaaattaaaaatagtaaatttagccagaggaagcccttaagtatatcattttataagaaagtaggtttaaacaagagaacttcactacaaacaggtagtgtcttataaggctaagttcaaatgtcagggtatgaagcagcagctacagtggaggctttgtggcctctctgattctggattagagtaaaatcagggccagggttattactgctttgccctgtaacagccctgaatgccattaaggctgtgttcctacgtgcatgccactgagaaagtaacctgaggcagatgccatttgttcttcccgttttaggaccccagtacctgggatggagacacacattcctgttatattcctggacttaaatggtaagttaggaggtgttttctgaaggcttacctctgaaaatttagtgcctacataacatgtagattccaaccaagtgcatcgtgaggcaattctgtccccctaaggctagagccagtttgacgtgtgtccatgtctcctggttgcagacggactgatttgtgtgtcatagtctcatgtttatgacaataataggcgtgcttcaccatactcctcacctctcatccctgcagctcacggtgccatgtggatgctctgttctcctggtgttaggatggtagcagtgtttttctgcactaaaaatattttctaatttatttatttatttatttattttttgagacagagtcttgatctgtcacccaggctggagtgcagtggtgtgatctcggctcactgcaacctccacctccccggttcaagcggttctcctgcctcagcttcctgagtagctgggattacaggcttgtgccaccacgcccggctaattttttgtatttttagtagagacggggtttcaccatgttagccaggatggtctcgatctcctgacctcgtgatccgccctccttggcctcccaaagtgctgggattacaggcgtgagccactgcgcccggcttcttctttaactcttggggaaagacttctctctggaaaggacaaataactagcgatacttatgaagcatgtttccttcttgtggtgttttcttagcattatctaataaatatctcactttttctatgagttcttgtgccattcatccctgtattacctgtttaaaaaaaaaaaactgcgaaaattttctcccatgttgtaggttgcctgttcactctgatggtagtttcttttgctgtgcagaagctctttagtttaattagatcccatttgtcaattttgtcttttgttgccattgcttttggtgttttggacatgaagtccttgcccacgcctatgtcctgaatggtaatgcctaggttttcttctagggtttttatggttttaggtttaacgtttaaatctttaatccatcttgaattgatttttgtataaggtgtaaggaagggatccagtttcagctttctacatatggctagccagttttcccagcaccatttattaaatagggaatcctttccccattgcttgtttttctcaggtttgtcaaagatcagatagttgtagatatgcggcattatttctgagggctctgttctgttccattgatctatatctctgttttggtaccagtaccatgctgttttggttactgtagccttgtagtatagtttgaagtcaggtagtgtgatgcctccagctttgttcttttggcttaggattgacttggcaatgcgggctcttttttggttccatatgaactttaaagtagttttttccaattctgtgaagaaagtcattggtagcttgatggggatggcattgaatctgtaaattaccttgggcagtatggccattttcacgatttcgcaacctactcatctgacaaagggctaatatccagaatctacaatgaactcaaacaaatttacaagaaaaaaacaaacaaccccatcaaaaagtgggcgaaggacatgaacagacacttctcaaaagaagacatttatgcagccaaaaaacacatgaagaaatgctcatcatcactggccatcagagaaatgcaaatcaaaaccactatgagatatcatctcacaccagttagaatggcaatcattaaaaagtcaggaaacaacaggtgctggagaggatgcggagaaataggaacacttttacactgttggtgggactgtaaactagttcaaccattgtggaagtcagtgtggcgattcctcagggatctagaactagaaataccatttgacccagccatcccattactgggtatatacccaaatgagtataaatcatgctgctctaaagacacatgcacacgtatgtttattgcggcactattcacaatagcaaagacttggaaccaacccaaatgtccaacaatgatagactggattaagaaaatgtggcacatatacaccatggaatactatgcagccataaaaaatgatgagttcatgtcctttgtagggacatggatgaaattggaaaccatcattctcagtaaactatcgcaagaacaaaaaaccaaacaccgcatattctcactcataggtgggaattgaacaatgagatcacatggacacaggaaggggaatatcacactctggggactgtggtggggtcgggggaggggggagggatagcattgggagatatacctaatgctagatgacacgttagtgggtgcagcgcaccagcatggcacatgtatacatatgtaactaacctgcacaatgtgcacatgtaccctaaaacttagagtataataaaaaaaaaaaaaaaaaaaaaactgtcatttttctgtttcccactcaccaccatgtaaaatattttgggcctggatacgttttacatatactctgccgctaggagttctgcctgtaggagggaaaatagaaaatggaagagtagattaaggatctaaaaataagttagaagtcagcagttaaattcctaacacatctgcagaactatgtattaacgttaactctccttaatagatgagtgtggatgtcctccgtggttttcttccacctagctgacagcgagatgcagtctctgaggcatttaggatctcctgccacttagcttatttaaatggaagatttttctatgcatagagttagagaataataccgaataatacagccactgtctgtttgcttgatggggtggaaggtgtttgtttttaaatgtttgccacaagtccttatcctgctgtggtgttctgaacttggcgcctgagggtgattctggcctgttcttctgttaggcttcctacgtaggtgaggtgcttgtatttgggtgcaggcaggcatatgcataagaaagtgaaagacaataagcttaaggaagacgtggtagtctgggcatttgaggggatcatcaggactttggtcagcatggtacatgttctcggtccccccatgcccacctcctagaaaaggaactttggatgtctgcccacgagctccaggtgaaggggagtggggagggccaggctcgggcctgaggaaccagggggccatggtgcagtccttccatttccagcccatgcagccagtggaaccttctggtgaatgttgctgtcaggtgcctggaatcacccttgctcgtttctgacccttcagtgcactaaatggtacggaatttgtgttataacccggtcactgacattgatgagatgaccttgggtaacctcttaggtatcttggtttcatttgccttccctataaaataaggcataagtgtagcagattggatgagatcattttttgaggcactttcttatcttgaagatctgtgaacttttaagtggtcatcttcagtgtcatgtaagatttcagagcaaaaagcaaatgaaatttgaagcagaagaattgtaataatcacattgaaatttagctggtaggggttatccttgaaaatgatctcagtatttaatggaacttctttgcttttagctgatgatttcagctctcaggataatcttgatgacccagaagctggtggatgggatgcgaccttgactggggaagaagaagaggagttctttgaattgcagattgtgaagcagcatgatggggaggtaaggaaagcctaacttgggatggtcagatgaaaagtggtttccttaacctctcctcgagctttttgaaacaataaggcaatcatgccagtactttacatttctcaaaatacataaagcaaaacctttcatcatgacttccagaagaatggagcttgaacatcatattacatccattcaccttttccttcctttcctggtaacttgtactgagcttgtgtgagcagttcagatcagcagcggtcaggagcttgaggctctctctgttcctcaaccagtgagagatggaagcaggggctgcggaagtgcgtggaggtaaaatggcaccaggtttgggatttgctttgggatttttttgttttgtttttgtttttagatggagtcttgctctgtcacccaggctggagtacagtggcaggatcttggctcactgcagcctctgcctcccgggttcaagtgattctcctgcctcagcctcccgagcagctgggattataagtgtgcgccaccatgcctggctaattttttttttttttttttagtagagatggggtttcaccatgttggccaagctggtcttcaactcctgaccggaagtgatcgcctgccttggcctcccaaagtgctgggattacaggtgtgagccactgcgcctggctgggatttgctttgaaatcattttgtaaggactttttaattttttttttattgagatggagtcttgctctgttgcccaggctggagcgcaatggtgcgatctcagctcactgcaatctctgcctcctgggttcaagtgatcctcttgcctcaatctcccaagtagctgtgagtacaggcacatgccatcacacctggctaatttttgtatttttagtagagatggggtttcaccatgttggtcaggctggtctcaaactcctgacctcaagtgatctacttgccttggcttcgcaaagtgctgggatgacagacatgagccaccgcgcctggccaggatttattaaaaaggaaaagaataggtgaaagcagtgtggtgacatcttgattttcatggttgaatctgagtgatgggtatctcacgggagtttattttctaattttgagtatgtttgaaaaattatgaaatatattcaggaaggaaagctgatatgtgatatttgaggacacattattacttaatagtgtccctaagaagcgaaacttgagtcttgacagtgaggagtcagtccgacacacacagcggctatgcattctgtagaatagtgggccggcacccttccagttcagcagggtcaagcgtgacaaggaagggccaaggagctattgcagattagagtagactagagaaacgtgacaactaaaggcagtgtgtggttccgggatggggaaattgaaaaatttgaataagggattttatattaaataatagtgtattcctgttaaatttcctagatattactttcaacttacttgaaagtggtttagcaaaagtaataatgtgtgtgtgtgagttgtgagaaagagaagcaaaagtggccaaatggtagcagttggtgcgtcgggatgaaaggggtacaaatcactcgactgaatttttgcaacttttcttgacatttgagcattttttaatacaaattttaaaagtaagccagccaggatcatcatgctctatacttttcaggctaaggtgattgtggccacactgtcacactccattgtcttttcagggcagctgtcatagtagaactttgctggtgactggcatgtgccctttcagcctgagccaaggtggtttccttgaaagagttttcatgtttctggagaagagagaaacctgtttcctctctgtcttctctccaggtgaaagcagaagcctcctgggactccgcggtgcatggctgccctcagctcagcaggggcacgcccgtggacgagcggttgttcctgatcgtgcgcgtgacggtccagctcagccaccctgctgacatgcaactggtgttacgcaagagaatctgtgtcaatgttcacggccgccaggttagtcttcagtggaagaaacgactctaaccacagttgcgacctgagggtagggccgtgcagtgcttgctgttaaccttctgtccaaacaggctcccggaagcactgagcttttcttttccaggtgactgctgctgtcctgtacccatgcttgcttcaagcctcagatgtgtcacttgctcctggacagtatttttacactgaatctttcttagggcagattcacaaattatggttattcttttgggtaccacacaaccctgtcaagggcaaggtctgtggtttggttgttgccttttcatctgggccctgtcaaatgaggagtttccctcttactctgctctttccagacttttttttttaagatagagtcttgctctgttgctcaggctggagtacagtgatgcgatcatagctcactgcagccatcgtctcctgggctcaggtgatccttccatctcagcctccccggtagctgggaccacagacgtgtgccaccacatccggctaattttttgtattccttatggagacggggtctcgccatgctgccagggtgcgttccagaccttttacctcttgcagtctttgatttgtatatttggctttgggataaaaaggtgaataagaaatgagcccagtgcagtggcgcacgcctgctctcccagtaactcaggaggctgaggcagcaggattacttgagcctaggagtttgagtccagtctgggcgatgcatctcaaaaaagaaacaaaaagaagtctgtgtccttaaagagccaagttgatttgtgtaggtagatacgtaacaggcaactgctctcggcctgagctgagcacgtggtgcaggtcctcatcacttgtggtgagaatgcaggtaagagaaggaagaattcagccccagggagtcggggtggtgggggcgcttcagagaggagggcagcgtttgaactgggacttagagaggaggggcattggccaggcatagtaggaggagatgcagttccgtggacaggaggaaatacacatgcagagagagtggggagggcagggcaggacggggcaggatcggggaccgcgaggagctccatgtgctgggggtcctgcctgtgccaaggagcatggctctcacatagttgcagctggattatgaaggtccatgtgccatatgaaggggtttagtacaaaacttctaggtaagaatttaaggccaggtgtggtggcttatgcctgtaatcccaacactttgggaggccgaggcaggtggctcacctgaggtcgggagtttgagaccagcctgaccaacatggagaaaccctgtctctactaaaactacaaaattagctgggtgtggtggtgggtgcctgcaatctcagctactcaggaggctgaggcaagagaattgcttaaacccgggaggcggaggttgcggtgagccaagattgcaccgttgcactccagcctgggcaacaagagtgaaactctgtctcaaaaaaaaaaaaaaaaattctttttttttactggttttgcaaatataaagatttgggagattgcgtctggggatccttttaactgtcttatctcccttttttgaggcattctcaatacactgactaaaaccagtacagatgaaaatcttttcatttaaaagagcacagtcatggttgacagactcctagatgtaatctccacccctaaaaattaatctttagttctaaatgtcacactgatatcaatctttgaaatgaagactggcggtaatgccattaaaattgcagctctttagcttggcaatccaacatcaataaaatccaggtcacggggttagctatagatgtatacggtatgcacccattcactctctctgtcttccttttctcatgagtctgtgagggtttgaaaaagacacactgctcatgaggagcattttgaagagcgattttccatttcggaattagacatcctggttgccaggccctgggactgacctggcacaaccaccggccctacagggtccttgacagaaaaggtacattgtatagtcgccgcatgttgcttggtttttgtttctattgtagggacaataggttgccatatttttctttttcctggttgaaatgatgtggaagtatttttaaggcatgccattttctctctcaatttcagatatttcattcctaagaatcgtcatgtggaaggctctcttctttataacaagaataggaccttccacatgaccctaatacacacacgtcagcttcactaattccatacaaatggaaaaccaaaaggtaggataatagtagcatctacatctcccttcaccacccctaaggacagtgatctctataccttgacttgtgtaattagccttggctcagcactgcaaggctaaagttaagggagagaattaatgacataaatggtctctctgcattctgagatgctatattcttttaaaaatgtaaagatcattgaatatgaaataaattatcattaggtaggtttgtgaaatgatgtatgtctaagaccaaatagcttggctttgctcttttcttgggggcttcacatgtttctgccattcctgttgcatggggtgaaagctcggtgcccatttcatgtgctctcccctttacctttgttccctgatggtattctgctctcatccctgctctcttcaacctctgcagggtgttcagtcttaacagcatcttgaaatgagtcatctatgcattaattcaacagttcaattcctaactgtgcaaagagcgcagtcagcataaacaatgaccgtgcactcttaaatcattcctcataacgatcttgctttggtcaagaatttaatgcctggacttgtcaatattcatggtacgagatgtccatcgtgctggggagaaaaaaagtgtaagcatcaccagtcgttgcttccatcttagttagaaggtcattttattgtatggaagtcaacaagcttatatttctgtagcattgaagcaccgttcatccagatgcctactgccagtttacagacttggtggtgtatacttttcctatgttgggtgtaggacctgtcatacatggtgggcatctaataagttggtttcgtaccataggacaacgatgaagaaaccgtacttggtgatttcacttgcttatgttggaaacctgctctgttttcttttggttagaatgaaccagtattttccatgctgtcttttgttaatgtaaactcagtttttcaggtgggaaaccatatcttctattttgtttttctctagggttttgcacagagtctcctaaaaaagatgtctcatcgaagttctattcctggctgtggagtgacttttgaaattgtctccaatattccagaggtgaaggatatacaatttaaatttactaaaaataaacacttaaaaagagccaactccctgaaaagtgacctacccatgacatacatatgaagtgaaagtgtatgtttagggaagctatagatttttagaggaattttctaatatcaattcatagtaaaatgtacttgtggctttaaaagttctagttttagtattttgttgaagaactttcttttgaaaagcaaatcaacaccttcttacgcagaaggtgacagaagagaaacatattgtacccaggaagggaggcagcgtagcatagagattccagttggatcctgaagtcaaacagaaatcttgtttctgtcacttattagcagagtgaacttgcgtaaattactctgagcccatattttttttttcttgtcaaatggggttagtaatatctttgcacaaagtgtttttaaggatcaaatgagacaatgtgtaccaattgttgtgcgtgtgctagagaacatgttattgctactatcgttgttactatgattattattttattagtactattattatttctctttctgaactaattgagatattcagaggattcagagaagcagagcttaaatttatccctggtacaagcttgatggaagatgtggcttatctgtacttcctgataggtgattcgtgaattagacatgtattcattcacccaggtgccagcacagctgggaaatggggcatcccttgcagggccaggagaagtgagggtcctaagggaaggactctgtgaaaagagaaaattccttctcccaccctcaccctcaaagaggggatgtgggcaagggggtggagatttcacttcctcggggttggagaagtgggggtgtgagacatcagaagacgcccctcataccatgccatcaacaccagcaccagttcccgtcatttcagggcttaggatttgcccactgacactgttgagtatttgaacaataggtgaacagtgtatattttaatacagaaatcagcttttttttttttttttttttgagactgagtctcgctctgtcaccaggttggagtgcagtggtgtgatcttggctcactgcaacctccgactcccgggttcaagtgattctcctgcctcagcctccctagtagctgggattacaggcacgtgccaccacgcccagctaatttttgtattttaagtagagacgggatttcaccacgttggccaggatgctctcagtctcctgacctcgtgatccgcccgtgctgggattacaggcgtgagccactatgcctggccggagatcagcttttggaaaagaaaaatattacatggtacttaggctttcttttagatatcttgtgttgcaaaatgcttttgcctctcaagtcatgttggatagtaactagttctttcctggatctttgaagtgttagacttgcatagtaaatattaaccatctaattatttaatttggagtttgcagaacatttaaaaattaagcctgtttgcagagttagtcgttgcacggtcttgggcctgtaatagattgctctgtgtgcttcattcactcttgtttgtaagatttaaaacaagtatacatctatgtctagctagagacttactgtttactctgtgtatctaaacattttctatattttccagttgtttcagatcttgtctctgtaaatcgcttgaatgcagttgagaaacggtgatggctgtaggaaactgctttcatttcttccttttctctctccatttcccctcccttttccttctctcccacttagtttcttatgccttttaaaaaaagtgcttttattctccaggcgatagggttttaaaaggaaagaaatataggggggatcagcttgaagataaacataacctcatgtgaatttgctgttagttagctaaacatccaagctggcaaacattgtttccacattatcaaatcctgatgataaaggcaaaatgaaacataaagctgattgtgtaaagactagatctaaaaacaaaataaaaagatcccttaataggcaagtttcatcatgaaaaagccccaaaagttgcttgggttctgtatcacagaagccattagggcatcatggccaaaagaagtggcccaggccagagacaatttctttctccttataaaattaggataatatctgttccctccagaccctgaaagtattctgtgttggggtgaaaagaataccctaccaggagacgggagacctaagttctagttttgactcttgctaattgtgtggtcttcctcttgtcatctaggaaatgaggatgattccttcttttcatggttattacgaggctcagatgaattactgtacaagacaaaagtttttgtgaacttaagccgtcttacaaatcctcccacattttatctgttctaagactcatttaaatttttaaaagtatctttgaagtagaatgtgtcttataattgatggtatcttaaaattaacagagtttgttttcccctcaatcttgtttaaaatattttgtcttacagttgatggcatttaagatgcagtggcatatggttatacattttgtagttttggcattattataagaaatttacaagtgaataaagtatctgatttttcctgagaacagtaatttgttaagagcccactttgcttgaaataactaaatacattaataaagcctctttctgactgtgcacctcccatttgtatgcacagccagctcacatcccaggattggggatgggctataccagaaagctcagtgtaggagaacttacctagataacctctccttggtcggctccaggcctttggccactgccactcgagcagaagattgaaccaattctagaagctgccatgttctgaatatgtcagctaccctgggctgcttggtggcaggcgctgaaaccctatgtccactatcttctcccttccgggcctcctccctgggaggcagtttgattcctacgctgtgtagcagtcaccccagcccctcttccctttctctgtccctcaggagttccagggcgggggtaatgttcctgaattgtttttacggtggttacatttctggctagtcgacaaaatcctttctaaccagtcatgggttttttgtagtgggaatgtagtagagaacagttttgttgagaatgcgctgtgtttcagctgtgctgtgtttaaattaaccagcctttcaagtggacctagtcacctaatcaccttttcattatttccttggaaaaatgctttggcgttccaaagctgactttaaaatggaattttagaatacgttctgtgtgtctgtgtgtgcacgcgtgtacgtgtgtgtgtgtacatcaagaagcttttataatgtataactttccactgctcaggatgcccagggagtggaagaacgggaagcattagcaagaatggcagccaatgttgaaaacccagcttctgctgactcggaggcttatattgaaaagtacctcaggagcgtgctggctgtagaaaacctcctgactttagatcgtctgcgccaggttagccaaccgcatggatagggcgggcagcagaggccctgatgcaggctgagtctgtgtttgactctgtaattcacagtgttgttgcacctaacatttgaagagttcactctaatgaactttgaataatccagagtgattgtaattgggtcattctgtcttacaaagtaacagcctttatttaattttaaaagtctgtttatgggtacatagtagatgtatgtatttatggagctcatgtgctgttttgatacaggcatgcagtacgtaataatcacgtaacagcattgtttaaatagctaggaatgtctgtatagatgggggttgcaagtctgctgtacatggtgttgcttttgcagtgtgtctcttacatgtctttttcctctgtatgttttctgattcacaggaagttgcagtgaaggaacagttaacaggaaaaggaaagttgagcaggaggagtatcagttctccaaatgtgaacagagtgagtgtgtggaaccaagctctgtgctgtgcctgggacttctctcctctcctcttttcttgggtaactcttctccacccgtcaaaccccatctccgaaacccttcccttgccaggactgatgtcagggcccctggtctccaccccactgggtctgtgcacctctgcccctgttcctactaatattataggggaagtagcagttaagtacctttcaggtgtttcttatcttccgatcaccactgcctagcatagactgaggtgttcagtgaatgtttgtggaactaaacccaaactagccacgggcctatggcaagccaatgccattttctgggcttagattatttttaagttgaggaggagtctggaccaggttcacaaaccagttgttcacaagacagccagggtggtgtccatgcgtcagatacatggggttgtttcataacagtggcttcagtttattgttgtttttaaaaacctatatataatttatgtgcatattgaacatgggaataatccttcacaaagaaataggctcttggccgcttgattactcttttcctcatttttgatgaagatgtggatatgaaaaatgatactttcctcctaacttcacaccaagagaagttacagcacaagcattgtgagaaagggcagctgaccttggccttagtgtctgagagagaagagagagtgataggaggagtttcacgctggatgccaccaaccatctcagacatttaggaagatcactttaactcaaggcggataacgtctcatttattcagaaaatgatatattaaaatacactgacatatgcagagattcagtgtttgggatctgatagtttaaatagtttgtgagtttatttacagttgctacagataccaagagaaaggaatcataagctcaggccatggttagataacaagtaacctggtatctttcacacagaagggctcacccaacgcgacatctcttgttcaggtccagccggttgtgacctcagtgtgaactgaatatccagatcttatagaaatctctcatctgaaaattgttcataaccaattcaatgtttgtaatgtcccaaagaccactagtgtgcagccttcgtcatgacaacctctctgctgccacccaactttgacgttcggttgactgggttggcaaagactggcgttgcctagaccacgtgtatgctctgatgcataaataactaacccccctttctttcttcttcagttgtctggaagccgacaagatctcattccatcatacagtctaggcagcaacaaggtaggtgttttaactatttctatcagtgttttaagtcccatttcccattcagctttcatcttctcaaatctcaggttatttttgcaagccagaatttcctctactcatctgtattatgtgaaacttacttgaaagtgttttagagttcatttcttttaatttgccaattaaaataaggtttattagactctgactactggggttgaaaaacaatttttctgctaaagctcgtacttctgtctaaatttccttcctatttctgtcagaaaagaaacttcaggctgggcgcagtggctcacgtatgtaatcccagcactttgggaggccaaggagggcggatcacgaggtcaggagatcgagaccatcctggctaacatggtgaaacccgtctctactaaaaatacaaaaaattagccgggcgtaggtggcacaagcctgtaatcccagctactcaggaagctgaggcaggagaaccgcttgaaccggggaggtggaggttgcagtgagccgagatcacaccactgcactccagcctgggtgacagatcaagactctgtctcaaaaaataaataaataaataaataaattagaaaatatttttagtgcagaaaaacactgctaccatcctaacaccaggagaacagagcatccacatggcaccgtgagctgcagggatgagaggtgaggagtatggtgaagcacgcctattattgtcataaacatgagactatgacacacaaatcagtccgtctgcaaccaggnnnnnnnnnnnnnnnnnnnnnnnnnnnnnnnnnnnnnnnnnnnnnnnnnnnnnnnnnnnnnnnnnnnnnnnnnnnnnnnnnnnnnnnnnnnnnnnnnnnnnnnnnnnnnnnnnnnnnnnnnnnnnnnnnnnnnnnnnnnnnnnnnnnnnnnnnnnnnnnnnnnnnnnnnnnnnnnnnnnnnnnnnnnnnnnnnnnnnnnnnnnnnnnnnnnnnnnnnnnnnnnnnnnnnnnnnnnnnnnnnnnnnnnnnnnnnnnnnnnnnnnnnnnnnnnnnnnnnnnnnnnnnnnnnnnnnnnnnnnnnnnnnnnnnnnnnnnnnnnnnnnnnnnnnnnnnnnnnnnnnnnnnnnnnnnnnnnnnnnnnnnnnnnnnnnnnnnnnnnnnnnnnnnnnnnnnnnnnnnnnnnnnnnnnnnnnnnnnnnnnnnnnnnnnnnnnnnnnnnnnnnnnnnnnnnnnnnnnnnnnnnnnnnnnnnnnnnnnnnnnnnnnnnnnnnnnnnnnnnnnnnnnnnnnnnnnnnnnnnnnnnnnnnnnnnnnnnnnnnnnnnnnnnnnnnnnnnnnnnnnnnnnnnnnnnnnnnnnnnnnnnnnnnnnnnnnnnnnnnnnnnnnnnnnnnnnnnnnnnnnnnnnnnnnnnnnnnnnnnnnnnnnnnnnnnnnnnnnnnnnnnnnnnnnnnnnnnnnnnnnnnnnnnnnnnnnnnnnnnnnnnnnnnnnnnnnnnnnnnnnnnnnnnnnnnnnnnnnnnnnnnnnnnnnnnnnnnnnnnnnnnnnnnnnnnnnnnnnnnnnnnnnnnnnnnnnnnnnnnnnnnnnnnnnnnnnnnnnnnnnnnnnnnnnnnnnnnnnnnnnnnnnnnnnnnnnnnnnnnnnnnnnnnnnnnnnnnnnnnnnnnnnnnnnnnnnnnnnnnnnnnnnnnnnnnnnnnnnnnnnnnnnnnnnnnnnnnnnnnnnnnnnnnnnnnnnnnnnnnnnnnnnnnnnnnnnnnnnnnnnnnnnnnnnnnnnnnnnnnnnnnnnnnnnnnnnnnnnnnnnnnnnnnnnnnnnnnnnnnnnnnnnnnnnnnnnnnnnnnnnnnnnnnnnnnnnnnnnnnnnnnnnnnnnnnnnnnnnnnnnnnnnnnnnnnnnnnnnnnnnnnnnnnnnnnnnnnnnnnnnnnnnnnnnnnnnnnnnnnnnnnnnnnnnnnnnnnnnnnnnnnnnnnnnnnnnnnnnnnnnnnnnnnnnnnnnnnnnnnnnnnnnnnnnnnnnnnnnnnnnnnnnnnnnnnnnnnnnnnnnnnnnnnnnnnnnnnnnnnnnnnnnnnnnnnnnnnnnnnnnnnnnnnnnnnnnnnnnnnnnnnnnnnnnnnnnnnnnnnnnnnnnnnnnnnnnnnnnnnnnnnnnnnnnnnnnnnnnnnnnnnnnnnnnnnnnnnnnnnnnnnnnnnnnnnnnnnnnnnnnnnnnnnnnnnnnnnnnnnnnnnnnnnnnnnnnnnnnnnnnnnnnnnnnnnnnnnnnnnnnnnnnnnnnnnnnnnnnnnnnnnnnnnnnnnnnnnnnnnnnnnnnnnnnnnnnnnnnnnnnnnnnnnnnnnnnnnnnnnnnnnnnnnnnnnnnnnnnnnnnnnnnnnnnnnnnnnnnnnnnnnnnnnnnnnnnnnnnnnnnnnnnnnnnnnnnnnnnnnnnnnnnnnnnnnnnnnnnnnnnnnnnnnnnnnnnnnnnnnnnnnnnnnnnnnnnnnnnnnnnnnnnnnnnnnnnnnnnnnnnnnnnnnnnnnnnnnnnnnnnnnnnnnnnnnnnnnnnnnnnnnnnnnnnnnnnnnnnnnnnnnnnnnnnnnnnnnnnnnnnnnnnnnnnnnnnnnnnnnnnnnnnnnnnnnnnnnnnnnnnnnnnnnnnnnnnnnnnnnnnnnnnnnnnnnnnnnnnnnnnnnnnnnnnnnnnnnnnnnnnnnnnnnnnnnnnnnnnnnnnnnnnnnnnnnnnnnnnnnnnnnnnnnnnnnnnnnnnnnnnnnnnnnnnnnnnnnnnnnnnnnnnnnnnnnnnnnnnnnnnnnnnnnnnnnnnnnnnnnnnnnnnnnnnnnnnnnnnnnnnnnnnnnnnnnnnnnnnnnnnnnnnnnnnnnnnnnnnnnnnnnnnnnnnnnnnnnnnnnnnnnnnnnnnnnnnnnnnnnnnnnnnnnnnnnnnnnnnnnnnnnnnnnnnnnnnnnnnnnnnnnnnnnnnnnnnnnnnnnnnnnnnnnnnnnnnnnnnnnnnnnnnnnnnnnnnnnnnnnnnngctgggtgtggtgccaggcgcctgtaatcccagctactcggaaggctgaggcaggagaatttcttgaacccgggaggcggaagttgcagtgagccaagatcgtgccactgcactccagcctgggcgacagagcgagactctgtctcaaaaaaaaaaaaaaaaaaaaaaaaaaaaccaaacaaactctgcccagtttccttattttaaatggatacaataacagaaaataatagaatctacttcaaagaaaagtactgtccctcacgtgcaccagaaaaataggacaaaggagcagagatgctattagaacccagccagggcatggcagagggcatggaccccccactggcttcacacaggactcacaggaggctgcagggcagaggccattcttaagcctccccctgaaggatgacactgaggtccacacaggcaggaaaggagctgaaggaacactgtgagcagaaggatctgtgtgaacgaaggcttggggatgaaccaggttgctgtgttcttgacagtacatgcagtgggagtcaagctcagagtgtacaggccgggcgcggtggctcatgcttgtaatctcagtagtttgggaggtccaggtgggaggatggcttgagcccagcagtttgagaccagcctgggcaacatagggagtccctttctctgcaaaaaaaaatttaaaaaattagcgaggcaatatggcttatgcttgtaatcccagctattcgaggctgaggcaggggaggatcacttgagcccgggagtttgaggccacagtgaactatgattgcaccattgcactccagcctgggtgacagagagagaccctgtcttccaaaaaaaaaaaggaaaaaaaaccatcctggctaacacagtgaaaccccatctctactaaaaatacagaaaattagccgggcgaggtggtgggcacctgtagtcccagctactcgggaggctgaggcaagagaatggcgtgaaccacggggggcggagcctgcagtgagccgagatcgcgccactgcactccagcctgggcgacagcgagactctgtctcaaaaaaaataaaaaataaaaaaaagaaaaagtagagggagtctgtgggcagaacccagagaggcggggccttatttttggcatcttgacgtcatgtcccaaggaatggcaggggagttggacaccatggaaggacttgaaaacagagcagtaatatgaccacatgtgaattaaaaagtttgttttaatggtccagctgagccccaccccgtccctagctgtggtgtgtaattttgcattaggaaactatatggtacaaatgtatgcagttatcaatgcaaacgtggggaaaaatggttttgagttggagagtggagggaccggttaggggagaaatagccagagagatgacgagagacacagatgggttggagaggggtactctagaatcctgcagaggccaagtatgtgacgggctggagtgaggggacttgggtgacatcgggttttggacagcagtgtataggtccgagagatgaactatagggcaggcttggggaggaaatgattcagttccattttcgagggtctcaggtgtccgagttgaagccaggtttgggagcccgaggggatagtggggacagtgtggggcggggttggctggggagcgccgaggcagtggtgacacttagggccactgaggtgcactgaggtggcggcgccagggaggaatgaagacagggccaagggagtctcagaagtccaggggaggagtgttttaggaaggactccatccacatgcttcggagacagcatggggtgaggatggggggagaccatttcaggtgcaacgctgcagggctcattgtgtgcctgtgcaaggtgccttccgtgcagggctggggattagcaagacaaatcgtattaggcaagtaactgtgatgtctcacagttgtgttaacgcttctggaccttcctacttttcgttcttggttccttggggtccccgagtaacttagtgaggacgtgggaggcgagaggaaagtggttcggttctaaagaggaactcatagtttggtctaataatacttggaatgaggccagcctgctttccattcctctatttgtcgatgcccctacatatgaaaagtggaattgtttttgctgaactccaccaagattgaattgatgaactaattaatcttaaaaaatagttttgttaactattccaaatgcgaaattcaccatagggcctaaaataaatcactcttgggataagtctttcaattaaaaatataaaatatgatccctgatggaagtagtgtttctatttattgctatcgtgtgtttcatcattattgtacagatattttctctaggtataatgaaaccttagcaggctttttatgactgtctgccaagaccggctgaagttgaggtgcaggatgaatttcggcgtgtcgttggtctttccaccctggagtcagctgtgcattgaggtcttttgcaatgtgacaaatgctgtcaagacaaaatcattttttttgttattgttgttttacttgtttttttttttttttttgagacagagtctcactctttcgcccaggccggactgcagtggcgctatctcggctcactgcaagctccgcctcctgggttcaagccgttctcctgcctcagcctcccgagtagctgggactacaggcgcccgccaccgtgcctggctaattttttgtatttttagtagagacggggtttcatcatgttagccaggatggtctcgatctcctgacctcgtgatctgcctgccttggcttcccaaagtgctgggattacgggcgtgagccaccgcacctggccgacaaaatcatttttatttccaaagttattttaggagaaattttatttttaagaagtcaataaggttgtatgtttgtcatcttttgattggagtttttgaggaaattaagattagtcaatagcatgaacaaatacccagttagcagaattgaattttgtgttggctccatcgccttcctgaaagccgtgatggtttcacgcagccctgggaggagatgccaagcatgagtcactcctcttccagctgcagtgaaagctaccattggacccgaaatgtcactggcacttctcgttatttacctttttgtcactttcctgatcaaaaccagactcattcccagaaaacccaaagaatccgtatctggcagaggagcaggagtgggaaaaactgcatgggtccctggggaccaagtcaggccctccccggagcctccggcgttcttactttgtccactttgcccctgagcatggtgctgcctaccagtgacttcagtatcgactaggattttatctctttgagtctgccggtgaggacaaatgtgccctaatggcagtaaagctgggtaaggatccaaaacaaagccagcttccctctgtgtaactgtatcatggctgattctgaagtgtggtagacatgcaggatgttggagacagatcagagatttatctttttcgatttcaggtggaggggtgtagattactggaggagaagtaaaacagggatatcatactctttcacgtttagacctgagctattgagagagccagaggtttcctgcgaagtcctttttagtccatggtcctgagttcatctccctgtgaagtacattgaactgggttgcttcatttttctttttttttttttcttttttaatctaccccaacattttagtaaagggaggataactctaggacagctaagcatatacaacatattgggaagatagtcattgcgttgtccctggggaacagtgtgtgtagccggaccctgaaccacacttttcacctctgtcaagaggatggaggttgtagtgcaggagaaaaatcgagtgagtaattccagtggagtgtttccgcagagattcgtaggcgtcagctggaggagggaagcgcgtggtacccagtttagcatctgcattggttgctccctctgaagcagagcctgttccatcccagcgcgatttgaggtccctgtctcaggacagtgggatcagaataggtggggttgcggggggagcatgtgaggttcctcaaggttaagatgactgttcaggtagagggcagagtgagccgtgtctctgtttgtcacgctctgcagggctggcaggatctacgcattgtgtatctttcagtgttctcactttcagtatttgagtaaatgagatggagttactgctctgttctgattgggtagtgcctgctgggaagaactgcccctgaagccatcggggcctgggtgtgccttggggaagaggtggcacctccataatttgtcgttggcccaattctacgtcaagcagcccaggtgccgactccagatcagcggcttagttttcctgagggacagaccgcagccatatcagctaccaaacaaagaaaatctaaaatatgaaacaatactctcaaattaagtaagttgtcttcagaacagccatgtgtgagctcgccactgtacacaaagcaggtggcttttcttcctctgagaaactccatggagggctgatcttagtgttcagtcacctgatggtgatatccccgggtatacaaggccgcagcttcccagacagatcatgaaatttgaatgcaaaaattaacaaaacattcaagtatgtaaatcagcgtatgattcatggggatgccagcgctcctccgctgaagtatttcagagcttacgttctcgatgatcacgtgttgctctctcccttgttctccttgcttcctaatcaatcctgaccatcacaccatttttaaaaaggataccaagtgctgagagagttcctagggaaaagtggcattctctgaggtgcgcaggacccagatcacttagggcttattgatttttatgattagtacttaggtcgctgctaaaagcagatgggtttccaatacatttctgaaacctaagaggcccttcctccacaatccatcttcaagagcagtggagaactcactgtccccatttcgctgatcaggcaattagtaaagaaaacttgccaggcgcgttggctcacgcctgtaatctcagcactttgggaggccgaggcgggcggatcacctgaggtcaggagttcgagaccagtctgaccaacatggaggaaacaccccctccatctctactaaaaatacaaaattagccgggcatggtggcgcatgcctgtaatccgaactactcaggagtctaaggcaggagaatcgcttgaacccaggaggtggaggttgcggtgagccgagattgcgccaatgaaactcagtctcaaaaaaaaaaaacctcgagttaatcattaggattattcatctgtgcagcactagctcaaactcatattgcacacgattattaaactccagtggtaaagaagtcagtgattatcaggggatcaaagggaacttaaagcatttaaaagatttacatctcatctcttatcagttttagtacaagcaacatttggggtttatttcttccctagatagggctgaagttaaaagtgctttgatggtatcactatttttatggctcaccatgaattttggaatggtcttttaatctatcaactgatgaaatgtctttaatgggaatttacaaataagttgagaatacaataaaatttgataattcagagacttccatcattgagaatttgtaattatttgacttgggtttgactgtaatttatctttaatatctatttaaaatgagagatttggtaatatttactgttatgcactatatgtgagtcagtggaaacacagtctgggagtagagagaagagacaccctctgactatagagttgttcgtgggtttctgtggagaactgagtgaaaaagggtatcttgaggcaaaagagcagaagtggtctcaaagcagaaccgaagggagaattgcagaaggaatacgtctgtattctgtgggaggcaacaggatgcagagtagaaaacatgttaggacagagcttaatgggagactgtaaactgcagtatggaggggctgtccaaatgtgtgtgggggggtatgattattattgttggagaaattaataaaataagcaggatgacaagtagaagaaaagtgctgatcgggcatggtggctcacacctgtaatgccagtactttgggagaccaaggaaggaggattgcttgatgctgggagtttgagtatgggcaacatagtgacatcccgtctctacaaaagtagtaaaaagattagcctcatgtggtggcatgtagctgcagtccccactgctatggaggctgaggcgggagaattgcttgagtctaagagttagaggttacatgcgctatgatggcgcacccctgcactccagcctgggtgacagaaactctgtctcttaaaatagaaaaaaaaagtgctgatgtaatcaagcttatattcaaaggagctttagtaatatataacagttttttttcttgagtatctgtaatttttttttgtttggttaattgaataacttgaaacaaaattgccaattttgtctttactagggccggtgggaaagtcagcaggatgtatcccaaaccacagtttccagaggaatagctcctgcccccgccctctctgtttctccccaaaataaccattctccagatccaggtaagttatcttttcacttgtcaattactgtcagaaatctgagcatctttcagaaagtttaaattagaatttcctgccaggcagccactgttctgctagataatgtccatcgagttgtttcatttctcctcttaacaggttgagttccattggctctggaatgttggattgatcttgcattgctctgatatataccgcctgatcatgatgtgttagccgtacattgctggaatctctttgcacctcttttttaaggacttttgtgtatgtgctctatagtaaatatctgtaatgttttatcttctcatcttcatgtctttgttaggttttgttatgattgcattggcttcataaaacgacttgggaaatgtttctcctcattttttttttctgggagagtttatgtaagattagtattacctcttccttaaatgtttcatgaaattccgtagttacatgatccgggcctggaatcctctttgtggggagattttaaattatgacttgagtttctttttttttttttttttgagacagagtcttgctctgtcacccaggctggagtccagtagtgcaatctcggctcactgcaacctgcccctcccaggttcaagtgattctcctgcctcagccccccaagtagctgggattacaggcgcccaccaccacgcctggctaatttttgcatttttagtagagatggggtttcaccacgttggccaggctggtctcaaactcctgatcttaggtgatctgtctgcctcagcctcccaaagtgctgggattacaggcgtgagctactgcacccggcaagtttatttagtatgggaatatttagatctttgtgtctccttttgagtcacctatcataggttatatttttttcaaggagtttcttagtttatctagattattaagtttattttcataaacatcacttacttttttttttttttttttttgagatggagtctgactctgtcgcccaggctggagtgcagtggtgcgatctcggctcactgcaacctttgcctcctgggttcaagtgattctcctgcttcagcctcctaagtagctgggactgcaggcacgtgccaccatgccaagctaattttttgtatttttagtagagacggagtttcaccatgttagccaggttggtctctatctcctgaccttgtgatctgccggccttggcctcccaaagtgctgggattacaggcatgagccatcgcacctggccactttaccttattttttaaatacttataggatctcttgtgatgttccttctttttattctgatactgataatttgtattatctgttttgaatacttttctgacaggtttatcatatatattaatctcagaaccagtttttggctttttctattgcaattgattttttaaatttttctgcatttcacatattttggtatgttgtgctttcattttcattctattcagagtattttaaaatttccctctgattgcttctttgatccatgacttatcaactagcattaattcttttttatttttgggggtaatctggtatccagattgtgttctatcttggttaatattctatgtgcactattgtgtatggggacatgatgttctatgtatatctaattaggtcactgtggtttattgccttgttcaaatcctctggatctttgctgatttggtggaggcctattccatcagttcttgagagggcattagatatccaaatataattgtgaaaattatctgtgtttccctttataccagtttttacttcattcatttagaagctctgataattagcttctaattatttaagattgttatatcttcctgatataacacatttaagattgttatatcttcctgatagagtggcctatcatgaaatgtcccttttgtctctgggaatactcttaccttgaaatctctcttacctatcatttatatataactgcatcaaatttatttactgtttgcacgatgtatctttttcttggcttttaaaattttagcctgtgtttgtctttaaattaaaagcgattgccttgtagacaacatttggttgggtccagttatttccccctgaatctcatctcgtagttcctacccttcaatcggcatgcttcacgaacccttccattgcctcccattctggtccgccatatttttattggttttctgcttggccattctgttttttgtttcactgtaactccttatttaccttcttttgggttaataaacaaaaattagtatctcattttatttcctctttttgcttttttggacacctgtatttgtttgctaaagtctttgctcagaaaccctacttggcatccttaacttatcaaatcgcttagagttcatatgacgtcacccctcacctcacaaatacaggaaccatgcaacagtgtaagtcattgacctgttcctctgggcccctcattttgtactgttgtttcatcttctacatatataggtattcacacctcactttatgacgttattctttttgctttaaaatagccacctgtaggccgggtgcggtagctcccacctgtagccctagcactttgggaggcctaggtgtgggttagttgagaccagcctgggcaacatggcaaaaccccatctccacaaaaaaatacaaaaatcagctgagcgtggtggtacacacttgtagtccctctactcaggaggctgaagtgggagaattacctgaacctgggaggttgaggctgcagtgaggcacaattgcatcactgtactcaggtctaggcgacagagtgagatcctttctcaaaaaaaaaaaaaaaaaaaaaaagaaaagcttgggctgggtgcagtcgttacgcctgtaatcccagcactttgggaggccaaggcaggggggatcacctgaggtcaggagttcaagaccagcctggccaacatggggaaacccctgtctctactaaaaacacaaaaattagccaggtgtggtggcaggtacctgtagtcccagctcctccggaggctgaggcaggagaatcacttgaacctgggaggcagaggctgcagtgagccaagatcacgccatcgcactccagtctgggtgacagagtgagactctgtcttaaaaaaaaaaaaacaaaaaacaaaaaaaaacactacttgtcttttgagagaatacagaaaaaatggataatcttttatgttttgttttttgtttcgttttgttttgtttttttcagattatttctggcagtatccagtctttcctgaaggtcttattttaatctgattttatttctttttagcctgaagaatattctgtagttttgttttgttttgttttgtttttttgagatgaagttttgctcttgtcgcccaggctggagtgcagtggcctgatgttggctcaccacaacctctgcctcccgggtttaagtgattctcctgcctcagcctcccaagtagctgggattacaggcatgtgccaccacgcctggccaatttttgtatttttagtagagatggggtttctccatgttggtcaggctggtctcgaactccaggcctcaggtgatccacccgcctcggcctcccaaagtgctgggattacaggcgtgagccaccgcacccagcctagtatttcttaagagtacagtcctcctggagaaaaatgctctccttttttgaaagtatctttatttcactgttttgttttgttgttgttttaagaatattttcactggatagagaactctgagttggaggttttttcttttagcacttcaaagatgtttcctcatctccagctccttcttttctgctgagaattcagccatcatttgtcacctcccactcagtgtggtatctttgtttggttcacctactttcagaagtttctctttatctttgtggtaactgtactatgatttgcttagttatcattttcttagtatttaacttgcttatcaagttattggatccgtaaattgatgtttttcagcaatcgtgagaaatgtttagacattattcattaaaacttttcccccatccttttctctctgctctttctgagaatctaattactcataggttagattgtttaatattgtcctacaggtcacagaggctctgttcttttttttttttttaatctttttattttttctagttggataatttttttctgtgatttccagggctctgttaagcacatccagggaattttttcatttcagtcattgtttttttttcagttctagaatttccatttgctgctgcttttctagttttaatttctccgctgatgttcctggtctgtgcacttgtcaagactgtattctcctttgcatctttggacttggttaagaaagctgccttaaagtcgttgtctgttaaatccagtatctagacatctcatggtctatttttattgattcctttgttgaccgtgggtcatatttaatgttttaccaaatgtatttgtatatatccatgtgattcataccccagtcaaaatataggacattgacatgactccagttaattcccattccctgtggtcagccagtgttctgacgactacttctctagattacttctgcagtttcataaatggggccatatgatgtatgtcctttttgtgtctgtctcttttgcttaccatacgtgttaaattttcccagattgttgattgcattagtcatttattttttattggtgagaaatacttcacgaccatgcattgtgtttgttgaagaaactaggttcttgtagagtagactggcacagtaggccaggttcttgcacagcagattctgttcattcttacttttcctgttgtgttcccgtgagactgttgaaacgcaattctgtcccctgtattgcctgtgaactggtaggtagagctagatccttgattcgattcagctgatttgagaaggatgcatgtggtagggtgggtgggtgtggatgtgtggtcgggaggttggagacacataatgtctgatggtctcatttagtgatatgtgcggcctttgattcattactggctagatttttacttaatgagggattgtccttactctagaatgttagtttaatttgatacagaactctagattgtaatttttttcctcatctttgaaataattgtatatttttggatctttattcatcttaaccctattttattttctgtctcctctcttatttttctcatccttgtttttgccttgctgtaaataattggacttttctaaactgaggtatgatgtatctctcggctcggtatagccatctctttgcttttttatttttcagtggtcgccctcatgattacaatgtacatctttaactttttgccgtatacttacacttaatattctactgctttatgtaaaatgtagaaaccttacagctgtatccatccatttaccaactgaattgccagtaagtttggaatcctttcagggttagtgtggagaagagatctggggggagttgtgtgcatctgttgaggcaaatgtattccttaaggtgacttgcttgttcatttctaaatgttgtgtgaatacggctttttatcacttatgacttgggattagattttactataaattaatagggggaagaagtcttagtatatcataagtatacctgtctgtacctctgatcccagtctttggaaattaacagcaggtaagaacgtaagttgttcagggcgtctctccctgacttttaacaaacaactcaaacactaccctttacccttttcccaaaaggtcagtttcatcatcttccttcagtagttatgaaaaattagattgaataagacatagtccctgacttcaaagagcttaaagtctagacaaagagctatacatctgtgtcattggcagtgtgacttaaaaaccaatcccattttattctagggcagaagtgaatgcttgtgccaattagtgacaggatagaggtgaattactgttctgatgctgataggaacactgcatactagagcattttggcagcaccccagttactgctatttaattgaaaaagagacattactatgtttgagggaaattatgtaaactacaataatactgtgtttctctaatattttttaaggatacctttggtttttgttagatttgctgacaagtgatgtctgtcaaatgtacaggaaagaagatgtctatgtaattgtatttgttttatctttttcccctgtaatatgggcaggactcagtaaccttgcagcatcctacttgaatcctgtcaaatccttcgtgccgcaaatgccaaagctcctcaagtctctctttcccgtccgcgatgagaagaggggcaagcggccgtctcccctcgcacaccaggtaaaaagcaccgagaaaacagctgtgaacgtttttctaataaagcggtgctctgtgttgcgccaaagctggaggtggaggtgcggcctctgggttggggctaaactgggtttttaaacccagaaacagctgtcggtcttttctccgccactctcttcagagataacagagctgtttaaacttacggacacactccttcctttctgcttttaagaagtgccaaggacactgctaatgtgatgtatggtaataacacttagagcagcggtagtaaaatttatgaagtgcacttagcattgtttgtgtattgccaagtagaaaatgtaattctatttttattttttgatttcatttgttttttcaaacaattttatatcatgagtgcccttccctctcaacctctgttttctctgctgtggataacctgttctttcactgaaaagtgatcacctgtcttatatccttttctcttaaaactctttacccagctctagggtaagtgttagagcaaatgcgaaaaggttttccaaacaatcaggaagctgctcttatgcaatagtgaatgggaaccccattggaaatgcaatttccagcgttatataggtgttaactcagcagaaaatgataaatgaggatttatttatactcattcaaaaacacatacagggcaagttctgttgtccaaataggtcttttgacatcagcttcttcacgttcttctaaacattcaagttgcagtaatccaggtgaatcgtctgagacttaactaaagaattttctaagtgtatgaatgcatattcaggggagaaggaattagttttatcaggctgccatgcagatatgtaatttttaaaaatctagctttatataagcatataaataagcatacacatacagtagatgaaacaattaaaaccaagattttgcagctgtttaaattgtatttagacacatggtggggcttgagagttactgaaatgaatctatgactgcaggagccaagtcctgtggggaccgaggtaggcagtgattatttttcccagtgctttttttccccagagatccaccagaactgaaccagtgggtcattattttgtacgttattcagttctaaacttctgcatcattgtttcacaaagtgtgattcatgaactgtcagatttaggagctgttttaaaaaatagtttctcagcctgcgctgggaacccatagctaacttggagagaccttgtaatctgcatttataagtgcctgtctgtggtgattcttatttttattcagtgaagtctgctatccagtgttttcagttgctgtttggtgaaggcggagtcatgtaggttgaaggaaattggaatcacgttggaagtcacggagtcagcctgccatcattactattctcctttaaagctattttcagttttccatgtagcaagtcacatcacctgctacctgtagaacttacttatgctcttactgttttggcaacgagtgattagctctctctggaagtgagaggaacaacagtgtgttagaaacaaatgtagtgattggagaataactataatgcccaggttagaggttaccttgaaatatatagaagatttcataagcaatttttattcatttactccagtctgttcatttattgtttgagcacatatgagcaaaggtttgggaaaactggcctcatacaaatattttgtatttcataaaaatataaaatatatggccgagtgcagtggctcacacctataaccccagccctcagggaggccaaggcaggtggctcacctgaggtcaggaatttgagaccagcctggccaacatggcgaaaccctgtctttactacaaaaattagccaggcgtgctcctgtagtcatagctacacaggaggctatgagaattagaatgaggctatgaggcatgagaatcgcttgaacgcgggaggcagaggttgcagtgagccaagatcatgccactgcattccagcctgggtgacagagtgagactctgtctcaaagtaaataaataaaaataaaaatacataaagtatataaatctaaaactggtcttgatgaagatacctggtagtaaagccagaacattccagttggtttgtgagaactctgctccttggaaggcatttcccttttctcagggtggccagggagctcccccttgcccacaccgccttgtcctcatcctgcagacttggcgtcaacataatgctggaaacacttacatctccaggcttcagtgcaacttccttcgcctgacttcccttccctcggtccgcgatccactcctgggactgtagattccatcaagtctttacatccagtgcccagagctccaacgggggtgttcttttttgtttttaaacctgtttccttccatgcataaatctcattgagttccgtggctttagctgtttaaacagagtagccagaatgatctttcacagcctcacagtcgtcagtggtgtgacaccttccagtgtctcccactgaaaggagtgaaatgtgaatttctcactgtggctcacagtgccctgcagtgcctgtaccccggccttgaatcttcgttcttctttattcgctcaccagtactaagccagataagctgcctttttagcctataagcatgtgaagcgccttcagtctaagagctctggcgctggccctgccacccacccaggctgctcttcccaaaggcctcccgtagaacattcaggaaaggccactctgaggaaggacgtctgagtctagagtgggctttgttgaacagccacaccagaacagcttccaccatacatgcaggcactacattaccatttctttctttttttttttttttttgagacagagtcttgctctgttgcccaggctggagtgcaatcttggctcactgcaacctccacttcctgggttcaagggattcttctgcctcctcctcctgagtagctgggattacaggcacctgccaccacgcttggctgatttttgtatttttagtagagacggggtttcaccatgttggcaaggctggtctcgaactcctaacctcaaatgatctacccgcctcagcctcccaaagtgctgggattataggcttgagccaccacacctggcccatttctgacctttttatcgggagttattgtttggtttatatgtttatcaattatccctctccacaatattccctgagggcaaggcttgttgtgccagaatggtgcctggtacatagaagatgcaaaatgtcttttgtttgacatgtgaacagattataataatattattttagagacagggtcttggtatgtcgcccagtctggagtgcagtggtgcgatgatagctcactgcagcgttgaactcctgggctcagggaatcctccaccctcagtctcccaaggagctaggactacaagtgcgctccatcacgcccagctaactttttaaatatttttatttttagagacagagtctcgttgtgttgcccaggttggtcttgaactcctgggctcaagtcctcccgtctggtatcccaagtggctgggattataggcgtgagccaccatgcccagactgtaatattagattgtgggtcccaagtgctactcagtggtagacaggactgtgtttacagcttagaggtgaaagaagcatggctgagtggggattagagggatgaagacatatttaagaactttcttttcctaggttggtggaagtgctaaagaacatttccaaaggagagagaaatcttagcttttcattttggatttagttgatcagagacgctcttggttgtctcattttcactgaccatctctactaaagctctgtgagaaataaattagaattatagatgataatgtcaagaaaactttttcttacttgggtcacacttcagggtacaacaagtgaagcatactttaaatatgctttgaatatgctttatgctttcacttgttgtactctgaagtgtgtttcttctctgaaaaagggcatttttagtgcctgtggaattgcaaataacaggaagaagaaaaatgctgtattggctagactcctttagtgttcctcatttttttaaaatagtaatctttgttataatggagttccatgcacttgaaagtcagatttgtgattttcacaattttcacaaacttcactacaatgtgaagtttggacttctaaaacaatctctactccccctcctgggggttctacaggaacaagataatcaaccagtctttgcctcagagtttgttcttaccaggaagtaaagggagtggggaggattgtatatgtgagccaccctgcccagcaagaccctatttttaaggtgtttagattagcagatattctttaagtaagcatctttaatccttcatgggcacttgaaaaaagaataaccatcattttggatgaagtgagtattacagcctttaaaatatataatttttttttttaagatggagtctccctctgtcgcccaggctggagtacagtggtgcgatctcagctcactgcaacctctgcttctcaggttcaagtgattctcctgcctcagcttcccgagtagctgggattacaggcgcccgccaccatgccccgcaaatttttgtatttttagtacagacagagtttcaccatgttggccaggatggtctcgatctcttgatgtcgtgatccgcctgcgtcagcctcccaaagtgctgggattacaggcgtgaaccactgcgcccagccaaaatatatatgtataatcttcttatatacatatttgaataagtttactattatgtagaagtttttttttttaatttattttttgtgacaaggtctcgctctgttgcccaggctggagtgcagtggcgtgatgatagctctcttagaatttttgttctctcagacctcccccatcttaacagctctagatgagtctcccacatctcatctgggaaacgcttcgtcattctacagttgtctcgccagggtgcttcctaaagtgaggagtccagaaatgagaagagttccccctgggcttgcaaatgctggcagtgtttcctttctcgtctaaatggtggcctctaccgacgcagcgtggaactgcgcttgggtgggcttgcttttgaaaggtgttagctcattgtgctgttggtcaggtaacatcaccaggttttttgtctgttgatactcttgtcactgtactacttctcttttattatgtggtctaattgatgtgtgaaaataatgaggaacttcagattcattcctagaattttttatctttgatgttgttttaacattcccaggatatcaagatctttctgagtaattttttaaataatgcatacattctggctgtccacacacttctaaagctgtaatctctctgcgtttgagactattgaaatattgaacataataaggcctaaggcagggctctgtacctggaagtagacatcacttgtcaagccgcagagtgacagaccaacacatttcatttccaggtagcaggtaactaccttctccactccacacttctccctctttctaccaaagagtttgtgggagactgtgttatatacattatggaaataaagtcgccctgcagccagggccatcctctgtgtcaccaatcaagtaagcctgaagcagagtggatgttgatgacggtggctggactgccctgcgcacacactggcgtggctacggctctgcgtgaggcatccagtgctggacttagcagcaccttaaagaaatacacaagtacccggaaccttcctctctgttttgagtcttgtgctttatttttatttactagtgcctgttagtgcaccaatttcaatagtctttgaccattaaatgattgtaaaataagcagtatcagatatttaaatgtttagataacatcaagataaagtccagaaaaatacaggcccattcatatgcctaaaaggaatctggatcaatagtacaatataggaagggggaaatagtgatactaatatggcttaaagacttagatagtcaacatcgcttaagggttataatgtgaaacagcacaaaaacaaaacaccccgaatggtttggggatcgacatggaaaccaagcaagtcatgtttaataacacacttcctgaaaccgtttgtctcccatttcccacctgtcatgaaagagacaaactgcttttttattttattttattatttgagaccaggtcttgcttatcactcaggctggagtgcagtggtgcaatgatcgcttactgccgccttgaactccttggctcaggtgatcctctaacctcagcctcccaagtagctgggactaaaggtatgtgagatgatgcctggttgagacaggtctcaaactcctggcctcaagtaatcctccggcttagtcacccacatatgtttttattccagtttagcttggagacttaaaacttctctgaacagttgtaataatgcagaaactcacactatcctatctaaacaaaaccccagcccccaccctgggctctctttgatattattagatgacacttagattactgtacttggttctggatttattactactagaaatgcagtgaccagttggaattgtttcagagaataacatcaaaaatgatttatgaggaaggattaaaggagttatttatggcttcaccaaacaatgactaagagagctgactatataagcattcaagggataccagcaccaaggaggggaaggattgttagggatggttttgctaagcagtggagggtctagggcatagaaatgaatttacagagagaatggtgacagctgacagtggggaaatggtttataggtagcaaggtactcttttttttttttttttttttttttttgttacgggcccttggtctgtcaccaaggctggagtcaattgggggtatcacggaacctgggccaaaacccttgggcccaagggtcccccatcccagccgggtccctttaaaaaaaaaagaaaaaaaaaagggggggttttccgtaactaaaaagggggtttttaacgggggcgggggcccaaccctttatcccgcacttttgggaggccagggggggaaattnnnnnnnnnnnnnnnnnnnncccccccagggggggaaggattttttgggatggttttctaaagccgtggagggtcctagggccctagaaatggaatttaccgggggaatggtgaccgctgacagtgggaaaatggtttttagatagcaagggaccccttttttttttttttttttttttttgttacgggctcttgttctgtcacccaggctggagtgcaatggtgctatcacagcacactgtggcctcaacctcttgggctcaaggatcctcccatcccagcctggctccctttaaaaaaaaaaaaaaaaaaaaaaaaaagaagagtatttctgttacttaaaaacaggaagttagactgggtgctgtggctcacacctttatctcagcactttgggaggccaaggcaggcagatcacttgagctcaggagttcgagaccagcctgggcaacataacaagacccctgtctctactaaaaattaaaaaaaaaaatatgtgggtgtggtgacacacacctgtctcaaaaataaaataaaaacagaaagtttatgaggatataaaataatccaggtaaggactgaggaatagaatgggtcctgtttttaccagtcattccttatattttgttatgttaagtggaaaagaggtacacaagttgtgtagtgaaggaatgattattatcaaaaaatacttttcattagagtgtccttcacattttcagacaagaatgttcagttccctccctcatgcaaagatacacagacccataactgcagagaagctttaatgaaaacctggatgcttattaacctgttctttggaatcagcaggttctcaggtgaagatgttattattttcttgttactttttcttaatattgtttatcaaatggaaacggaaaggttcctggatctttttttgtaagacaaaagtcaatagtttattcagaaagtttaaaaacaaagatattcgtataatttacaagatcttttggtttgaacatattcataaggacttatgtttctcatttttatggagatttgtttttgtttgtaatcaatttctgtctgagttccagaaatgcaaaaatactgcactgaaagaggtggcagctgacaaaattgctgtctttgaccttctgatgcaagtttagtaactaatctggaaaataatgaactgcaattaatgaaatctgtactcatattcaagtgtgtttctcagacagcacataaaataattgaaggaacttcctgctctctaattagttagattgaattaatttggcataatagctttttttcatgtatctagaagtttgtgttcagatgaagctatttatgtacttcaaagttaggaactgtaaatggcgtctttgatgaatctggagaattaaagggttaatggtcagatttaatttccactatcaaaagcacagtcacaatgccggcctgtcttgatttatgtgtctgtcccttttggttagggctgccttatcaacagcagggatatttttctcctatttcaacatagcctcacgtgtggtaggtagataaaggcttgtgtagaaagagcacccctctgcccatctctgatgctaattgaaaaggtgtctgtataattatccatcttccattactgtgattcttccttatataaaacagggagaaacaagcacaaatactaattcttgccttgtacacaaggatgatgttttgagctaacatacttctttgattaaatgaattatataaacacgtatccttgtgtctcaagtaaaggttcaacatcctaactaaaagaagaaaacacggtcgggtgcggtggctcacgcttgtaatcccagcactttgggaggccgaggtgggcggatcatgacgtcaggagtttgagaccagcctggccatcgcagtgaaaccccatctctactgaaagaaatacaaaaattagctgggcgtggtggtgggcgcctgtaatcccagccactggggagggtgaggcaggggaatcgcttgaaccctggaggcggaggttgcagtgagccgagattgaaccaccacactccagcctgggtgacagagcgcaactccgtcttaaaaaacaaacaaacaaaaaacacatctaggccttgttcccagccttcatttttcttaaactttcaggttatttaaaaaataacatatatgagcattttctctgtagtttaataccacccatcttaaacagctatagatatagtatgctgtatttcacttgttctggagttaacaaagagtttttaaaaaaaaattcagggcaactgatttctgttcagtttagggaggagtttttaggcactcctgtcattgttaaaagactcttatcactcttttagttttccagaatcacagcattttgctgtctagccttgccccataaatttgtaggtaatatagtggacatacttagagatgtcagagttgtcttcacaatcaggtttagtagctgatctgaaaaataatgaaatgtaactaaaattcccttcagcaagtaagaggatttctgaggcagtaaagaagtcgattgaagaggtgcatctgctagcaattttttaggaatggggttcattttattctctagaccgagtgttgccatactttattttataaaggaacagattgtaaatattttaggatttgcatgccatgtggtctctgtcaaaactagctatagacagtattaaacaaatgagtctggctgtgttccagtaaaacttgataacctgaaatttgaattttacataatttttatgttatgaaatattcttttgatttgtttcagtcattaagaatgtaaaagccatttcttatttcttagcgcatattaagctggcgacaagctggatgaaggcttttttttttagacagggtcttgctctgttgcccaggctggagtgcagtggtgtgatcatggctcattgcagctttgacctcctgggctcaagtgattctcccatctcagcctcccaagtagctgagactacaggtgtacaccgccatggctggctaatttttaaattttgatcttgtagagacggggtctccctatgtcacaccggctggtcttgaattgctgtgctcaagcaatcctcctgcctcagcctccggaagtgctgggattatgtgtgtgaaccactctgcccaacaagaccctatttttaaagttttcagattagcaaacattctttaagcatccttaatccttcatggacacttgaaaaactagtaactctttttggatgaagtgagcattctatcttttaaaatatatgtgtagaattttcttatatgaacgcttaaatcagttttaagtattatgtagaagttttatttttttttaatttattttttctgacaaggtcttgctctgttgcccaggctggagtgcagtgatgtgatcatagctcactgcagcttcgaactcctgggcgcaagtcctcctgtctcagcctctcgagtagctgggaccacaggagtgtgctaccatgcctggctaattaaaaactttttttttgtaaaaatgaggccttggtatgttgcccaggctgttatgtagaagtttgtaaagtaaactggctagatactaaaaatcagaagcgatatcttttccagtaactctggaaatactagtatttaagattttatttatatagtacttagaataagttagactataatacatatctaatgtcttatagaccatgtgaatggtgtcattcacttataggcagtgataaaataatttacttgttgataggaaaaataggccttttaattgttttgtgtaactgaaattaaataggaatataaatgttagaccttgagtgcctagttttgaggagcacagggactagttttgctcacactgcacccccagtgcctaccacagtctttagaatgtagtaggtacctggtacatatttgcgaatgagtaaataaatgaaatcttaggttctttgtttgaaagaaagtggaattcatcttggaatgactttgggactgattcagttaatttgaaacttgtgatttctagatcagatgaaattattgactgtttaaacatgtacttttagtaagccaacttagaaatatccaggaagaccagacacaaaattccaatgaagtactttacaaatgtgtcgagagcttccagcatacctggcaccacaccaggaattttaatgtgccatctcaacaacacgactgagttagacaagcaccatgcaatagatacataatgcgagccatgtatgcaagttacaatttcctagtagccacgtttaaggaagtaaaaagaatacaggtcagattaattttaataacatttgtttaacctagtgtattgaaaatactgtcatatcaactgtagtataaaaaaaggttgagatattcccatccttctttctgtacaaagtccttgaaatcaggtgtgtattttacatttctagcacattgcaattcagacactaaagttccgtcggaaatacttgatctgcgtttagaattcataaaatttatggttgaaaaagcagacccacatgccgaggctgttctaaacatacttaaaagcatttcagtgtttaaggttatgctttattaattaaaataaaaaatggactttctgagtcacattagcctcattctcagtgctgggtcaccaccagtggctggtggctgccatgtcagggctgctgccctgttggggaaatggggagggtgcacacctgtctcaggttacagagcctcaggagtggcagaactgagctttccgttgagaaagcacggttaaatgctcacgtgtgactgtaagagatttcactgacagtgattaagagtaaccaagtcattgtatttgtggaatgaatcaatcagtagagcgtttgcaggagggacggatcgagccgcagaaatacaccatgcaggacctgccagcgtttccctgtctgctgcagtgggaaaccctggcagctgcaaggtggcgagcgacatgggacatggtcacttttgtttttcggaaagctccctccagctgtagtttggaaagtggatttgaagagaatggagttagaagacgctattcgagtgcgggtagaatcctcagcagggattatcatgtgggtcagaaacccatggttgccttctggtgttgagtccttcgaggcactgcttggaggggcatgtggcaggcaggggcacagtggctcgggcgggggtcggcagccaccagtccgcttccctggtgacaccgcttagagaactcatgtagatgggatcatccccttgcagataggtgtggaagcccagaggtgatcaggtttttacacaaaagttagaatgccaagccatgcatttaaaataactatacctgccagatggacaaaagtgctggtgccgttatggctcacatattctatccacatcaccctgtcagggtctggagcctccaggcgcacagggtggtcactgaaggcctcacatgccggaggctggttcacaggcttcaggccagggctggacacgttctccccgcccgcctcccggaactcttcgttttcctctcttccaggcccctggtcaggacaaccttagaaaagtgtttctgttgattagattattgctgaggcttaatgtttgggttggttttttttttttttttttttttttgagactgggtctcactctgtcacccagggtgagtgagtggcatgatcatggcttactgcagcctcgaccttctgggctcaagcaattctcagctcccaagtagttcggactataggtgtgcaccaccacgcccagctaatttaatctttgtagagatggagtttttccatgttttccaggctggtctcgaactcctaggctcaagtgatcttcctgcctcagcctcccaaagtggtgggattgcaggtgcgagagccactgcacaatgtgtctgatttgtatccattgtatgttacttttatcagaacatttttggaggttagcaggtgtttccttatatgccttagctctgcttccttttgtttctcaggtttttcacgcttcagcagcaggaaaatgaaagattggctactaactatttgtaacaaaaataaatcttacatatcttgtatattccactaaaaagtaattttctatacttggatttaaatcattggttagtgtttaaaacaagacttagaggattgtattagtttaagcaccattaaaaaatgacatttaagaatttctgaaattcagggtaaggggtgattgttagccatgaaagatttattttcaaacaataaaaaatatgcatcagaaaattcaatgttagggaagttctgaagtgattatttttttgtttcaactgggacctcttttcccctttacctccccgatgcccacatttcagagtctgttctttcccacattcctatgtaactgtacaatttagtcttctttatgtcacttgctaagtaatgtatgcatttgttcattcaacaaacactgagctactgttttatgtaaggaaatacagggatgaatgagctgtagtctgtctccttccaagagcctgaagtttagagaagcctgtttagagccacaaaagcagatgaagagacagtgcagggtgatgtagataccgtcatgtgtgagtgtctgcggatgacacagcgaagccggtgggcgctgctccctgcagttgcaggagaattcgatcatgcatgagcagagacttagaaatgaatcggtattcactagatggaacacgattccacgggggcggagtggcgtgaggaaggttctggaaaagccatccattgagggaattctgaatggaaaagccgtccattgagggaattctgagtggcctagtagagcaagcaaagcaaggtgtgtccccttggagattgtatatgtcatgtcaaggggttaattttattcttcttggcagaggggtctccaaaacagcttttattccaagttttaaaattctgacctcatctcccatgtgttcatgtagaatgtgaaagccagagttaaaacacagggcaatatgatgagagcagtgactggcaccttttccctggaatatttctaagccgttctgttgcctgtaagctactcatctgttcagtttcagcaacgctcagtagacagggtgattgcaggttcagccagcacttgagaacttagtccttttccatctctgtcactcacttacagggcaatgtgaatacatttaaccattaggtaaacgctctctgagcctcggtttctgtagtgtgaaatgtagataattatactcatattcacttgcctcatgggacttctccttaatatttatagctgcaaaatacttcacagtcatttttattaatagttaccagatgtgttgtaaggattaatgaacttatgatctgaaatgttttgagcccctgaaataggaggtgactgcctgcacaggggagatgtagaagagcataaaggtgcaaacagacacacttgaaaacttcagctattacgtgtgaaggatgagcacacggttatgatttcagtattcttggtggatgtatttggcatccttaaaaaggttgctgaactcatacccaaggcctgtgccaaaagcccccttcatgtggcgttcacacccgttctatttatgaccctttcctcctctgaatcctctctctttttttttttttttgagatggagttttgctattgttggccaggctggagtgatgcaatggcactatcttggctcactgcaacctccacctcccaggttcaagcaattctcctgcctcagcctcccgagtagctgggattacaggcatctgccaccatgccctgctaattttttttttttttttttttttttttggattttagtagagacacggtttcaccatgttggccaggctggtcccaaactcctgacctcaggtgatcctcctgctgcggcctcccaaactgctgggattataggcgtgaaccaccgtgcctggcctcctctctgcttttgaagcttccactccactgtcaccttccttgattttagtgatttgctcatgtgttccccaccaatcaggttgcccatctgttgagagcaaagcccatgcctctgatgctgatgttgcctgaggcacctggtgccacgccccccgcatggtaggacctggtgcagtctctgttgagctgaacttttttacatggagagtgagaaccaaagtggcagtcagtcgagtccctgaatccatttcagcaaatatttaataagcatctatctactgggtttttctaatcacactgggtcctgaaggaaagtgtaacttgtttgcatgttctatttcagagggcaggaatcatgtgattttagaaaaggtttcatgttaggcgcttaacatcccatccttggggtatttgcatttttaggctttaaggggaataaacttcacctttgtggaaacagttgttccccaatcttgtccactttaggtaagatgtagtgaagaatgcaagtattttggagtttgagaaatgttttttctgcttttgtcatgaaatatacccttgaacaccttcccatttgtggggacgttaaatactataggcagaaaaatgaagatacgagccctggcatgcgaggactgcgtggcagtgtgggacgcgtgcttgagcctcactttcttctctgggagatggcggtaggcggggccgtggagagcagtagtgggacagaaggagctgagtgctgggaggggcgcagaggggagactgttctggtcaaggaattgaggtgtaggctgaaggtcttgttcttcaggccttgtcatgtgcaatggcctaactgccaccaggggaccctccctcattctgtcccattggctgctcacataatctttaatgcaccctggtcctagctgtcctgggcctcagaccaccccaggaactccctagtggttgcagtgtaaagtacacattccttttgttcatttccttggtccttccaccttattttctttttttcttctttgacacagggtcttgctttgttgcccagggtggagtgtggtggtgtgatcatagctcactgcagcctccaactcctgggcttaagtgattctcctgcctcagcctcctgaggagctgggactgcaggtgtgcaccaccacatctggctccagtccttccaggtctttaagcctgatcgctgcgtttcctctcgagtcctctccactgcaccttttctcaaatcctgccagtgcccccttaccttctgtggaatcaattccctcttatacttttcttccaaaagcagccccaaggcacgagtggtcatagtggtgccctcaggtgaagcgaggctattccatgcttgtaaacatggtgagcaccctgctgagcgggctggcttcttcgggactcttctccctacagctggagtccaggctccccagtaggaaggaaggcctgggcggtgtggctcgcgcctgcaggctctgtctagaaggcctgactccatcgaggcctcaagtgcccagacgcacaagagccaaagcaccaggactgccgagggctgggagaagggaggtgggagacgtggagtccacatctctgggcagttaaagttcagtaaccgagcagccaccagctgtgccctgtggacccaacaagaaagaagccctacccgcggctgtcctggcagaatggagccctcatgagagcccagcatgggaggccaggcctggttcctgcagtcgggtagggggagggggaggggcagaagtggcatgttcccagcttcttctgggatgagcacatctgctcggctgcttctgtgtcccacagccactccgcagcaacagaatgatgctctggttccttctctccccgaggcttcccttttcctggctctgatgattcttaactctgtctctttaatgttccctggcccatgtgtccacaagtaaccaggccctttcctgtggctcttacctcctccccctgctctgtcactggagttgcattactgatctgcctctttggactttaaatattcttccggtcatgttgtgtccccacccggacagtgtctctggccttcagctgtcttcttgctttgctcaggactcagtggggacccccttcctctcctgagtagggttagtttccgatgcccagggccttctgcagacctgtgcctgccatcttgggctctgggtttgtgctccagccagcctggcctccttcctcctcccctcctgtgactacactccttcctctccccagccatcagagcctggcatggctttcacctcctgccggaagtctttctgtatctttcctgtctcataatgcttgtctgtacaggcccagtcctcggttcacatgtgcatatgtgattggagggagggagagagcgtcgtgtgtgtaagtgcaccatgtgtgttggtgatcttggcatgtggcctgtttccctggctgggggaggagccccttgctgggtcccttgttccttggagggtgtggagcccctcacactcgcacacctgatgggccgattcccctcgggcaggtcctggccctccagcctgtgcagcggaaacctttctgctacccctgttctgtcctctcgacccctgacctgcacacttgcctcctcagcccgtgccccgcatcatggtgcagtcagccagcccggacatcagggtgaccaggatggaggaggtgagtctgttgggtcacgggtggccaccccacctacagcgagcaggtggccctgatgccgaaactgttgagtccacacccacagtttttgatgttagcattcctgttttggtaattagttataatataggtcactgccttctccctctctattttccttgttatacttttctattttcaacttgttaatcatatgattgctaaacttttaggtgcttgactgctaatgtagtctgctgccttaatagcccacagctaggcagaggagatttctataaacagaacaatctccttcttctaaatgtttgcttaattctcagttttacatttcattctgattcatgatatcagcgtgaaaagacgaatgctaagctgtggagaaaatagtctcttataatctcccacagatcaacagcacttctaatcttatgaatagcaaatctattttctcccactgcgctttcattctcttaggaaatgctgtatcttcttaggaaaattttctttattaaaacaacagcaacagaggcacaatcattagaaagaatattcagatctccgtgaatttacttctatctgaatgacctttttaccccagtgcacactgggcattcacgaatttgctgtggccgggatcggggtgccccctcccctgggaatggtgccggtctcttctctgaggcaggtttgagtgtccctggtcagcaggatggtcagagcaagccccttgccagtgaaggcagcagcttctgtagctcatcatggtggttttccaagcttgggcttttgcagaagtctccagaaatgtcttcttcagtggcaagggtataatccatagatggcatctgggtttcaactcacaaatcaactccagtcaagtggggatggggcctggagtgcagtctgtgctttccaccatcctgctccctgctttgttgactctgcagctctgccccagtgcctgccttttcacttagtgcagccttggatgagggctttcccctctggaggcctgctgtagaataatgccatgatccttccagcccagcccaagccagtgtcttacatggaagccaatgggatgatgatacttgcaaatctgaggcatgcagctggcctcatcctgggagagcctggcctggggaagtgacagtggctggccttacccggggtgggggcggggaacagaagccatttcaggaccctggttaccgttcagattcccggctctcatagttttgcgtattctcccctgttgggtcagtgatattaaaactaaaatagaagagaataaataaaacatggacaatgtgcaaaggaagaatgattgaaggattgcctaatcttttagagtatttatgctggtgacagttattgatctattggattgagtaaattttgcagcctagagattcatcacaaaaatgggctgttaatctcaagaggtgccattaatttcctaccctgaaagtgtggttggtggggaaaagagggcccctggaaacgggaatataaaggacagttcctgggaaaacgcatgatttatcaagctgctgaggtaagccaagtaactgtaagagacgtatagatctcagccgcttccccattcaaataaatcccgtatttcaaatggaaaatgaccattcctgtaatataaataatttttccataaatatcggaaaacatatttcttctggatagcagtgctctccaccccaccaatctcattccctgttcctgccttctccttttcttcggtcactgtgaataggaatagaaagatgatctggcagcctcttcacatggcttcagttatagatgaaagaatgccccagaaacaataggatttgggcaagcggtggctgctctcccccatgagatgtgggctttgagtgtgtgtgtgtcctctgcctgggtgactcagacagagtgaccgacatgaggagagctgctggcctcacttggtggcttctccctgggggctgcttcctggcctctctccagggtccgaggcccccccagcccctgacatggcacctgctttccatagcagccagagcagcagccttggagagaaagggccacggcccacagnnnnnnnnnnnnnnnnnnnnnnnnnnnnnnnnnnnnnnnnnnnnnnnnnnnnnnnnnnnnnnnnnnnnnnnnnnnnnnnnnnnnnnnnnnnnnnnnnnnnnnnnnnnnnnnnnnnnnnnnnnnnnnnnnnnnnnnnnnnnnnnnnnnnnnnnnnnnnnnnnnnnnnnnnnnnnnnnnnnnnnnnnnnnnnnnnnnnnnnnnnnnnnnnnnnnnnnnnnnnnnnnnnnnnnnnnnnnnnnnnnnnnnnnnnnnnnnnnnnnnnnnnnnnnnnnnnnnnnnnnnnnnnnnnnnnnnnnnnnnnnnnnnnnnnnnnnnnnnnnnnnnnnnnnnnnnnnnnnnnnnnnnnnnnnnnnnnnnnnnnnnnnnnnnnnnnnnnnnnnnnnnnnnnnnnnnnnnnnnnnnnnnnnnnnnnnnnnnnnnnnnnnnnnnnnnnnnnnnnnnnnnnnnnnnnnnnnnnnnnnnnnnnnnnnnnnnnnnnnnnnnnnnnnnnnnnnnnnnnnnnnnnnnnnnnnnnnnnnnnnnnnnnnnnnnnnnnnnnnnnnnnnnnnnnnnnnnnnnnnnnnnnnnnnnnnnnnnnnnnnnnnnnnnnnnnnnnnnnnnnnnnnnnnnnnnnnnnnnnnnnnnnnnnnnnnnnnnnnnnnnnnnnnnnnnnnnnnnnnnnnnnnnnnnnnnnnnnnnnnnnnnnnnnnnnnnnnnnnnnnnnnnnnnnnnnnnnnnnnnnnnnnnnnnnnnnnnnnnnnnnnnnnnnnnnnnnnnnnnnnnnnnnnnnnnnnnnnnnnnnnnnnnnnnnnnnnnnnnnnnnnnnnnnnnnnnnnnnnnnnnnnnnnnnnnnnnnnnnnnnnnnnnnnnnnnnnnnnnnnnnnnnnnnnnnnnnnnnnnnnnnnnnnnnnnnnnnnnnnnnnnnnnnnnnnnnnnnnnnnnnnnnnnnnnnnnnnnnnnnnnnnnnnnnnnnnnnnnnnnnnnnnnnnnnnnnnnnnnnnnnnnnnnnnnnnnnnnnnnnnnnnnnnnnnnnnnnnnnnnnnnnnnnnnnnnnnnnnnnnnnnnnnnnnnnnnnnnnnnnnnnnnnnnnnnnnnnnnnnnnnnnnnnnnnnnnnnnnnnnnnnnnnnnnnnnnnnnnnnnnnnnnnnnnnnnnnnnnnnnnnnnnnnnnnnnnnnnnnnnnnnnnnnnnnnnnnnnnnnnnnnnnnnnnnnnnnnnnnnnnnnnnnnnnnnnnnnnnnnnnnnnnnnnnnnnnnnnnnnnnnnnnnnnnnnnnnnnnnnnnnnnnnnnnnnnnnnnnnnnnnnnnnnnnnnnnnnnnnnnnnnnnnnnnnnnnnnnnnnnnnnnnnnnnnnnnnnnnnnnnnnnnnnnnnnnnnnnnnnnnnnnnnnnnnnnnnnnnnnnnnnnnnnnnnnnnnnnnnnnnnnnnnnnnnnnnnnnnnnnnnnnnnnnnnnnnnnnnnnnnnnnnnnnnnnnnnnnnnnnnnnnnnnnnnnnnnnnnnnnnnnnnnnnnnnnnnnnnnnnnnnnnnnnnnnnnnnnnnnnnnnnnnnnnnnnnnnnnnnnnnnnnnnnnnnnnnnnnnnnnnnnnnnnnnnnnnnnnnnnnnnnnnnnnnnnnnnnnnnnnnnnnnnnnnnnnnnnnnnnnnnnnnnnnnnnnnnnnnnnnnnnnnnnnnnnnnnnnnnnnnnnnnnnnnnnnnnnnnnnnnnnnnnnnnnnnnnnnnnnnnnnnnnnnnnnnnnnnnnnnnnnnnnnnnnnnnnnnnnnnnnnnnnnnnnnnnnnnnnnnnnnnnnnnnnnnnnnnnnnnnnnnnnnnnnnnnnnnnnnnnnnnnnnnnnnnnnnnnnnnnnnnnnnnnnnnnnnnnnnnnnnnnnnnnnnnnnnnnnnnnnnnnnnnnnnnnnnnnnnnnnnnnnnnnnnnnnnnnacctggcctcgctgacagctgccctggccaaggccgacaggagccacaagaaccctgagaaccggaaaatcctgggccagctgagccgctgccttagggcgaacttttctgggggtgcccggccccttttgagccctgccagtgacagccctgaggagccaggagcccggtggccccttccccaggggcagggcgatgaatgctttttgcacgacacagggctggtgacctccctgggcctctggaagctttgtttcttctgtacccgggtaaagtgggggcctcaactgtgcctcctccggtggatggaaggttctgggtgcccgcaggggctgggggatgctaggactgagaccctgggtggtgcagcgcctggtgatcttgctgtgtgcctgtgcctggggccttatgttgctctttctatcatttccattctggtggccccactaatgtcttaacctaaaccataattgtaaccagtgcctttcctccccactggagggcaagcccccccacccacccaggatgtcctggctcactccgcaagccccccagcctcccaccctggtcccagtttcccgcaaagtgcctctgggggaccccccagcctcccaccctggtcccaggttccacaagtgcctctggagggccctgggctctggcagatggtcctggtgccccagacgggggccgagggcctgagcccccccatccctcctctgccagggtttcttagcggtttctctgtggatgttttggcatctttagacacctggaaagtctcttatgtttgccgtttattcccttcacagaaggcttggaatgtatttatttatatttattttttcaaaatccgaaatcatttgcgagccgcaatcgtcgtctgcctgtgtgggggggcccagggcctgccttgcacgttgcagcctctctggccattgcagagctgctggcctcctgcccaggtggagggtcctggggacggcagaggataaagccccctcctcacatccctctattgcggatccacagtggccttactcttaacttggatgagagcaaaaacctgggagaatgatgtgcttctgtagtcggtgacaaaggaagaggcattgctactttatttggtgcacttttggtttctaggaaggtctttgggtcattttaacttctcggcaactcccagactctcagagtgtggggctggggcctggcggctgggctggtgcagggagtgtgctggttagtctccagaccctcacagcagccacgcccccaggcccaccgtgcatggtgtgggcgggacagccggaagcttccggggtggcctccacctcctggctggggcacttatgctcccagagcctttggtgccaggtttgtgggatgggggttagcgtctatgtgtggaaggccaccaatctagggacaggagtcctgggtcaagattcacacagccacccttggagctggtttctagttctcacatttagtcaacatctagaaagcgctgcggaaggctctggttctctagggacttgaaggcgccaacagagtagtctccatggtgggcctgtcccagccctggctgcgaggacaggttgtctttctctccccagttggcgagggacacgaaggctgcggccgggctggcagagggcccggcccctggggggaggcactcctccagggctctccctgtccttagccgattttgagggaaccctgtggcacctgtccctggatgaagagctgtcacctctgccttgccctttaactcaacccgcttcccagcacagcggctttctttttaaaacctgtttcactgagaagtttgtttttgggtccgctggtgtcactatggcctgggtgagaggccagcactgctgctgccctgaggggaaacgcctgggccgtgtagtggggacgctctgggaatggtggcggacgggcagcgtgggtgggacctggcacttcgtggtggctgagccatccacccagcagcggcctcctgtagcaccatcttgggaaagtcctgggggacgtgtgtgtcgtgctttttaccatcggtttgacttacagtggagtagaacgagccagagttcctgacttgagcaggtggatttgggcccaggccctgttcactcttgcttctcggtgcggactaatgtcagcttgtggctgggaaagagggatgtgcagtgacgtggtcaccaaggcagtgagccccgctgaccccgggccagcacttggcaggcaggaggtgcggtctccagagtggtgggccagggcgggctggcctccgtcttctatcttcttttcttgcctccctgaccagcagactcacctcccaagaacgcctgcccgcccacccgccttaggactcccgatgcgctcctggaaggccccaggagtggcaccttagtgtgggtcggcccgcagatggcacccaaggccgggaagggcagtaactgcacacgcggcgctgtcagagatgggggtgggggatgcttctgggggccctgcctccccattgtgtgcccagaacatccctggccccaccccgccacttccctcgggcccttatgaaggactgaggctccagggtgagaaggctcacttctgccccgggcactgcgtccagcagcagaggggacagggggcaggtgtgtgactgggttcctgggtacccaggcctgaccagagggagcgggagggcagaggtgaggagggggaagatgtttctgggcctaccaaggttcaacaagagaacggagctgggaatgtgactgctggagcctgagaggtggaggagttctgatcccccgttacttcctagcattttctcctcttgccttaaaagttccctgtatgtgaaacgggaagtcctgagagtgtgtgttggtggctgtgcgcacgcacacaagacgggagtcaccctgtgcttcctgcccaagatactgacccattgaacccccaaagcatctttctctccacaaagtccgtggtgccttcctggtgggctgcagacactaatggtgttggggggtcttggaacagcttctctatgtgtggattcgtgtaaatgcgaagagttcacatataaagaagtgactttgattctgtgattatattgatttggtacacagtaaatgggagtttaaaaaatccaaagactctaatgacttgtaaagactctaatgatttgtatcatgtaatgaactaaaccacctgtaattttgtaccgtatgtgtctttccatcaaatgaccaacagcttctcaataaaaccagaccatttctcacctgcatcatgtctgaggccagtcttgttgcttctccttcccctcaccccaacatagggttttggggctcctggcaggccatcctgtcatggtgtggccttgttctcagcaaaggtggtgcggggcttttccagactgagactgggaggaggaggatcagggaacagcagcaggccgtgctcgcctccccagcccatggacttcagaggctgaactcttcatgatttggacttaagagcccaggaggccccccggttctgagtcatctttccttgtttggacttcagccccttactgaagccaggaaccatggaaactttctggggcccttcgaccccaggtaagtggtgctactgggagacaggtgacctggtagggactctccttggctctcaggcatgactccactgtctgctgtgaccttcgtgttggtccccacactggacctcccctctcccctcaaactggggtgagaggacttctttcccctgctgcagaggtgggcagcctctggcggggggaggggttctgtaacgaggtgttttgggaagctggggatcatggttgtggggctgacattggtgttgcctggccctgctctctgatgaggcctgcattctgcagccaccccgcccagctgtgcccagcgtgggcctagaatggtaccgaggatgctgggtccagccttcgagcccgggaagatgacttggcttccttccattcgccagtagattcccactcagccacaaggccccagtccagtaccagtgagggatgccggcagccagtgcacattcccacaaggacgcagaggtgcttgtggccccatgtaaagcttttcttgctatgccagcgaatcagttggcccttggatatgaaatacacttgcaagtggagggctcggccactctgagggctgaccagagctgtccatcagccagcacagccgggcagggctggtttacattcctcagtgcagaagaatgcttggagacaagcgctgccgaataatgacaggaatttggcagcaggagatgccctgctctgaatgaggcaggactctgaacatagtattgatatagcacctcgagtggatcttatttttcaagctactactatcttgcaactcaatgagatgtcttttgcttgcccaaggctgtgtggttttttcagcgttgcccagaccctgaaatgggctctaatggatgtcacacccagttcattccttccactcactgtcagtcacttaactaacattcacataccctgtgcctatcctcatggagtgtacagaagcaagctgtcatgatgggtgccatggtagggtggcactgatgcacccaggagggcctggggggttgagggtgttggccctagagtgctctgaggacacagggcagtcgggagatgtctgggctatgtggtacacatggagaagggttgggtgggctgtgggaaggttggttcaccagcgcttctgcttaagcagaaatagcaatctggggccaagaaaggggaacatgggtggggatgtcctcagggctggcccctaccctcacaccccaaccccgaacccctccccgcctctacttggcaacttcaacagcgtttgcggcagctgaaaattttgcataatcttttctcgtgatgcatgtgaagacacaccctttgtgtcttaggtttcctgagaagggagagggaggccggggcaccttgtcctcgagtcctgcttaagaatttgatgccaacaaatggaagcctttagagaaaaccagtaatgaaagcttggctttatttactgtgttgtgttttttatttactgctgaaggtgcggccccaagagagacagagctcttttaagaaaatgaggctcagggcgtggcctggaatggaagagaaaagctgcatgggcttcagctgctcggcgtaagtcagaggctgcactcccagtgcggggagagctcctaggatcctgatggttttaggggcggccagatctttgtgatcgtgtagcttgaagatggtggggagaaggcaggccgggtgggcatgtgccatattgagggtgcagtctggggactcccggaaggcacagcctctcctggtgtcatctagacatgtgccaaacacaggctggagggtcagggagtgggacgtatagaggggctttcctggctcggtgttgccctcttactcaggtggcatgcagcagtccgcaggagacttctccagtcattgtaaacgcacaaagggaccagtgttcaaaatggaacacttctctttgtttgggtcggtcacttcccaaatgatcactttgatccaaagaaatcccagtcagtctgtattcagttatacattttattctctaataggtacaatactaaaataaacacaaattaaaaaaaagttttattaaaacaaaactgtacaaaaaagcagtatactacattttaattacagaacagtctactgtccaaaaggcactaatccagaataggagatacaatgatacaggactcatttgaactattttattcaaaacaatagagcgcttgtttctttgaccatttacatctagaaacaagggctttttgctacagccattacacattgttataaatatgagtcctacgggtgaaggtgcagtatcactctccctagaggaggttcccattagtgggaccactgtggagctcagaggcggatggcgcagtgggtggggcctgggacctgccacatggttggcccgtcagcccctggacacccggagcttgtctttcagcctggcctctggtggttggtttctggccattactggcagccactttcaccccctcttgtgttttagcaccggcaaagtgggttctgagaagctccaggtaactggggctggaggtgtgggggatgaagcgtcagcagcggggaggcattgtggtaacctgatctgaagaaaggcagcaactactcggaagagggagacgaagcccagggacagccaatgagctgggctctacagccaggcagagccacctgctgctttctgggcaaacttctggccccagaatatgagggtctgttccaaagttcagagagatcctgtgtcccttcctggtgacccagaagtgacatcggatcatcttttgtcttggaagctgatttttacaagtggaattttgcttcccagagggaagtcaacatacagtgaccagcctgaagtgggggagccctttccctccctcagtcccaccccaggagtacaagtggctccaggccccaggtcccaccacaccacgtacgggagccgaactctgttggcttacctgtgtttggtggccaagacacctctaagccccatgtttattctttaatggcctctggacctcaggaagagagatactgcagctttccaaacagtgtcatacacatataagacaaagacaggcatctgatgttaacaaaaataagtaacaaagaaataggattaaaccaaatctcttctcacagcatcctatactacatcctccttctgcttagcagaaaattgtacgtacacaaaaatacaaatacacaattttgtagaacagtctgattttaatatatttatatatatttatatttatacgagtggcaggttagttcattatatagagctttttgcacttttggctcatatgcaacaaggcttataaattcagcttcagctttcattcaggttttatagcttttgaacaattgttttcacatttaaagcagcatccaatttgcactaggagtttgtggtgattataggaaagacaaggtcaggaggttatcgaaggggcagggcgggggggatacattccagtgtgtgtggtgatggacggaggatgccgtgggatagagcttaccatgatgaccccttgaggtagactgaacaccttacagcagactcaagacacaggtgtgactcgccctcagggacacatggtgcacaagatggacagggaccagaggagacgccaaggggaaacatgaagactaagacacacagcagccgaggcagggaggagcgcgctgcccccacacccgtgtggcagggatcccgcatggcccatcttagaaactcaactatttggtggatgctaaacacttcacttcaggcaatcccaaggcatttgctccagggtatccgatgagattacagctgttaagcttgctttccatttcataacttgctgtgcagctagttaccacccccatgctgaagagtaaagcaaagctgccgtggttcggcagtggaatccacccccagcactctgctcgcactggagcgttcaagtccggttatgtgagaacagactaggactctcttgctgcctctaattgcatttcactgtcaccctccccagtgctctgcactctcacttacattcatctcttccctagataattacaactagggtaatcaacaagcacttggtagaacctgcaaaaaatagcatctggagaactgagggacgacgaactgccaagggtccggtttggtttacatgctacagaaaagcctcattctcatgatcaccacagcactgttctcccattcgatcaccttcgtcagcctgccttcccttctctgtcaggtcacaattccattccactggcaagtttgcccatgtgtcaaatatgaatacccagtgtttgggttattacattgtctgaacaaaaatgctggattattaatgaaaataaagtgcctgggtatggattgttccatgatgcaaaaccttttaatgcaccaacaaatcatctcagcgctgcttagtgatgtgatttgaacagactgcagtcacaaaataatctgtcgtacacccatcacagaataaaggccccgtatttaggtcagacttaaattattttttaaaaaagaaacaaatactctcacactcatttccaaagacacacttgggatctgaacgcctgattgctggctttcccaagccctcccgagcagacaccctgatccctctagtctaggcagagagggctcggaaaggcagctggggctccggtggctcacgctggcaggtgagtcagcaggctcatgagctaggatgattcgacgcttcgccctcttggatgtggacacatttccaactcctaccaaagccagagctggaatgctgctctgaggctgtcttgctctcctgtcttcttagtggctactgagatttccctaagcagactcttaaattctctatgaaccaagaccaaaccacataaacagaaacggccctaaagaaagaaacgctggaaaacagtgacgaagccagcctgatatggctgtgaagcgatctctcccgctagcttgtccttgccttgttctgcctgcagaacgccagggacactggagaggggcagccgccctgtgcccaccctcaagggccagtgcagggtggggagggatggggacagggcataggccgactctctggcaggttccagaggtctgtatcttgcttaggcacttaaaaaacataaacaaaaatttatccttgaaaagtactgcatacccaacgtgaccatggccgtggaaggcagggcgagcccgggggggagatcatagaaggctgtgggctcttccaggggaggcaatgatgacgcacatggtgtctctcggcagggggagtgtcctgccttgcagccagggtgtgtctgaagacgccagtgctgtgatggctcagggaccgcagactcggcccagcagaggccttcctgtgaccgtgctctacagccccccgggaagtggctagaagaggcagggatggggaggctcctagggcctgatctagacgcccgccatgggtcggggaggcacaggctgcacacacttgctttctagagtcaccatgaggcaactactaggaaaagaggaggcccttccgagtgctccggcaaaactgaggggcagtcgggacgccctgcccaagctcccagtgcttcgaaagaaaagctccactcccccacatccagaactttggttttggtttcatggtgcccattttcagagatgcagtattaaggggatcaccgattctaacataatgaaatgtggttttcaaggcaaaaaacaatgctgcttgaaagcagccaccgctgagcacgtgtcttcctgcagcccactcttctaactctgtgcctgcccgccgtgaatctggtttaagaacaaaagagttcaatgcaacatcaccagagtggctgctgcttacattagtataacactaatgtcattctgtgttcgggcttaatagctccaacgaatgatgacgtggaaaaatgactctcacgagtttacgctgggatcttagttccagtaacggaagaaaaggagaggtttctgtgctcaaaggaagccacaaaacatgactgaaattgagactcagcccgaagtgacaggaagttgaaaaagtcttaaagggaagaaggaataagccttgaaacacaaattctgtgacttgtcactgccacagacactggtttgtgagagccatgagttccttccgagggaggaatcaaactgctcccattccaaaatcccaatggcaccccagccaccaccagatgcaaaatctggaccgataacaaaatgcaaggcacatataccttttctctttcaaattaaggaggctttttggggattggaggttggataataacgtaactgtgtacctattacaggtacagaggatccagggagactctcacgaggaccagtccacagctgtggccttgcttctgaggtggttccaagatgcccacgacggggcagagcagatcagaagagaaagaccatgagagagccaacccctagaggaccacttacgtttgacggaaaagaggtagacaagggaaggagggaagaaatgtggaactttagttagctgagtcctcaggtcagcttggtacccatgtcccttgttcaatgtccctgacaagttaccacagttccacgtgaaatgtggcaggacaggaaccagacctctacctcaaaggagctcatgcctttgctggattctgggttctagaaagttcttacgctgaccccaaatcaagatatgtctccagcaactgttatttcttggcagtcagggcccatgaggaggcagggaggcctgaggcagagcagacactgatctaattccagaaccccagacccccggtttctagagaggaggaggggccagctgagcaagatgctcctgaacacagcaggagccccgaaggaacggccagggtagcgctacaagagctggagagagaagatgggaagtgcaagagggtttcctggtctctgccttggctaactgcaggcaaggggtgccggagttcaagttcccctcggccacacaggcttcccaccctgtcaaccactgcggcacctccctgcactcctgtcctcatcactgaccagggaggaagactctggaggggccctcacgtccagaccctcacggagggagttcagctcacagaggcgggggcgatgccacagtgcgcctgggaggctacctggcactgctgcgtgagaaagcaaaccaggttagtgttcagagagggcagaccatcctatgtggtctgttctttgaagatgaacgtcctactgaaatgaaagaaatgaggggagacttgccttgccaagggcaaggtgacttgcttggtgtcgggtcatgaggcagcacacatgtccagcacggtgcccagcacacagtacgtgctcagaaaacatgggctgtattgactttgaggtggttgggagacctgtgcatttgtctctgtagtattatgatttacaatggtggcatctttagtttcctataagaataactaacttctggggtttttgttcaaaaaccacatatttcatgggtaagcactgtctcaattttcactgattttggtaagctgagttacggaaaagggtgggcgctgctggtaaaggaatatatggttggggttttctgaatcaccagagtggcctgcagaagcatttgggaagggaggtgtctctccaacttcagttcttttgaagtagcaccatccctgaagcagcacctctaataccttgatccctaagacaggggctccattagaaggttttaactgtggtgttaattgtgttttctttgagtgtaggtggatcatcagaatgttctgctgacggttttaatgcatgtctcacaaatcatagaattagactcatccagtcagctcttaccatctctaagcttaagacggattctaaattctaatggagacagtcatattttagcagctgggaaaataggaaaaggaatgctctactctttgaggtcataaatctacaatcattccagttgtcataaagataggatcccaaagaaaacagtttcaacaactgcatgcatggatcttgaatgccggtgtgcaagggctgggtgggaatgaggttgctttcagagcctatacgaggaggaatactgagggaatactagacatttctttgtaggtattttgtggggaatgaaaagataagattcccaagccctaagagcctttccctaaattctctaggtgtgtgtattttcagggaagaggaaaattttaaatcagcagcctacttcagcattctcatgaaactgaattgcaactagcatttcaactaggttaggattccttttggtatgtggagggggaaagatctgtacaaagagaagcagcaaaatatgaaaaaaggccagagctgtattctccccagtggctagcctaaccaaccccggagtgtccagacctagaaaagaaaaggctaacggtcctgggctcacccagcacaagtgcgagcctcaagggcacgaaacagcttacaaaaggccatttggcactatgtctggtgctggtattcttgtagactcattcttgatcatataattgaaaaaagacctctgcaagtgatgggggagaaaaaacaaacccacattctagggaaaggtgagttggtgactcagcagctcctgtctagtgtgacacttctggagaagagtagggggccatggtcagggactgtgtacggcatcaagcccacatgatgtcccgtgcaacagggagcatggaagagacaggaggaagagcgggagggagagaacatggacttgagtgccggggagatgctcacactggcacagcagaacagtggggaagactcagggcaacggcaacggcgggagtggggcagctgccgagtaaggggtgtgagaggagcgtacagacacgtgtcccgtgctccagtagctttagaatgtcgtgaatagtactccattcacgcctccacctgtttaaagcctgtgttagttatatgtgtcctgtcatgttgtctgctttgagtcttaggattcaatgaggaaacctcgattcaattttctgtaaacttctgtttgggaaatgctttctgatagtgacggcaatggaaatatcaagcaaccaagggaaatctgaagatcccagagagcccagcaagcagcaacatcctcgagttaggcaagcaagggcccggagctggccagaccatgggctggaatgcagtgggggccggtcagaggggcttcttctggggtcctgactgtggtttctgccagaggtggagcaagttggaactggatgttgagtgaagtttcaaagaacttagaagtcaaatggggaacaataatcaaaggcttccattttgaagctgaaacaactccaaattctgctgtttcacttaggggagaacacgagcaccatgtcattattttagtttatggagctgctgttccaaatgttcttgggagcattagtgctaagagggaacaggggatgggagcgctgccatttccaatcacataaaagacagaaattcttttaattatgaccatgccaatctacatcctgctaaaacagctaattacatgtcaggaggacactcagtcattcagaacaattgccattatatttttatat

SEQ ID NO: 501 - DNA, 7855 bp, Homo sapiens
cagacggaagccgaacgagttcctcggcggctgcaggatgggggactccaaagtgaaagtggcggtgcggatacgacccatgaaccggcgagagactgacttgcataccaaatgtgtggtggatgtggatgcaaacaaggttattcttaatcctgtaaatacgaatctttccaaaggagatgcccgggtgtttgcttatgatcattgtttctggtctatggatgaatctgtcaaagaaaagtatgcaggtcaagatattgttttcaagtgccttggagagaatatcctgcagaatgcttttgatggctacaatgcatgtatctttgcctatggacagactggctctggaaaatcttataccatgatgggcacagctgaccaacctggattaatcccaagactttgcagtggactctttgaacgaactcagaaagaggaaaatgaagaacagagttttaaagtagaagtgtcctacatggaaatttataatgaaaaagttcgagaccttcttgatcccaaaggaagccgtcagacgttgaaagtcagagagcatagtgtgttgggaccttatgtcgacggactttctaaactggctgtcacaagctacaaggatattgagtcgttgatgtctgagggtaacaaatctcgcacagttgctgcaaccaacatgaacgaggagagtagccgatcccatgcagttttcaaaatcaccctcacacatactctctacgatgtgaagtctgggacatctggagagaaagtgggcaaactcagcctggtggatttagctggcagtgaacgagcaacgaagacaggcgctgcaggggacaggctgaaggaagggagcaacattaacaagtccctcacaaccctcggtctggttatctcagctcttgcagatcagagtgctggcaaaaacaagaataaatttgttccatatcgtgactcagttctcacttggctgctcaaagacagcctcgggggtaacagcaagaccgccatggtggctactgtgagtcctgcagctgataactatgatgaaaccctctcaactctgcggtatgcagatcgagccaagcacattgtaaaccacgctgtggtgaatgaggaccctaatgcccgaattatccgggatctccgggaagaagttgagaaactccgggagcagctgaccaaagcagaggcaatgaaatctccagagctaaaggaccggctggaagaatctgagaagctaatccaggaaatgactgtgacctgggaggagaaattaaggaaaacggaggagattgcacaggaacgacagaaacagcttgagagtcttggaatatctcttcagtcttcgggaatcaaagttggggatgataaatgcttccttgtgaatctgaatgctgacccagctctgaatgagcttctggtgtactatttaaaggaacatacattgatagggtcagcaaattcccaagatatccaactgtgcggcatgggaattcttcctgaacactgtattatagacatcacgtcagaaggccaggttatgctgactcctcagaagaacaccagaacatttgtaaatgggtcatctgtctccagtccaatacagctacaccatggggacaggatattatggggaaacaatcatttcttcagactcaatttgcctaaaaagaaaaagaaagcagaacgagaggatgaggaccaggatccctccatgaagaacgagaatagttctgagcagctggatgtagacggagactcctccagcgaggtgtccagtgaagttaactttaattacgaatacgcacagatggaggtcaccatgaaggccctgggcagcaatgatccgatgcagtccatattaaacagcctagaacaacagcatgaagaagaaaaacgatctgcactggagcgccagaggcttatgtatgagcacgaattggagcagctccggagaaggctgtctcctgagaagcagaactgccggagcatggacaggttttctttccactcgcccagcgctcagcaacgcttaagacagtgggctgaggagagagaagcaacgttgaataacagcctgatgaggctgagggaacaaattgttaaggccaatctattggtgagagaagctaattacattgctgaggagctggataaaagaacagaatacaaagttaccctacagattccagcctccagcctggatgccaacaggaagcgaggctctcttcttagtgagcctgcaatccaggtgagaagaaaaggaaaaggaaagcagatttggtctttggaaaaactggacaacaggctgttggatatgagagacctttatcaggagtggaaagagtgtgaagaagataacccagtaatacgatcatacttcaaacgtgctgatccattctatgatgagcaggaaaatcacagtctcattggggtggccaatgtcttcctcgagtcacttttctatgatgtgaagttacaatacgctgttcccatcatcaaccagaaaggagaggtggcaggtcggctgcacgtggaggtgatgcgactcagtggtgatgttggggagaggatcgcaggaggcgatgaggtggcagaggtctcctttgagaaggagacccaggagaacaaactggtgtgcatggttaaaatcctgcaagctactgggttgccacagcatctgtcccactttgtgttctgcaaatacagcttctgggatcaacaggagccggtgattgtcgctcctgaagtggacacctcctcctcttccgtcagcaaggagccgcactgcatggttgtctttgatcattgcaatgagttttctgttaacatcaccgaagactttatcgagcatctttccgaaggagcattggcaattgaagtatatggacataaaataaacgatccccggaaaaaccccgccctgtgggatttgggaatcatccaagcaaagacacgtagtcttcgggacagatggagtgaagtgaccaggaaattggaattctgggttcaaatcttggaacagaatgagaatggtgaatactgccctgtagaagtgatttctgcaaaggatgtcccaacaggaggaatcttccagctccggcaggggcagtcccggagagttcaagtcgaagtgaagtcagtgcaggaatctgggactttaccactgatggaagaatgtatactgtctgttggcattggatgtgtcaaagttagaccgctcagagcccccagaacacatgagaccttccatgaggaagaggaagacatggacagctaccaggatcgagatttagagagacttcgtagaaaatggctaaatgcattaacaaaacgtcaggagtacttggatcaacaattgcaaaagcttgtcagtaaacgtgataaaacagaggatgatgctgaccgtgaagcgcagcttctggagatgcggttgaccctaactgaggagaggaacgcggtgatggtcccctctgctggcagtggtattccaggggccccagcagaatggaccccagtacctgggatggagacacacattcctgttatattcctggacttaaatgctgatgatttcagctctcaggataatcttgatgacccagaagctggtggatgggatgcgaccttgactggggaagaagaagaggagttctttgaattgcagattgtgaagcagcatgatggggaggtgaaagcagaagcctcctgggactccgcggtgcatggctgccctcagctcagcaggggcacgcccgtggacgagcggttgttcctgatcgtgcgcgtgacggtccagctcagccaccctgctgacatgcaactggtgttacgcaagagaatctgtgtcaatgttcacggccgccagggttttgcacagagtctcctaaaaaagatgtctcatcgaagttctattcctggctgtggagtgacttttgaaattgtctccaatattccagaggatgcccagggagtggaagaacgggaagcattagcaagaatggcagccaatgttgaaaacccagcttctgctgactcggaggcttatattgaaaagtacctcaggagcgtgctggctgtagaaaacctcctgactttagatcgtctgcgccaggaagttgcagtgaaggaacagttaacaggaaaaggaaagttgagcaggaggagtatcagttctccaaatgtgaacagattgtctggaagccgacaagatctcattccatcatacagtctaggcagcaacaagggccggtgggaaagtcagcaggatgtatcccaaaccacagtttccagaggaatagctcctgcccccgccctctctgtttctccccaaaataaccattctccagatccaggactcagtaaccttgcagcatcctacttgaatcctgtcaaatccttcgtgccgcaaatgccaaagctcctcaagtctctctttcccgtccgcgatgagaagaggggcaagcggccgtctcccctcgcacaccagcccgtgccccgcatcatggtgcagtcagccagcccggacatcagggtgaccaggatggaggagacctggcctcgctgacagctgccctggccaaggccgacaggagccacaagaaccctgagaaccggaaaatcctgggccagctgagccgctgccttagggcgaacttttctgggggtgcccggccccttttgagccctgccagtgacagccctgaggagccaggagcccggtggccccttccccaggggcagggcgatgaatgctttttgcacgacacagggctggtgacctccctgggcctctggaagctttgtttcttctgtacccgggtaaagtgggggcctcaactgtgcctcctccggtggatggaaggttctgggtgcccgcaggggctgggggatgctaggactgagaccctgggtggtgcagcgcctggtgatcttgctgtgtgcctgtgcctggggccttatgttgctctttctatcatttccattctggtggccccactaatgtcttaacctaaaccataattgtaaccagtgcctttcctccccactggagggcaagcccccccacccacccaggatgtcctggctcactccgcaagccccccagcctcccaccctggtcccagtttcccgcaaagtgcctctgggggaccccccagcctcccaccctggtcccaggttccacaagtgcctctggagggccctgggctctggcagatggtcctggtgccccagacgggggccgagggcctgagcccccccatccctcctctgccagggtttcttagcggtttctctgtggatgttttggcatctttagacacctggaaagtctcttatgtttgccgtttattcccttcacagaaggcttggaatgtatttatttatatttattttttcaaaatccgaaatcatttgcgagccgcaatcgtcgtctgcctgtgtgggggggcccagggcctgccttgcacgttgcagcctctctggccattgcagagctgctggcctcctgcccaggtggagggtcctggggacggcagaggataaagccccctcctcacatccctctattgcggatccacagtggccttactcttaacttggatgagagcaaaaacctgggagaatgatgtgcttctgtagtcggtgacaaaggaagaggcattgctactttatttggtgcacttttggtttctaggaaggtctttgggtcattttaacttctcggcaactcccagactctcagagtgtggggctggggcctggcggctgggctggtgcagggagtgtgctggttagtctccagaccctcacagcagccacgcccccaggcccaccgtgcatggtgtgggcgggacagccggaagcttccggggtggcctccacctcctggctggggcacttatgctcccagagcctttggtgccaggtttgtgggatgggggttagcgtctatgtgtggaaggccaccaatctagggacaggagtcctgggtcaagattcacacagccacccttggagctggtttctagttctcacatttagtcaacatctagaaagcgctgcggaaggctctggttctctagggacttgaaggcgccaacagagtagtctccatggtgggcctgtcccagccctggctgcgaggacaggttgtctttctctccccagttggcgagggacacgaaggctgcggccgggctggcagagggcccggcccctggggggaggcactcctccagggctctccctgtccttagccgattttgagggaaccctgtggcacctgtccctggatgaagagctgtcacctctgccttgccctttaactcaacccgcttcccagcacagcggctttctttttaaaacctgtttcactgagaagtttgtttttgggtccgctggtgtcactatggcctgggtgagaggccagcactgctgctgccctgaggggaaacgcctgggccgtgtagtggggacgctctgggaatggtggcggacgggcagcgtgggtgggacctggcacttcgtggtggctgagccatccacccagcagcggcctcctgtagcaccatcttgggaaagtcctgggggacgtgtgtgtcgtgctttttaccatcggtttgacttacagtggagtagaacgagccagagttcctgacttgagcaggtggatttgggcccaggccctgttcactcttgcttctcggtgcggactaatgtcagcttgtggctgggaaagagggatgtgcagtgacgtggtcaccaaggcagtgagccccgctgaccccgggccagcacttggcaggcaggaggtgcggtctccagagtggtgggccagggcgggctggcctccgtcttctatcttcttttcttgcctccctgaccagcagactcacctcccaagaacgcctgcccgcccacccgccttaggactcccgatgcgctcctggaaggccccaggagtggcaccttagtgtgggtcggcccgcagatggcacccaaggccgggaagggcagtaactgcacacgcggcgctgtcagagatgggggtgggggatgcttctgggggccctgcctccccattgtgtgcccagaacatccctggccccaccccgccacttccctcgggcccttatgaaggactgaggctccagggtgagaaggctcacttctgccccgggcactgcgtccagcagcagaggggacagggggcaggtgtgtgactgggttcctgggtacccaggcctgaccagagggagcgggagggcagaggtgaggagggggaagatgtttctgggcctaccaaggttcaacaagagaacggagctgggaatgtgactgctggagcctgagaggtggaggagttctgatcccccgttacttcctagcattttctcctcttgccttaaaagttccctgtatgtgaaacgggaagtcctgagagtgtgtgttggtggctgtgcgcacgcacacaagacgggagtcaccctgtgcttcctgcccaagatactgacccattgaacccccaaagcatctttctctccacaaagtccgtggtgccttcctggtgggctgcagacactaatggtgttggggggtcttggaacagcttctctatgtgtggattcgtgtaaatgcgaagagttcacatataaagaagtgactttgattctgtgattatattgatttggtacacagtaaatgggagtttaaaaaatccaaagactctaatgacttgtaaagactctaatgatttgtatcatgtaatgaactaaaccacctgtaattttgtaccgtatgtgtctttccatcaaatgaccaacagcttctcaataaaaccagaccatttctcacctgc

SEQ ID NO: 502 - protein, 1493 aa, Homo sapiens
MGDSKVKVAVRIRPMNRRETDLHTKCVVDVDANKVILNPVNTNLSKGDARVFAYDHCFWSMDESVKEKYAGQDIVFKCLGENILQNAFDGYNACIFAYGQTGSGKSYTMMGTADQPGLIPRLCSGLFERTQKEENEEQSFKVEVSYMEIYNEKVRDLLDPKGSRQTLKVREHSVLGPYVDGLSKLAVTSYKDIESLMSEGNKSRTVAATNMNEESSRSHAVFKITLTHTLYDVKSGTSGEKVGKLSLVDLAGSATKTGAAGDRLKEGSNINKSLTTLGLVISADQSAGKNKNKFVPYRDSVLTWLLKDSLGGNSKTAMVATVSPAADNYDETLSTLRYADRAKHIVNHAVVNEDPNARIIRDLREEVEKLREQLTKAEAMKSPELKDRLEESEKLIQEMTVTWEEKLRKTEEIAQERQKQLESLGISLQSSGIKVGDDKCFLVNLNADPALNELLVYYLKEHTLIGSANSQDIQLCGMGILPEHCIIDITSEGQVMLTPQKNTRTFVNGSSVSSPIQLHHGDRILWGNNHFFRLNLPKKKKKAEREDEDQDPSMKNENSSEQLDVDGDSSSEVSSEVNFNYEYAQMEVTMKALGSNDPMQSILNSLEQQHEEEKRSALERQRLMYEHELEQLRRRLSPEKQNCRSMDRFSFHSPSAQQRLRQWAEEREATLNNSLMRLREQIVKANLLVREANYIAEELDKRTEYKVTLQIPASSLDANRKRGSLLSEPAIQVRRKGKGKQIWSLEKLDNRLLDMRDLYQEWKECEEDNPVIRSYFKRADPFYDEQENHSLIGVANVFLESLFYDVKLQYAVPIINQKGEVAGRLHVEVMRLSGDVGERIAGGDEVAEVSFEKETQENKLVCMVKILQATGLPQHLSHFVFCKYSFWDQQEPVIVAPEVDTSSSSVSKEPHCMVVFDHCNEFSVNITEDFIEHLSEGAIEVYGHKINDPRKNPALWDLGIIQAKTRSLRDRWSEVTRKLEFWVQIQNENGEYCPVEVISAKDVPTGGIFQLRQGQSRRVQVEVKSVQESGTLPLMEECILSVGIGCVKVRPLRAPRTHETFHEEEEDMDSYQDRDLERLRRKWLNALTKRQEYLDQQLQKLVSKRDKTEDDADREAQLLEMRLTLTEERNAVMVPSAGSGIPGAPAEWTPVPGMHIPVIFLDLNADDFSSQDNLDDPEAGGWDATLTGEEEEEFFELQIVKQHDGEVKAEASWDSAVHGCPQLSRGTPVDERLFLIVRVTVQLSHPADMQLVLRKRICVNVHGRQGFAQSLLKKMSHRSSIPGCGVTFEIVSNIPEDAQGVEEREARMAANVENPASADSEAYIEKYLRSVLAVENLLTLDRLRQEVAVKEQLTGKGKLSRRSISSPNVNRLSGSRQDLIPSYSLGSNKGRWESQQDVSQTTVSRGIAPAPALSVSPQNNHSPDPGLSNLAASYLNPVKSFVPQMPKLLKSLFPVRDEKRGKRPSPLAHQPVPRIMVQSDDIRVTRMEETWPR

SEQ ID NO: 503 - DNA, 151052 bp, Mus musculus
  misc_feature (1)...(151052): n = A,T,C or G
aacctcaaacatttagtcaatatatcgtatctccaaaagagaagaaagccatgtagagtaaagagctaccgtttatgacttacaataatcttaaaatcaagctgaggtgctgtaagtgcagtcaacatgcacagtgcaaagcacacgtgttgtgtattcagaatcaaggttgtaatgaagtcatgtgacataacacagatgagcactgctagaaacatacctgactccttacatgtttaatctgaggttttagtcactaattattacggcaattttttttttgtgtcccctgcccatgcccttgtggggtctgtcatttaagccaaagaagtttgggtacaggtgagggctaaagggagaatgtaggggggtgtctcataagaacaagcactgcctgcttcaggctagggatggttagatggccacagctactggagatggtaaagactgcttagaagacagagggtaaggaatgggcatgggggggggggcggctagagataacgcaagatacattgtaataagtcctgcaacattccaactcttccccggtcactgaagtacaaatcagtcagtcagccctgtaggaaggaagttcattgtaaagcatggttccctctaggaacttttcttcatgaatgcccagaaaggaagctcttaatgtgaaggaacaggcagccccttcacaagaggcctctgtccaagccaggctcagcatcgccttgactagcaaaaagacaagagactccaatttacctgcccatcccctctgcctcacagatgccgatatcaaaggaatcaaaaggaagatacctaaactctgtctctgaattttttttcttttcctcattttttctctttactgagtagaattttagtatcttttcttagcctatgtttttagcttccttcttgtgctgacctaatttattttgcataatttcagcaccatgaatctgctcatctctcatgcttttcccttcctcttgctaacaacttgctgcttcttccttctgcccttttctgtgctcttcctttcattatccttgttgtacttatactattagcgtaagttttaacttcatctcttactaagttattatgctgttttattttctaaggctttggtgatgtagtcgttggcttcaaccaatccattacaatcctatgtctaaacctgttgttgtgttgacattgttgctttcacagaactgttttctcctctttaagtgtctgtgtggtcttgaggattgagccctcagtgaagaactgtttactaagaagacctaaataaaacaaagcctaactataccccaaatgggaagagagccttcccaactgatgcacaaaccccaacacagaaactcaacaagcatataaaatcaatgcaataaactccaaaagatcatagttccttaataactgtgcctaaagagaattggatgattaaaacaatgtacaaaggattctaaagtctaattataagagacaagaaagaagtctcagtgtttataagtgatactattcttgcagaggacctaagttcagtttccagcacccacaattgatggttcatccctacctagaactctagttccagggaacctgatgcccctccacagtcaatacactcgcttgtatatacctacacaaagacatatacagaaacatataattttaaaaattaacgcttttttaaagtctaaatttaaatcaatgctttcaaagacgatacaaacaaaaagagaatgagttaaaattgtcagttcaggccttggataagaaagtcaatgatgcagatgaaaacaaacactttaaaacatgttggaaagtttttaaaaatgcaataagtcacatttaaaacaagctggaaatcaaccatatatgagatcaagtaaaaacatcagggactgaagacacagtcaagggcttattataatcaaatctcagtaaagaaaagatgacaagcatgacatgcaagaactcagggacatgatcagatgtaccatctcataagaattgaagaaggagttataaactgaaagcataaaatatttatttcatggggctggtaagatagctaagctgttaagagcactgactgctcttccagaggtcctgagttcaattcccagcaaccacatagtggcttaaaaccctctgtaatgggatcagatgacctcttctggtgtgtctgaagagagtgacagtgtactcacatatatacaataaaggaatctttaaaaagaaaaataatgtttatttcatgaaagatgccaaagtttagggaaacagatggacatccaagcaaaggaggcatttaggacccccagaagacatgactagaaaggaacccctccctgatccactatagataatatgctagggctaaagatcaaagaaacaacatcacaaactgctagagaaaattaaaaaggcaagttcatcagaatatcgaacatcttagcagaaaccctaaaagccaggaaagtaaaattaactgtcaacaaagatcattatatccagagaagcaatccttaaatattgatggagaaataaagatttcccaagctaagcatctactgagccaacatttcagaagacacttgaagggtttctatacaccagaggaagaaaaaagaattgtaaacacaagagctcacaaaggagtatgctttgtaagaggagagatcagcaaatgagaactaggaaaaaatcgaccatgtccaattcagcaaaccaacaaatccctaaaatgaatagtgaagaaagaaaagaacaaacaatctttgattcaactaggaaaactgccaataaattataagaacaagaaaattcttcttaacaataaccttaatatgaatggtcttaactcttcaaccaaagagcacagagaaagtgagtgaactaaaaatatgaaccaactgtttgctgtctgcaagaaacatacctgactgtcaaagcaaaaaacagaaatgacaataatatactaagagattagaaggcaaaaccaagcagaagtgggtatatccgtatctcacatagttcatttcaaactaaaattagatatatgaagaaggttactgcatattaataaggggaatagtccagaagacacaagtgttgacatgcttaattttataaaatagacactactcaacataaaataacagatctatctgcaataagagtgtatgacttcaatctctcactcttgtcagttgatgggtcttccaaacaaaagataacaaagaaacctcagagttaatctgctttatagacaaagtggacttcacaaacatctccagaatattccatgtaacacgttctcagtattccatggagttttccttcaaatagatcacattttatggcataaaacctgttaacagaaaaaataatctggcatcttatcagatcataatggaatataaaaaacaaaatcaggaaaactgcagggtctatgtaaaggcgtgaagcatgaacagtgcaaccttggtgtggctcactgaaggaaacagtggaagggagacaattcctagaatccaacaaagccaaaacacagtttgacagaacttttgagatgtactaaaggtagctccaaagtgggggtttatagctctgagtgtgtaaatatagaagaaaacctgaaagaagcgtctagagaaatggctcagcagctaagggcacacactactcttgcagagtattggagttcagttcccaccgcctacatcaggtgatttgcaatcacctgtaactctggccccagcggaactctattattctgactttctgggacatctgcacacacacacacacacacacaccgaccacatacacataactaaaaataataaaactaaatcttaaaaactgttaagaatacaaataaacaacgctacacttccaggtcttagaaaaatgaagcaaacaaactaaactccaaaatagtagatggaaagaatgataaagatagggcagaaattaatgaacttatcattaaaagaatgaatcaagcaaagagttgtttccttgaagagataatatcaacaaaaccttagcccaaccaacacaaattaacaagattagagatgatgggaagggggcacattagagcagataataatgaaatttagagggtcgttatagcacactttgaaaaactatttcagaaaattagaaaacagaagagaaataggtaaattcatagacacatgtctaccaaagttaaatgaagagcctataaactatcagatctataacaattagtgacattgaggccctagaaaagtctgttgcatttgttacttttattgtcactgtgatcaaatacctgcaaagaggcaacttggggagcatttagtttgggttataattagccagaatatactgcataatgtcagagaagccatgttggtaggggtgtgagggggctagtgaaattacatccctttggaatcagggagagaaggatgctgcttccgtttctctctgtattcagtccaggccctgtaggatggtgctacttacatttagggtgggtttttcctactcagtgtcgtagttactgttctattgctgtgaggagacaccatgactaaggaagtgtatagaaaaaaaaaacatttaattgtagccttgcttatagatttagagggtgagtccctaatcatcatggcagcaggagacaggtatgtcagagggtgctggatgtcagagggcatttaggaggggcaagaactaacaaatgacgctctggagatgggtcgttttgcatggctgccatgggtaaactctgaatttctgggccttcagagaccccatctaaggattgatttttgttgttgttatgtctttcctatcattgttaaatagtctaatgattcctgggacttagccccaccctattgggtagatttcctgcaaatcaatgaagatgtcctctcttgttgtaatgctatgtagacaaactgatggtttcataattcctaataatgattctatagaactcctaaatttatacacgtagttttgagccctctatagtatgaaagctgcaattagagttctgtaaatcttcatgtgtcatgaactaattgcactaggatatagaaagctggcttggaacaaatttacgatcaggaaaacattccttctaggctagctgtgaagccattatctgataacacaaggtcataagcaattcattgtaggtgtaaggacagaaaataacatattggctggaactatcaatacaaaacttcaaaactaatgagacacaaggtagatgatttgccttttgacaaaaccatgctgacttttatttaacatcaaattattgcttttaaactttcaatgaacttatagagctagaatatggataatgaatgtttagttaggaacatggaaatacatggaaacatttcttctgtatctccttattgatttatgatgaacttttcaacatgaagatacttggcataccatgtggtcatttgtcctgagaaagtataagaactaagaacgacaatgggaaaggattctcctttttccttcctctcaggaataaagatttgagcctcttttcaaagtgagtgatttttctctgcaagcatgactttctctggctggcagagttaatacctgatctcaaatggtattacagagcagtagtcataaaaaccacagtactagccccaaactgacacataggccaatgggatagataggatggaggacttagaaataagcacgggtacagccagctaaattctgatagaactgtcaaaaacacatcagagaaccagcaaggccctgaaggggagctgggaaaccagaatttccacaggtacaatgaaaccagatccttatctctacacaaaagcaattcaaactgaccaaaggccttaacttaagacctgaaactttgaaagtgctagagaaaagcacaggcaaagcacttcaggacacagtcccagcaaggactgtagaagcaggacctgctgaggtttggtctgttggctgtgtattgtaatgctaaattccttacctgaatgaaggtctagctgccagccacagttaccaactttttctgtgcaaaacttgctccttaacttaaaactattggttaaataaaaatgtctacaacccattgctggaggattagaggtaggtaggttttaagttagctggttgggtgagagaggaagagggacaagggaatgggaaggaggccaccacgaaagaagatggaccgtgagcacctggccatgagtaataacaagaatctggggcaaacctctgggaagaagccaggccagccattagaaaagtagataagtggtgacccccagtaattgtcaaagccaaataaaataaccacagtctgagtctcattcattcgtaagctagatgtggataagtttaaattatattaaattaaattagaccctaagaacacaagctcccacgttcttatgacatctgtcaatctcaagaattgacaaatgggaatacatgaccttaagaagcatctgcactatgtatcaaaagatggcctagtcggccatcactggaaagagaggcccattggacacgcaaactttatatgccccagtacaggggaacgccagggccaaaaagggggagtgggtgggtaggggagtgggggtgggtgggtatgggggacttttggtatagcattggaaatgtaaatgagctaaatacctaataaaaaattttaaaaaaaagaagcatctgcacaacaaaggaaacaatcactgaagtgaagagacatcctacagaatgggagtgggatggggtggggcagggaggggtgaggtgggggagggctctgccagctacatacctgacagagaggattagtatccaagctacataaagaactacaaaaacatcacaaaactaaattgtctgatcaatagatggacaaataaacagttctcaaaagaagaagtacaaaaccatcaataagtacttgaaaaggtgttcaacatccttacccatcagggagatgccaattaaaactactttcagagccgggcgtggtggcgaatgcttttaatcccagcactcgggaggcagaggcaggcagatttctgagttcgaggccagcctggtctacagagtgagttctaggacagccagggctatacagagaaaccctgtctcgaaaaacaaacacaaaacaaaaaaccaaaaaaccaaaacaaaacaaacaaaactactttcagattccatctcaccagctaaggctagctggttaacagaaaacgtctgtgtcattcagccataaatcctgaggaaagagttgaaagaatacaagttagacaccacagagactcttgatgtccatgtttgctggatctatatgcacagaagccaaggtatagagtccacatggatgtccaccaacagatgagtgagagaagacaatgtggtacacagacacacacgagttttattcagacacagagaagaacaaacaattatgtcattttttttctgaaaaataaatgaaactggacatcactgtgataagcaaaataagccagactcagaaaaatatcaaacgctttcttttatatgcagaatatagattttaataattatataaattgaccttggtggtgctggctgcttattcttcctatttagccagaggaaatagtgagactgtctagggcagcagttctcaacctgtgggttgtgaccccctttgagactcaaatggccctttcacaagggtcacctaagatcaacagaaaacacagatatgtgcattgtgattcttaacagtagcaaaattacagctatgaaatagcaacaaaggttattttatggtgggggggggggtcaccacaacacgaggaactgtactaaagggtggcagcgtaggaggggtgagaaccctggaggagagtgaacaccagcccaacaggcaagacactgggtagtgagttagcagcagagtacctgttataatgaaatatgctcgtttttttaagaagtgaccaaaaaaagtgctcagagaagtttgaaggaaataatatgccaggtaaagaatacaacgtgtgtgcacacagaacagaagaccttactagagcagagatatgggtgtagttcatatgtgtgcccacatgagggcagcacacacaaacccagctagtcttcaacagtcagccagctgccattccctcaggtagatctcgctttacaccacaagacgctttacccactctttcccaagtgcaaggattcagaaagccaccccctgccaacaccttacgccaccccactgctcacaccctctggtagttttttttgccctgtggtcatgtaccccatactctgttcacagtcttcactgctcccccaactctacccctccacttgtctttgagtgcggatagttgataaatggggcccttcaggatggtagagagggtcctgctggcccggcagatggaaggtatattgtggtgttgaggcatttgagggtggatgacgctagctttagattagggtttttagtagacatggaggatacagctaaaatctacattttgttacatcttaagacatatgaactttatagctttaattgattttatgattattgctattggtttttcgggacagggttgttctccgtagcctggctgtcccgtaactcactcggtagatcatgctggccttgaactcagaattccacttgcctctgcctcctgagttcttaattaattaagtctgctttctcttgagaagccatcaccaccactcggaaagatgagtgttggtagcttctgatggtctcctggggcagcaggtctgttgaacttggaggtgaagtagggtgaagaagtgtcatgaaaactgtggctttcacagggagttgggcagcttgatgttgcagtctcaggactgctactatcagagacagaactgtgactaaaccccaaaccccaaagggcacaggataaagatgtctggggcagggtctcctgctaagtccagctcactgacctccacttaggagaaagtcagaatctttctcgggctagagaagtaaatgatgtcgcaacttagtactttagatctgcctcaagtaccactgccttactgatgcagtaaagagatggccagcctcttcggagggtcacggatacaaactgatgcagggagagggccacaggagaaaatcattgtaaggcttctctagtcttttctggttttgttgttattaatgctgggttggggttgggttttggggtttggggtttttgtttgtttgtttgtttgttttgttttgtttttgagacatgatctctttcagcctagcctcatcttgaactcacctcatagccaaggatagacctccagagcgttggaattacagatatccaccacctacactcagtattatgcctttggttctgggaatggaatccaggctagacacacattctaccgtctgagctacattcccaaccccttccccgactgttttgggactgtgttctggtcctccagggtctgggctcagaaacccagtcctaggtgtttccaatcctgtaccagtcatatcgggcatccctaatatttatctgacctagggtgagggccatttcaaggtgtggagccatgggggccactgctgagaacatgggtcaggtctggtgactaaaggctgcagagaagggtgcctggaagaagccaggtgtggtaggagttggaggtcaaccaactgcaagaggtccggagcacctgaggaccccaattggggccctaaggcaatgggctctggcccccgggtcagccgggcagctccaggaattgcaggcggcatctatttcagagtttatggtaagaggttggagcctgcacacacagacagcacaccccaccctttaaggaagtggagaggagagcagcaggggtgtggttaacgaccgagaggaggagggggaaaaacaacctgtcagcctcttactcagcctctgcaggcagagccgcgcgtcctacctgcggcggctgcgctcacctggcccagcccggagccctggcccgagtccgcgcctcgcccgagggtaagtcctgcgtgttcctacccagcgccggggtcagggacacttcgatcgctcgacttaagtggaaagctggagagggtctacagttccagtccttcgggaagcttgagaattcctggaaaggtagccaaggacccagaaagtcggaggcgcggagcaggtgctttccctgagcttgccgccctgagctagggggttagggagggcgctagagaaggcatctatttttggagttctttttaagactaaagggtgtttctccctttttgtcctgttatcttattcagagaggggcgactaggggcacgattgaaatcggctcagcaacaatgcttgtctctaaaggttggatttgggaactccgaacccaaccgagggcttcagaacccaacttcagctctagctcagacctctgcccaggcacggcgcgctcttctccacagtgcccttcggcacccatgtggcctatcttcccacccctgcaccacccctatccccagcctctgggacgttttgtttttgtttgtttgtttgttgttttttttccctgaagctggagctttaagacaaacggggttctccaagaggaaccataccatagtgtgtgtagtgtgtgtagtgtgtgtgtgtgtgtgtgtgtgtgtgtgtgtgtgtgcgtgtgtgttcgtgctgaagttccaaagttcacaccagccgcactggctcattttgaagctgctttccccatgccccttgagggttaagttctgggctgctgttcctgctgccaggctgtgcgtgggcaaagctttgggtgggtgaacagcgagcatatgggtgacgttctgaggcccaccaagtcctgccacctgccctcaccctcagccagatgacaccaatatctcccatcacccctatactggaagcaagattccgattccgctgtgctccttgaagaaaccaagctgggacctgagggttgggtgtgtgtgggtgggggggggcattagcccgggagaattggaaagcaggagggagaagaaccttagcagatcttgtaccagtctggagcccgctgagacaatgtgcatggtttggaaagggtaggggtaccaggcagccgcagtgtgctcaggtcaacaaactcttgcggttcacagtagctaccgggtgggggcgggggcgcaagaaatgcagagcagggggtgggggaaaagtgactcacgaccctaggaaggaaggaagaagtcacattcataagaaagacctaactttggcaggacagtctgccttctttctttcacttactagcatccttcctgaacccaggtactcctgtcaggtgaggggagacggaggagcctgtagctccagctgcccagctagggcggagctaggatgggcgggactgtcgtgagaagaaatgaagttccaccaattacagtgccagagggtgggcagggctgggcagggacaggtcctgaatctgtggcagaagcaactaagagaactgaagatcaatagggattaactaaccgaggagaagaaagcaggtcagagcctgagaagtacaaatccaagggctaagagcggcaagagataccggggaaaccgaaagtagccaagaagcccatcttgttaggagcctagagttcaggggccaggaggagctgcaaccttaaatagaggatgctccccagcctaggaaggcgtgctcaggctgccatggcaactcctctaggagcaaagcttggaacctcaggctgcttgaaacttcccagggtgcctccactccgggatggaggtgccagatttagcaaatgaaaacatggggcattcagatttgaattttaaatgtacaaatgtgttgaagacttggttctcagcgctaagtatgtctcatgcagtatttgggatatacctaatactccggcgttactcacagtttatctgaagctttactggatgtcctgagtctgtctgggacgcggaggctgatgttcttccgtctagactgcgaactaacccagcacctcaagagcaggctcagggcatatttattttgtgacaaatcctgacaggtccagttggaggctcattctaggactggtcatgatattgctattgagagaagaaaagcagcaccccagacagcttacacatctgcacagccgagggagggtctagggaccgtgaaagcagcttagtccacttggtagtaacttggaaagacactggaccaatggtcctagattcagacctatggggaaactgttggattcgctgagcctcagagcctatttgtcgaggtttagggtaggagccttgataatgtatgaaagccccacttgagtgctatgtatattaacttgaaacgacacattcacagtgacggaaagagcatccacaaagtgcctggggtgccatcttctcctgttcgagtttatagagtgtctggagaccgcagggaacctgcattggcttggttcctgtttctagtgagaaaagtttgtctctcaacagaggcgggagggagagtgagacaaagttatttcctcagggttccttgcccatccaggaccctgcttcaaagacagaagagacaaagggctctcttcctggagggcagcaggtggggagagaggactggctcaaaccttaattaactggagagaaatatggatggatgaaaagaaaatgtgctcaaaacacccaaaaatgcaccataaaattaggttttcattatcgtttgttttataataacttccttattagaaaactcaagctggggcaagaagaaggaagggcacccagtgaaacaggttctggctttaatgagaacattcctaaggagacctcctaaaagaggagagagagagagaaagggagaagagaggggaagggggagggagagggggctctgcaccctacatccagcccctcccaagcttttcacatccccttgctggatgctagcagaaacacaatcagaatcctgggttttacctgtcagacttgagactccagnnnnnnnnnnnnnnnnnnnngaagggagggagggagagagagagagattcccttgtgtactaatgggttgtattaaacggtccttttcttcagtgatgaatctctgcctccccagcccagcccattttgtccccagtcccttaagggtgccatttatccgatagaaatagatatattctgccaatgaaacattcaaatgatatgttgtttatatttacatgcccagggctgtgctagatctcacagaaaaggcaagtgtggctacaaaggcccaccaggttttcaaggaaaagaagcattacacacacacagagagaatgtggatgcatgtgtggggtgcaggccacacaatctatcagaagtcattgctcccccacacttctaactaagatggacaaagttcctcctagcattcctcccagagttatcatgcccagctcagagacgctcaggagcttttgtgtgcaacattccagcctcaccatttttcaggaatagaaatctccctaacccagggctgcttagcccttcctgattggtgcggtccccagtctctcatacacagctggggatttattatctcagactacctggcctgccggggcaatgggaacttcagggagttaactaagaggcggagaccagagaggcacagctgggatggtttgagagtcagagcaaggatgagagaagggaggggtgtgtgtgtgtgtgtgtgtgtgtgtgtgtgtgtgtgtgtgttgtgtgcttctcttatctttcaggctggcctcaagacaagggagggagagcaggaccctggtaacactaaaaaacaggaacttaggattacagtgactaactggaccttctctgtgaccttctggaggtcatttagctgtggcttccttatctataaggcagaggtggtaagatgatgtcatctgcattagccaggacacaaataaaagagaggtgacagctgccatcacccagggcagaacaggagagctccctattgccccctcctgagtcctgtgctgtgctgggtcagcctgtgagtgtcagagcattggaaatctagtggagaagccaggccctgagagcactggggctgtagacatgcaccaagaagtatagactattgttttattaattaatattatccctgagaagggatactcacataccaacttaataacctctgccatacataaaacacaacagacacacagtagatactcagaagtgtgaactctcccatgtcttgaaatttatgggctacatctgagcctataagaaactactggttgttgtggttgttgttgttgttgttgttgttgttttgtttgactgtgtagcacacaagtttgtggtggggcagggatggagtgggtgagggggtcgatcaagtgcctgtgtatgcttggtataggttggaggtcagcctcaggcattattatccagaatgccatccatcttgattttccagatgtgttgtagtttcccttcctgttgctgtgatcaagttctctggcaaaagcagcttaaaggtggggaaaatacagtcagccatggcagggacgtcaaggcagaagtcactggaagcagctggccacattatagcttcaacccatacatggtgtcccccacagtgggcgggtctttgcaccccaattactgcaattaagactctcctacacaggcaaccccagatcttagattctgttgagctgacaccgccgaccaccacaggttcatttaccatgaacttgctcattctgcccggccagggcgtggctagcaagccgcaggagcaagcctagcttagggtgaccagcaagcggtacaagcttagtctctccaccgcatggatcagctgtgccatttctcctgcctgcttctgctttaagttttctgagataaggttatcctgtgtaccccatcttggcctcagacaaccattgccactccacctgctgcacctctccccacaagtcctgagctttcagggatgtactaccatgcccaagaattttttttcccccggtttggggacagaattgaggctctcacaaatgacaggcagacacactctgagttccaatgagttccacctcagcttttttctgtcctattcctgaagccatagactacctctgacatgagaagagcattccccaggcggcaacgcagagaggcatgaggcaaacacccagtagtttttatcttggcttcccaactcccaagccagcatgctctgggtacagctcttggccaggaaagatgatacccaccgatacccatcagtccctggagcttgaagagccatttagtggtgtaggcagcagaacatggtggctattctttctaggccttttcatttggcatgcaaagctctgagctgtgtgaggaggtggcaggggagggggcagccttttgagtcactctgctgtttctcaaggtataattattactcgagatgacaatctgattaagagagcagactccaagctgcacattttgatgcatttctacctagatgccatgagcagattgatacagggtagagtttggttgttttgagagatagatcagacagactcaggtggtcttactggtgggcacctctctggattctggctctctctagcttttccttttccccagtgctaaaggggccaggacaaggcacatgacaatgtgattgactctaagatggaccatagccaagcccgggaagatggagcacctctatagctcacttaatgttttctcccttccaactctcctgacatagtcactaacattcctttaaccacaatttcgtgacacccccacctccaccacctccaccacctcctccccccaccattctctgccacctctccccaatttggtgtctttcctgtacccatgagcctgctgggattttcttcccagtttgaatttggctctcccacagggttcctctctgcagcagaggttctggccacttgaaacaggcacactgtgtcctggtttctaaagtagctttgtcctctttccacttcctccagtgcccaaagctctttgttgctcagcagcagcatgtggtgatagcacagttacagtcgggcttctcagttcacctccacaccttcagactctggggttgcctctccaggtacactcaatgctggctccccaacatctctacgtctgctcttagcaacatccggttcagccccttccactagtgacacggattctgggctctgatgttcagagtcatcaactgaagtagtcttaagggggttgtaagtcctgtgggtcccaagcttcaggcttagtgctatggaacctccacctgaatggtgcttcaaaatacccatcagtccctggagcttgaagagccatttagtggtgagtgaataaagacctgggcttgagagctggggctaaatagctttgaggaaatttctctactttttaatgtgtgtgtgtgtgtgtgtgtgtgtgtgtgtgtgtgtgtgtgtgtgagagagagagagagagagagagagagagagaccattgttattagacgcgttctcacgaccggccaggaagaacaccacagaccagaatcttctgcggcaaagctttattcttacatcttcaggaaaagagagcaagaagcaagagagagagaaaagcaagagagtgaaaaagcaagagagagagaaaagcaagaaaaagagaaaacgaaacccctttcctctttaaagagaacaacaattgcctcggacgcatcactccctgattggctgcagcccatggccgagctgacgttcacgggaaaaacagagtacaagtagtcgtaaatacccttggctcatgcgcagattatttgtttaccaacttagaacacaggatgtcagcgccatcttgtgacggcgaatgtgggggcggcttcccacagttcccccttttctattaataagagcaaataggccacccatattaatgagagtggagatagaggtcaaatccccagtgtgtaggtaaaggagccatgtacaggattagctcttaggctcacaggcttttacccagagcaaccctgacctgctcccgtgtcgttttgcctgggggaagggaactaggacactgaaccttcatgaaagatgacatgtctccctagaataggctcatatatgccgcagagcctttccattgcagtgcttagccttgcaactctctcgggctgctgaagcacactcactctatctcgtgcaatgagtctagcctcgtgagatataagagctgagtggccagcgacctattgcctaagcatagataaccatatatcaggggaagctccatgttctagtcctgcaagcgcctgggcaataaccaccttgtctctcctagtttgggccttaagcttacagaccaatcaaagaagcaacactaatccacagcaaagtgtatctccaaataacattaatcccacccaattttttaaagaaagaaaatgctgaggagatccaattgggtaatcctttggtcagcgacaggtccaagcgcgtggagttgacctgaagtctcaattctcgaaggatctgttcaaattcagccatccaattctgtaacatatactgaaaaagactttttgacaaattagctgccctagtaaatttaacatactgaatggaaataacacacaatcccggaaactattgttcacatccctgctgagttatttgtcataatacatctagttgtatctggacaagatctatgagttgattaaccagcatgagacctctctgtatcttgacattagctgaggcctgtttatctatgactgtagtcactgaggctgacaaagtgttaagnnnnnnnnnnnnnnnnnnnncactacgggctgacgcactacgcagggcgggggactccgcatagggcgggagtgcacctggtagccgattgccctgaggccaattagcaaactggctttcgccagccgcttttggcttttttcttgaccaattagctggctggtaatgggctgcttcttcctcccagtctgtttcctcagaggaggattcttcacttgcttcagagttactaagagctggcttcctgagctcatctagtgacgagtatctcctagagacctccgctaatcgatcttttttcttctccctttttcctctttttcttctaatctctctccaggtattcctacctaaccttaacttttcctcgggttcaagacccttggaaaggcctgtatacttattttgtgaaccatattttctctttgttcctactctttcttcccgctttacttctgatagcttgtcctgaatttcctctagaattttcagccctatcttaatcacttgatagcatgtgaaaaagaacaaaagggctcctaacaccagaaaaaattcaaggccaaacatactcactggtactctcgttccccagctgaaaagttctgaattcatacagttgaatccttcttaacagtctgctttacgggaacctttatcaccgtcgttccccagctgatgagttctgaattcggcagttgaatccttctcaacagtctgtgttacgggaacctttataaacgtgatccgcagttctggttccggaatgagggatcttccctgcgccagtcccgagtttttttctcgtcccggaattcggcaccaattgttattagacgcgttctcacgaccggccaggaagaacaccacagaccagaatcttctgcggcaaagctttattcttacatcttcaggaaaagagagcaagaagcaagagagagagaaaagcaagagagtgaaaaagcaagagagagagaaaagcaagaaaaagagaaaacgaaacccctttcctctttaaagagaacaacaattgcctcggacgcatcactccctgattggctgcagcccatggccgagctgacgttcacgggaaaaacagagtacaagtagtcgtaaatacccttggctcatgcgcagattatttgtttaccaacttagaacacaggatgtcagcgccatcttgtgacggcgaatgtgggggcggcttcccacagaccatctgtctgagtccttgggagagatacttgatgcctgtcaccatgtcctataaaatatcacaggcatcatgcatgacaggaaaacgagatggtttgggatcagaacgatgagaattctagtcttaacttattttctatctgcatgagcttaccaagcctcagcttctcacttgtaatccatttcccacatttgttgaatgtttctcttacctcccattccccatctgaaggctcttatctacctcagcatgatcaaagtcgggggaagggagaggggggaagaagagggggaggggaggataccacatggagagaaatatctttaagagaagatggagatttgtggttccatgagaaaggcactgcgtgcataagactagaggagagagactacttctgactcggatgtgtcacagagcttcctaggaaggttagggaagcactctgaagagaaaaggaagctctgtttccatttcagggagcttggcatgctgcttgtgtccttagaaaagtgtaaatgggagcctgcaggtgggaggaccagcagagttgactgactcattctaggtgtggccaagggtagcaaaaagccagagtccttacaggtgaagagagagataagacctggacgtggaagtggaagactatggatgttgttgggaaagctagcagctttattgggaaggcaccagcgggtgctgttgaagatgttgagttgggtgaaggggttaaggtccgatttggggagcagggtgcaaagtagacagcttagcagaaaacttgagcttgcgtggggcgcagacttttaacagtccatgcagggtggtctcagaggtcgagagcagtgtccagcagtttccaggcatcaaccaaggcttcaactttcttggcgctacagttttgttttgtttttatgaatttaaaagctggaaggaagggcttatgggactgtttgagcatgtagattgtataggtcgtttgcattcttcatgacccttttttgtttatgttgtggatttctctctctctctctctctctctctctctctctctcattcctgcacgtgtgttccatttgatggaccttgctgttctcaggtctgtgttcactaccattctgtcctttctacagtatccgatggcggtctctgaacacacagcaattcgatctgcagatctttctcctgccgcatctcccgagagccctccacttccaagtctaagaacatccccactggaatgactcaccttaaactgaagtcctttcctctcaccaaggtctctccttccagcaccctatctccaggctttgttctctccacacacccaggaggctcgccctggcttcctacccatccttttctaccttcactttcctccttcaaagctcactcatctctgaatcccacagattctgtttcatgcctctcattccttccttccttattttatggcctctactcaaagctcaggccttatcatgtaatgttactaaatagaattaatacctctctcctcctcccatccctaggagctctccaggatggaattccaaattcctcaaatttatgattcagggccctcctttttttaatttttaagattattatttaattgcaacattccttcgttccaaagcctctcatataccctttgcctgctcaaagtcatggccttgtttttaaattattattatatgtatatatgtctatatatatatttctaagtataacatgaacagtccatataattctacctgtgtgtaaaccaactttaattgaccctttttaccttgtgtccttaaatatcccaaacaaagcccttcacccctgccaagctgccttggtcacttgtacccacaaatctctattcctttggagaacaccagtcccatctcgcttttgcaaaccaagtcctacctatgcctgttctaaagcttgcttcacagcacacgttggaaacctgctcttcccgtgtgagcctccaggcttcttgactgccgggatctgcagcttcgcattcaattcttcctagccagggaggtgcatttccttcttcagtccttcatacaccctcagatcccatagtcatgggactccatgtccccatcactccttccctatacactcatgcctatctaaacctggctacacagactagctcttcctcattcctggcaccagccgtcacgacatccagttgtgacacagaagacattatcaagcctcttcctagatagctgtcttccttcgaggcagaggtttcctaaaacccagagaggagtcatggatcaagataaggagcctgtaaatgtctttacaaacacactcaagagtcctgcgaatgctccagactgatatggttactagttcttttatcttcttgctttgagattgtctgggccaggatgaggaaggccagaagatggaaatcggggtagcttcagtgtaaagttgaaaatacacaggagagagacccacaaggcagagattagcagggatccccaggaacagtgaccatcgtcagtgtacatactgtcgcctggacttcaccctgtggactctgaacttttggctcctgaggtcttgagaggtgcggactcctggtgtatgttaactgtttattcacagagtaatctgtcatccttagtgagaacctgactctatagaaagacaccgttggcgtctgtgctgagcctctaacctgtgttcacacctagaggtgcttgaaagattagagagccttgccctgggttggtaagcttgggtttatggtatgcacagtgtgggagttgccaacacagactctttggaaggtgtgtaattttcacctctgagctcacacatatgcttatgggaagaaagttcatagctttcacttgatgtcccaaggaatctagagctcaaaggattacgacactggggctaaggagatagctcagtggtaagagtacgtgttatacacgcagatggacctgagtttgaaccactggcatccacatacaaagctgggcatggttaaaagtgcctataatcacagttctggagtttgtgtagagataggaggttcccagaacttggttgtcagctattctagctgaatgagaatttctggttcagtgagacccatgatcactttttcttggcactttgactagttgtgggtctcttacagagagaccaaaaagacactgcaaaaagaaccttctctgattagaggtgagtactgtattatctgtgactatcaggataagtatttaaaaagcagctggacactcttatcagtctggtaaagtagtaggttgtcctctaggggctagggcctttctaaccatgggctcttaattatgtttacattaccaggtctgagttcctgcctattgagtggaacttaattccaaccacacagctgttggttagccccaaggttagtaccacagctgcacagttggatgggtcttccaggccagatactattgcaacagtgagtcaagggtttcccttcccatgaagccttgctgcctttgatgctagttgttttcttggtcttagccacgaaatatcaaagtaattttaattgagtttccataactgctaaggatattaaatactttaaaagatatattgtagacattttttattattcttttgagaactcttggttcaaatatgtggtgatttggacaaacccttaggttcatctttgaatgactagtcggcagaaagtgaagtatttaaaagggttagaacaattaggacaggaggtctggttagaggaagtctgtcactggaggtgggcttcgaggtttcacaagcctatcccagcctcagtctctctgtctctctgtctccctgtctctctgtctgtgtctgtctgtctgtctgtctgtctgtctctctctctctctctctctctctctctctctctgcttgtggatcaggaggtagctctcagctacttctccagccctacccctgcctgttgccatgctctctgccatgatgatagcggactgagctgtaagcaagtccccaagtaattgctttcttttataagagttgccttggccatgatgtctcttcacagccatactaagaaaaaaaatctacagcccatttttaaaatttgggtcacttgttttcttgatgtttttgttttctgggttctttatatattctggatttcaccctctatcagatgcatggctggcagactctcttccaccctgtgtgcctccccttcactccattgcttcctctgctatactgacactttttagtttcatgggctcacacagtcctttgttagccttgattcctgggtaaattcacagagtcctgttctgcacttgtatcatgtaaggtactgcctgtgttttcttccagcagctcagagttctaagttccccactgatgtctttaagcagtctggagttgatttttctagagggtgataataaggctctgattttatttttctacacgtggacacccagttgttccagtgcagtttgttgatgctgcctttcctatgctgtgtattttgacactttgttgaatatctgatgactataattgtgtgcagcacttaaggctacattttattttcctattccttactcgatgggcaattgctatttcccacttttcaacgagtataaacaatgctgctgtgaatctcatgtgcaggtttctgtgtggataatatgttctcatttctctgaattacgtacctcagagtagaattggtgggacacatagtactataactcgatgtttaacactttaaaacatcttattacatttatttatttgcctgcatgagtgtattcatactagggcacgccgtgtgtgtgtgtgtgtgtgtgtgtgtgtgtgtgtgtgtgtatgtgtgtgtatgtgtgtaggtcagagaacaacatattgcagtcaggtctctccatcctggggctcaaactcaggtcacctggcttgtcaacatcatctttatctgcaatgcttacatttaacattttgagtagttgccaaactattttacatagcatttgcatggttttaattatcaacagcagaacgtgacagttcctatctgcggtgggttgagtgaaagtgggccaataggctcatgaatttgaatacttgttctccagttagtggaaatgtttgggaagaggtaggagttgtggccttgttggaggacgtgtccctggagggtgggctttggggtttctaaagcctactggagactcagtctttccatcactgtctcctgcctttggatcaggaagtaagctctcagctccttcctcagcacctgcctggtcccctggtccccatcatgattgtgacagattcaccctctgaaactgtaagcgagcccccggttacatgctttctgttagaagttgccttggtcatgatgttttgtcacaatcaaagaacagcgactgaaactctacttctccgtgttctcatctgcacctgctgctgtcggtgatttttactttaaccgtctcagtggagatgtcatgtctcattgcaatttcattttaatctttttaatgatgaatgatagtgagtctttgtacaatcccgtggacgcccaagacgtttcctttgaagaagcatcattcatatcctctggaaagtattgatcatccaatccattgctctttaaagggctttctgaaacacttagtttacggagctatgtctctaataaaaatgactaaatctaaattatcgcttgaaaaggaaaacagttctgtcaaatgacctttctaagcatgcccagctcgccaaatcactcaggtggcctcagactaagatttttcccagttgacttttgttcgaaatgtggcaatttagagagaaatttataatttgaaagatctgtaagggttgggtattaaatttctctttttctgattattttttttgggggggagaaacctttaccttatagttatcatatgtgatatttaaaaaaacagatcaatggatgtcaggacgggtggctgatggagagatgccgggtagatagatggataatgaggggatggaggtataggtgggcagatggagaggtggagaatagggtgaatgatgcatgggtagaggggtggaaagaagggagggtgtatcaatggactgatgaatgagtgcaccagaaaaggaatgaagtgtagggaatcagacacccaagcagtcagtccaggtttgccgactgccctttgggtcttcttgtttcgactcagaaaagtcgattgattttcagtttttcactccacggaactatagaagagcaggctttctattgcaagtttgaaacaagatactatatatcctattgcttggaatatctttgacaagatgagggcttgcttggctcttagatgtggcacaagattttatatgacagatacctgcttcagggacaggacacatgccttcccctgttagcacttttcctaccactgtgaaaacttctaggtcactgtcagtctcaaggccattttccttctctggtggtccaggtggaataggctagccagagaccacaagctcccatgactcaccaccagcttccaaggacagaaaacacatatgggctagcgaataaagctctggtgttcagggatagagtaagcaaagaaaagggaaagcactctatgcaagaaggtaggaaagggttcagaccctggagagagagaggggagaagtagcggatgctctgtggataggctttcatggcaacaacacgatgggtgggtgcctgtaaggttcactcaggaggaggtacagtgggaattgggttctgggagcaagatttaatagagagtattctgggtggggctgggacattttttttcttttctcttccttcttctttcctgttccctcactttctctctcttttgttccttcccctcccctcgatccctctctccccccttttctttcccatcctctgctcttcccttctcatcctttctcttttttcaagacacagtactgtatagctcactctaacctctcacccactatgaaccaaaggatgacttctgaatctcctgcctccagttccagattgcagggatgacagccataagccaatgcccagtttatgtagcattagagatcagtcccagatcaaggattcatgaaggctaggtaaacactctacgaactgagcccagccccagccccaactccttcctttgctgacgatgatcagtggctttggaattaggcattcagatctatatcagctagggaaggctccagattcatcctatagactcattctatagactcttagtgttctctctctctctccctctctctctccctctccctctccctctccctccctnnnnnnnnnnnnnnnnnnnnnnnnnnnnnnnnnnnnnnnnnnnnnnnnnnnnnnnnttgtgggccaggtactatgctaagcactgggcatacagaggtgaataggaagctatcctccaggtaaggatagcttcagtgcttactacatgtggtgccagagaccagcacaaatgtcactgagtaacaccagagataccaatgctaccaaccagaggctaaaatgacttcccagatgaagtacttcaagcataggttttcaggagtggatggggccaagccaacagaagagtagtgacattcttcccactcaaagactcagaagactggctagtatgggcaaccgaacagctcaaagtaccaagagttagcagagctgtagcatgagcaatgcaaacaggatatagagaggacctctgtcatggaggcttggcactcagcacgagtctccagcagccagaagccattgaatatataggaacagaacattcagctatacaggtttttaggttgggaagacagtcagcattttgtttttgataggaggattcgggccctaggccagaggaactcgagtgccaagcacagagagactccagctgggagatttgcagacaagctttctggggtgtggtcaagggctatgagccaggctgtgtcactgatgtacagcagggcactctgtaagtcccccagggacatagacctcagtgcctgctatcccacttgggcatctgtcatgtcacagctgcccatacggctggcggtcagagaagccagtggcatggagtgatcccccaagggctgttcacaaggagcccacttcccgctttcttctttagtcccagtgtaggctgtggaggaaaggggcagagggaacagagggcttggccaggttagcaagaaccaacctgcctccagcagaggtgcagagggtgagccagggcttactctacaggaataggaaactcactaagagtgtgcctacccaaaatgcatgggtgggcagatgtgtggttttgctctgacagttggaacaggtgattacaactgattcccagaatgtctggggtatgtgtgcagggtgagaggactctggcatagggaacggactgggtgctgacagaggctcacacaccccttccccccaggaggcctctcctagagcacgtggctgctccactcagctttgcctggcaaatgttttcttgagataaaattattttttcacaagtacacgctttgctaaatgaagcggtgggaaggctggggccttgttttgtgccctcggcttcccagtcctaatccagcaaatgtcaggattcacagcttgtagtccgggaacatttggtcagatctggggaggctttagagaaaagatgtgcagggaggtggaggtcagagatggtctctggcccctctgggaaggatcggcagcagagagacttggattaaaagacattgtggagccttaccaactgccgcaatagctcacacacaacttccacagctcagggatacggctactccagaggagaataagcataagcagcgaacacgtgaggacccaggaaaagctggtggtgtcctcacagtgatgactacctctccctgactacacagtggccttagactcccggcatagcatggagtcgtgcttcttaaggccagagactcaccgaagcttggattcctggctctagccccacgtttttgtgcttgtctagcgtacagcctgagcatcattcatccttctgacagccttgcgagtagaccaggggccatattttgaaatcttctggagtaaggggctgcagaaaagcctcctgagagcccttcagccatacttcttaagggagtgtattagaaacccaaaagcttggtgagcagtcccgtgtctgtctacacaggcgacgattgcttcctctttcttgtttttttttttgggggtgggggtggtggtggtggtggtggtggtgatggtgttctccatgcttcctctacccaaaagtggttctgatgtacgctgcttaaagcagcagtgccggatggtccaggtgaccttccatctgctccaggtacactgaccattaggccagtttgccgggctttgcttttgtctctccatactcaggaccatcactgctgatccctacctgtcccccaaacgcataagtctctgtgctgtttgtcacacaggcaaacttctgctttatggcatccttcattgcacagacagcttcctcaatgagctcatggaaccagaggaagtcttggttgcctgtgtcctagttgatgggttagtcacaaggaggctgtggctgttggctgctgtaggacaggaagggactagaaacaaaccaagaccaaactgagtctcccccacttccactcccagaagcccatgatgtggggatctagctacaaaggtctgggcaattggaaagagggggtagctgctagacccaccaggagctgagctagctgagagccacagtccatcagttccttagccttgaaaatagtttgattaccaatcttacccagggaactgctactcctggagttgtatcaggaatgttttattcaagccaaaaaaaaaaaaaaaaaaaaaaaaagtgccgcctttggtgactaaatctgtctcaggaatttcagctatgatcaatcccgcgttgttaatttttaatttctttggctcattccttcatctcttccagatcattccccatttatacctctgtggacacagagctgaacctgcccttttgccctgtagctcttctccagttccctcttggagctccttccctccaacctcgtctcttgagtcttgctctttgccttagtccatgctaacaaagtccctggtgcccctcaagattacggggtctccgtgacctgtgtatcccacataaagcccagaagctctggaaggttccaggcacatccctgggtagttctgccctttgctgtttatttatacccgcctaatgatagtatcaccctggaagggacccacagctccagattgtgtcttcacagaagccagctaaacttcttgccatgcgctgctggtaacttctcctcaatattttacaagtcattaaccattgccttgcatactgattttcagaaaatgtttggaagaaaaaaaaaaaacaaacctaggcccagttacttgctcccattacttttgaagacagtgataagcacacatgctcccctcacttccctgtcccagacaccgtaatcctgatggatactagaggtttgttagcaagggctaagaggggcaagactcagacacaggggtggggggggaagtgccccagtatgaagtaggggagagctgcaggactgaagtcgatattctgcagtgtctcccaccatagcagagggagcctttgtctacaatagaggtgattctccattgtccggagacacgggtcacaaggaggagaactggggcctctgtttctaggtatgcctagaaaccaagccttccctcacaccttgcagcctcctcttcccagccatgtgaccacactttgcaaaccctccagctcagccttcctacacacttcaccacgctcaacactgacagccaatgttttcctcaccagaccatcgcgaagattaaaaggcaatagatactcacagctctatcatgtatctgaatgcaccgtgtgtgctgctctatatgtcacaggtaatcaatctgtctagtaattctgtgtatcaatggaagcacatatagaagatgcaagtgtgtatatctgaagggttggtggagcctcatccccgctcagtcaaactgcacatacaccaaatcccagctctgcagctcagagcctcagcatggtctctggcagtttgagactcacctcatgtgcttcttatcacccctgcattattgtgccatcttggctatgtcccatcatgacacaccagaaaacatggtccctcactgagatggtttgtatatgcttgactcagggagtagcactattgggaggtgtggttgttggagtaggtgtggccttttgtgggtgtgggctttaatacccttgtcctagctgtctgggagtcagtcttccactagcagccttcagatggagatgcagaactcccagctcctcctgcaccatgcctgctcccacttttgatgataatggactgaacctctgaatctgtaaaccagccccacttaaatgttgtcctttataagacttgccttggtcatagtgtctgttcacagtagtaaaaccctaattaagacaccccctcaccccaagatgccacagcctacaggaagaaatgaggattttgcaggttgcatggagacatagaaggagaaaggaaagggaaggttagaggatgtggtatccactatttctctggtctccagcccttcttctttctgtttcccttgcagaacaataagcaaactctaagaggttccctgagtctcatctcctaactgcactcatcaaatgggaaaaatagatttcttcctggaaggacgatgtctgttctattccctcttcagcactgacttacgtttaaataaagatgtcagatctttgagacggagtagccagtgttaaaaatctgggtgaactcaaggcaaactctgactcagcagatgggggtggggggaggcgctacctggtcagtgaagagctggaatattctgacagagtagcttaccatgggagactagtgctctagttcctcaaaagacaagccaagccgggggtatggtgtggtgggtttgggggtgtacaaagagagggtatttgtgtttcatggactccaaggctgatgttctaatggtgggcctgggtaacctgtctaagattgcaccattgactttctcatcaaccgaaaaggcaggtgaaggttgatagattctgttatgcataagtgattccaggcctggcaaagaaatggaacctctgatgtgcctgtcattttcctggataggtgagtcaggaggcactgatgtggggcccagggccgtgaagtcacatgaggactgaaagaatgcaggacatgtcagaggctacaaagagccactgttgtctctcaagccttattcatggctcgttccttgaccagggagctgtttcgtcatcccaagtagtctcattgcctctttcttcttctccacccgatgatatccttgtcttcttcctaccacaccaccttcatgaagccctcctggatctccttttacctgggtcagagaagtgccaactctagaggccacaacagcttgagtgaaggcaaacactctcctccctcagtctccgaggaagccctcagagaacggaatttttaaatccattctcagccctggctgggtgacttagacaacatctgccattcattaagtccccacatatctcataaaattccattcaacatacaattaagtgtagctcactgccactctggagttggggtggggtggggtgattaagttgtcagtttggacacagggaaccatgacatgcgttggtagacttgagccttgatagtcccgtgttctgtgtgtagatgggaaagggctcaaggaagagacgctttggagcaattccagtgggatactttgctttctgctccatgatgatgtggggggggggggagagtagttgtctcttattgttgaaaaaacatgggctagggctgtcactgtggagagcgtggggtaggctgctctaaactgctctccactcacacactctctccttaaggggaatgttttcctccacctcaccaactattagatgggtttcctccaatgacaccatctcttattgctaaaggactggtccccttgctgtgctgcactctcagacacctggagctagaacttccataaagcatacaatgaccctcaatgacaggggacccccatcccccagagtttctcctatctaagtgcagcacagagagtcacttcctttcctccttgtatgaagggagtcttctaatgcatggcctctcttactctatgttttggagaaatgattctaccactgccttgaaagtcatagctggaagtggaagtagacaaaacactatctatgacccccaccccccaggacagggtctcactatgtagcctttgcttgactgaaactcactatgtagaaaaggctggcctcaagctcagaagtctttctccttctgcctccttagtgcttagggattaaggggctgtgccaccatacacaggattatgccaagaccactccatcaaaggaaaaccaacagagcccacttctcttcccattcccctttcccactcttccccagcatgcagctctccagcatgcacagctcctagaacttcagccttgtgcatcatctcagtgtcgttgcctagtaacaatatgcttagcaaccagtaaaggaagtgtgatcacacctctcagcattgtacatggagcactgcagacaatacaaacagctcctgatttctctctgcggctacaggaaggtaactttcagaggtggccagcgttctgctcttgagatacagtgctcaccatccaggggcccacattggttgttgtttggcttttacttggcattggataatatctttgtgggggcgggtgggtaggtggttcttgaagggccggatctctctgcttgcacttgttcccaggatgcctctgatgcagtcagggcagcttgcagaatcctctctgctcccacgcagccctccctgcaccaagcctgcacccctgcccccagtcactgtgttccccacatcctcttccatttggagatgattctctacaccctaccatttacctgtcagctattgctctgcctgtgcctagagcagtagctctcaaccttcctaatgctgcgaccctttaatgcagttcctcatggtgtggtgagcccctcccccaacaacaacaggattattttgttgctacttcataactgtacttttctgactgttatgaatcataatatatgatatgcaatatatctgatatgcaacccccagaggagtcatgatctagaggctgagaaccactggcctagagtctttgtctttcagacactccagtctcagtttcccatgatcttcatgtccttcccctctctctgctcttacatgtatatgcatcccatcctgattcaacctctggaccagacatcacacaagttggggacaagattggtagctacctgctcaggctcagactctctggctggctgtgccgtctgctaatccacaacacccaagaatctccagtgaagtcataataattcgctttttgataagaaatcccagagactgcgccctttagccctgctgtctcttaagccaaacccagcttctggttggcgtctcaggactcagggtcctgcagaaaccagaggagagctgagctgcactgcttggcagctgggaaagcaggctcaacagccatgcgttctctccttcaccttggaattggacccttgagtataggacttgacctgtctattagaagagctgcttgcaaggcccaaagaagataaatgcactgatatactctacacaccctgagcctctttacagatttttgagagaagaattttcttggggaaaaaaaatctggtcttgtttttgccgtgagatggaaaaagatagctaagactgaaacagatacatgtcagtcacccattctttgatgaccttggtggcaacatcaaacccttttaagatgctctatctcgaagctgtcagaataaattatagccacacttctaccttttctttccttgggccccatgattaaggtggctaggtggcacctagttaggactttaagaacattttacaggcctcttctaattctggctggggaacaaaaaccaaatgagtcagaagctaaccaaggctgagttgaggtgctgagagagcagtccctgaggtgggtgtttggggtttatgtcacctgtacttccatggcaattacgtggtagctgggtgaagggcaaatttgcaaatgcaggctttctggaggcaagaggtggcaaagcacactccataggtggtttagagtaagtcaaatagaatttgggtgttattggatctcgaaggttgggagtctggccaaagatgaacagacattccagaggcatgagcgctttgcccgaacacctacccttaggcaattggaggcttgtctcataaaggaagatctctacgggaaaggtaggaaacccagcaagctctcaaggctccttctctcaccggacgatacttttcaaagcccttagaaaggggcatgtgcagcttcaccgagcgagcgagtttaccaacccccaccccctcaatcgtgcaacgtcattgaggagctaagcagggcttcttgctaaaactcctgctttttaattaaaagaaaaacaaaaacaaaaccttaatccctagaagttaaatataccacagaggtcaaccagtgacctagttagagctagctttgaaaagacagagggatttgatgaggatctacggggaggcagatttaccaattttctacccagacagctagaatagtaggtcataaccaaaggcagttaagtcaagagagactctggcaactgcccaacctacccaccattcacagcttaggaaactgtttcccaagatgcgactggaggttaactgtgaacacttaaaaaaaatgtttcttttacattgcaaataaaaatacctaactaaaacaatagaagagcatttacccaaggctctgctataacatggaggcagtctctgtccagattccccgaatctgttgacttccatacctctgcttactccagtgcaactctaggcaaggctgggactggatctccaaaaagatcttttacaatcccagagtaggttttttttttttttaaccattttaaacattaaattgtcaacacttcacaagtcacaggatcatttcagacacattatcttttgaataaaacatagacatagtctatggggaaatgttaatcatgaaatatcagtcttaagccactttctcaaaacacacctgctgcaatggggttaaagctgcctgcccagggctgatgtgaaagtagaccgtgtgtttggtttctgtaagccacggcccacgtagcaggcagggaaacagggctaacggggtggggaaaagcagtttgaacaccttcccccgcacaggctcttgtctacagcttttgttcccagcgtctcttcaataaatatgactcagtctgatgttcgggttccacttcctctgggcagggagctgactctgtgctgcctatcctgggtgactcaggggcccatgggcagggctgtgtcttctttgctcagccaacccagctcccttctgtcgtgggatctctgctcttcttcgattctccagctttctgtatgctcaatgaagaactacggtggcgtctctccccgccccactgtacatagatcttggtgagcagccaaagggctttttttacacccacttactcctctgcatgaggtatggaaggccaagtgagggtcacaatggattcctgtgagaaacacaaataaaaaccaagagctggagagatggctcagccggtaagggcaccggctgctcttccagaggaccccagtctgattcttagcatccacacagtaacttacaattgtccaaaacttcagttccagggcatccaatgcctccttctagactccatacttccagactgtggtgcaaatgctacatgcaggcataatactcatacacataaaataataataatataaagataaaacattataaagacaccccccccacacacacacacactgaaccaagagaagccttttagcctctcctttctcttctaaatgcccatcaaggtaagcaggtacttcactgggcaggggcaggcggggattggggtagtaagagaccccatacttgtgaacctgtgttttgccataagagtcagccagagactatggagatagatccatgtcttgtgggcatgagcagctgagttcagtttccaagcgttcatgtaaaagaaagctgagcctggtggttttcacttctattctaaacactagagagatggagacaggtgaatccttaaagttcacaggtgaagcagcaaacctcctcagccagattcaagccagtgaaaaataggagacgagtggaacctggggaaagatacctaaagttgtcctcttgcttctacacacacacacacacacacacacacacacacacacacacacacacacaccagccatactaacaactttatctatctagatgcatatttttctaaactcaggacggttttgtatcgaaaccagtaacattttcttcaagaacaaaatataatgattcagaatagtaaacattttcgctatatgatttaaaagatttattcagcattaactatgagagagcactagaaattgattcaggtttttcattgatggagcttgtgatggattgactaagatgccccccatagtcttgggtatgcaaacatttgtttcccagttggtggtgctctttgggaagtttaggaagtgcgggcttgttgaaagaagtgcatcactggagatgggctttgaggatttaaagacacgagccacttctggctcgctgtctctgcttcgtgcttagggttcgggatgtgatctcttagcttcctgctctcgccaccacccctttactttgcatcatggacttgatccctaaggaactgaaagcccaacggaactctttcttctataagttgccttggccatggtgttttatcacagcaatagaaaattagccaatgcagggccattaattttggaggcagtgtgtgatgagagactttaggtaaaggtggtatggcagagggagtgataacagtaagctgtgaatcgttcttggttttaggggatggcccaccctgtccatgagagtacccctattttccagggcatctctgttgcagtacttgtagcttgtcaaccataaacatctctcccatttaatttagtagcattagttaggaagagctcagcttcctattcaatcctctcccaaactgacctacgaatgagtgaacacaggtccatacacacattctttctgtacccatacatcctttagctgccacacatcctttagctatcagacgcatcccttgagcaactgagtgatggcagaccagtgcttgaccaactagggcacattctcagggttgaaccgtgagggattcgtcaagaggtagagtttcctgcagttttaactgttggatgaacctctcagctgcttggtttactacttagctgctgtttacccagggagctcgaatgtgctgactctcctaggtcactcagacctggcttcgggaagtcatggttgtggatcttgatgctcagcttgattggattgagggtcacctaggagatttgtaagggatacttctaggggtgtctctgagcacatttccaaaaacattattacatcataactctgacctacacaaaggtttaatctatggatggattcaacatttgaatggaagctggtagaactgtaggaagcagggcctggttggaggccctgggtcgctggacatttgcctttgaggcaacaccgtagccctgactcctctgatttttcctgttttcttcctggatgttacggtgatgctttcctttgccatgccctcccttccggatagttctcccttgccatggttgtagaagcaatggagcctgacgactatggactgattcctcggaagctgtgagagccaaagcaaacccttcttctgtgagttgtttgaccagatatttggaaatagcaatcaaaaacagtaccagcaagaaaaggccaactacagaagaagaagggagaaaagaagagaggcactgcattccagcttatttcagagtgtcttttagttacagatttatagataacagaaacccaagaggggattttctagtttccatagtcaagatgtaggaagacccaggaagaggctgagttcgaagaaccagggccttgaactcacccacacactcctatgtctgcctctcaccctgtggctcttgtacacattggctttgtttgtgtgtttgtttgtttaaatagtgtctgctgtggtcacagctctgttacacatataagaaaacacctttccttaaactaaagtttaaaaagtgttaggtttggctagcatcaggtgtccacttctgaatggtctccatggccaggagatagaagcaggatgctggtttcatttagttaatgtgcattcatcctgtgtgtagagtaggatgaggaagctgaagagatgggccaccacaatggacagcctccacttcaagtatgaaagggacgtgaagggggcgcttcccatgaagaaaatgagagacatcctctgaagggctgagaggaggcatggcaggctgatgaaataggtgagctctgggtagtgatttgcaagccctggtaggctcatgattagtggccacacatcttcataatggggacaatggaaacaatggcattgaaagtctttggaaagacatctaggttctttccatctcctggctattataaataaggctgctatgaacatagtggagcaattgtccttattacatgttggagcatcttctgggtacatgcccaggagtggtatagctgggtccttaggtagtactatatccaattttctgaggaactgccaaactgatttctagagtggttatatcagcttgcaatcctaccagcaatggaggagtgttcctgtttctccacatcctcaccagcatctgctgtcacctgagttttttattttagccattctgactggtgcgaggtggaatctcagggttgttttgatttgcagttccctgatgatttcttaaacatttctttaggtgcttctcagccataagatattcctcaggtgaaaattctttgtttagctctgtactccattttttcatagggttgtttggttctcttgagtctaacttcttgagttctttgatatattggatattagccctctatcagatgaaggattggtaaagatctttccccaatctgttggttgcctttttgtcctattgacagtgtcctttgccttacagaagctttgcaattttatgaggtcccatttgttgattcttgatcttagagcacaagccattggtgctctgttcaggaatctttcccccgtgcccatgtgttccaggatcttccccactttctcctctataagtttcagtgtatctggttttatgtggaggtccttaatccacttggattcaagctttgtacaaggagataagatgctcttcaacagaggaatggatacagaaaaatgtgggacatttacacaatggggtactactcagctattaaaaatgatggattgatgaaattcttagacaaatggatagaactagaaaatatcatcctgagtgaggcaacccagtcgcaaaagaacccacatggtatgcactcactgataagtggctattagccacaaagctccaaataaccaggatacaattcacagaccacctgaagttcaataaaaaggcagaccaaagtgtgggtgcttcgatccttcttagaaggagaacaaaatactcacaggagcaaatatggagataaattgttgagcatagactgaaggaaaggccaccaagagactgtcccacctggggattcatcccatatacagatatcaaacccagacactgttgtgggtgccaagaggtgcatgctgaaaggagcctgatatggctgtctcctgaaaggccctgcagagccttacaaatacaaaggtggatgttcacagccaaccattggactgagggtagagtccccaatagaggagttagagaagggactgaaggagttgaaggagtttgcaaccccataggaagaacaataatatcaaccaaccagaccccccagaactcccagggactcagccatcaacaaaggagtatacatggctccagctgcatatgaagcagaggatggccttgtcatgcatcagtgggaggagaagtccttggtcctatgaaagcttgatagatgcctcagtgtagggaaatcaagggtgggaaggtgagtggaggaatagcctcttagcttagaagcagggagagggaggatgtgatagggtgtttcttggagggagggaaaccaggaaaggagataacatttgaaatgtaaataaagaaaatatccaataagaaagaaaaacaaaaaagaaaaaatgaaagaatgaacaaaagaaagaacgaaagaacggaaggaaggaaggaaggaaggaaggaaggaaggaaggaagaaagaaagaaagaaagaaagaaagcctttgaaaataggtcatattatgatttttctgagagtggaaaccatgaagaaagaacaaggtagcaggaccgaggaggagacattggtaagtctttaataaagggctatgcagcctggcacccttctgtgccctcccacagcagccactgtaggcagaaggctgcagcatttgccttcccggctgcagtggcctgctgcaggctcgttcagaacaacagatgcctttgctcattgttctgtctccctgggcttgaacccagggtcagcattagtgaggaacctgccacggaaccaaatcctggctttcaaagatgatatttatattgcacagctcatgtctgaaactgaaaagccaccttgccctccagtctttgcatgggcgatgtttttaggcagctatttttggttttgccttttgactctccagactgtgctttgctcttgttcaaaaagagtcttcatgctttaacactctgctggttggtatgtaacaatggcttctcaaagatgcctgcaccctaacctcagagtctctaagtagattgtcctacgaggtgaaggaagccgggcaagtggggtgaggttgaagatcttggagatgaacattctggatgggtcacgtgggtttcctgggatgaaaagaggaaatcaggaatgatggccagaggaagagaaggggatatcatggagagatagacagagggagaggggagaggagagaggaggggagaggaggggagaggannnnnnnnnnnnnnnnnnnntattaataagaataccatggcctgtgcatgtagtcctgtactttcctagcatacatgaatcactaggtctatacttcaacactacaaaggaagagaaagggtgttcttcaagccccgggaaagtaaagacaagagaattaaaagggttcaatgcacagggggcaagtatggataaaaactggaaggattggtcagggagggataggaggaaagagagaatatgggagagactactggaatagctgaggtttagaaggcaatatggaaacccataacagtaaaatatccttgaacatttgaggattaccctagtgatgtctcaatacaaaggaggataggaagtcttagctgaacgtattatgtaaccagtctatctctaactggtaggactgggaccacaaaccaaggaagaacaccttcaaacttcaaactgttcagaatgcaagatgctctggggcagctgtggttcactttgtagatgtggccaaccaattgctggccttacttaaggcccagagcactagagggagcacatggctgacattgcctggcatgacaaagaaccagaaactgagtgacttataagagtcctcagacaaaatgggaagagaaaagaaaagaaaagaaaagaaaagaaaagaaaagaaaagaaaagaaaagaaaagaaaagaaaagaaaagaaaagaaaagagaaaggaaaagaaaagaaaagaaaaaagaaaggaaaagaaaaggaaaggaaaggaaaggaaaggaaaggaaaggaaaggaaaggaaaggaaaggaaaggaaaggaaaggaaaggaaagaaaagaaaagaaaagaaaagaaaagaaaagaaaagaaaagaaaagaaaagaaaagaaaagaaaagttcctctacttttctggaaagcaacttggcaggacggattgggaggaattttaatgagttctcactcagtcattctccttatacatgtgatgtatataacatgatgtttgtgttattgtgtatgccacaaatccttgggagcagcaacctgaggcctgtgggcactcttccttccttgtgacttaatttgcaacatgatccttaggctgatggctcttcccctagagcagtggctctcaaccttcctaatgctttcacccttccatacagttcctcatgttgtggtgactccaaccataaaattatcctcattgctacttcttaactgtaattttgctactgttatgaatcataatataaaatatctgcgttttctgatggtcttaggtgactcttgtgaaaaggttattcgattgcccaaagggatggggacccacaggttgagaactgctgccctgtagaatgttgctctgagcagtatactgtggggactgatggctgtaataaaaagtagctgtgatgacaggtttgatccagtcattcagcagatgctcactgaccttggccacataataggccagggagggtggatggggttggttacagagatggtaacagaagcaaagatctcagaaacattgacctcccatttacattttgaaggaccagcaggaacaagtggtagctattaaagctaatgtagagtgggcattccttttcccatctgtacacacgttgataacagcacatgcagatcccgcttgcatccagtgattctccaggctctgtaccctgaagcaaattaagcaccctcaagttacagttaatagggaaataaataaataaataaataaataaataaaggaaacaacctgaaggtcctccagtaggtgactggttcatccatgcaatgaaatactacccaatcatgaaaaaggccaccacacagggaagcccattctcactgataaaacagtgggttattgtgacagtcattatgtgaatgcagatgtaagatgaaattacacagacccacgtgcatgcatgcaaacaagtgaacttggattgcagcgggtgaaaacaggaactggggagatgacccagtcaataaagggtctgctgcataagcgtgaggacctgagtttgggtccccagaatccacaccaaaagccagacacagcaggacacacaagctgtgacaggaggatcatgaggtctgactgaccagtcagtgtaactgagtcgatcagcttcaagttcagcgagagcccagcctgaacaaagtaagtagataacagatgagaaagacacctaacatcgatttccactctaaacatacccatcatgtacatgagtaaacacatgcattcatacacacacacacacacacacacacgcgcgcgcgcgcgcgcacacagtgaacatggagtaaggactgtagttttgtccgtgtctgtttcccggctttgatgatgtactgagagatgtcatcattagagaaagatgaaagatgggtcttgagtcacaatactcagctggttgtgcaccttcctgtgatctataatcacttcaaaaggagaaaaatagctaccggctaaaatttctcaagtttcttttgttcctaagaatgttttcaaaacctgaatacattcagggccacttgagttagtgttagagcaacccacggtccccttgtagcttccagatgtttgctcatggagaaacaggacaggggtgatactaaaaactggtagcagatgggagtgagtggcagctcacccctccactgacaactgcagctcattgggccacatcatgcctgcccatcccctcacctacacacaagtgtatcattgccaactaaaggaaccatgagattctgtgcttgagacattgttgtttctgtcgcaaggcatcagtctagcttcctgacttaccatctcttggtgagagaagggatatagctgggaaagaggctagagagagagacttcattggaggggagatctggacaaagaaacagatggctcagatagagataataagataggtatttggtataaacagttctctgtattgagcaaggaataccaggtgagaccatatcagatgttctgaattctaactttaacactcaagtgttaaagttcatgtgacctctgaagtttcttagcatctttggggctagatttctttcctgtaggttggtatcactcaaagtaaccaggatgactaatttcttttgatatttgtggtttgtatttaactcagtgtctgggagtgtatacatttatgatcataacttatcaacagaatttcccactttaatattatggtttctccttatagccacagagaatcccaagcgatggtgcaactggcctttattctgatgcctgaaagagtacatgttcttttgcctctagcatcctctctcgttacttcctcttatagattccttgggtctcctgagttccattaaggtggcacagggctcagggtacagttcagagtggagggtttagctgactgactgctaacgaagttctgaagtgctagggccaaatgaagctgtagaggagaaaaattgtaatttctttttgtatgtttgttagtgtttgcattatattttacatgttatgcatgtaacatgtctgtgcatgcatatatgtatgcgtgttcaatagtgaacatagaaagatctgaaatgtgtatcacctgcatgcatggtacctacaaagtttagaagagggcacctgatcccctggaactggagtttcaaatggttgtaaaccaccatgtgagcgctgggaactaaacccagatcctctgtaagagcagccagtgttcttaaccactgagccatctgtccagcccctatttagcacatgtctacaatgtcattttttactgacgttagtcatactttgtatctgcttttcccacactatgaccagtcattgaatcaattgtgtctgttggagtgctagtatcttttccatctttgtaacttttaacatgtacttgaattaagcccaatattcaccggcattccagtctcctcctcaaagtagaaggtgtttatgacaagctgttcctaaaccattgtcaactagtgtaccagtgagactttctgttaaatatcctcactcccccatttagtcattaagatcattatcttgaactttctgtgctctcccttctatttaaataatacagctcgaccgctattgtgtagtttgagggcctgacttctggccttgcactaggcaaacactctactgttgggtccctcagcccctcctactcctccttctcaaccccccacccttcctttctgagacagggtctcactgtgtagccctgcctgtcctggaactcactgtgcagaccaagccagccttgagctcacggagatccgtctgcctctgactcccaagtactaggattaaaggtgtgcgccaccatagccagcatcccctattctttttccagtcctaaatcactctatcaccccagttttagattttctggttgacgatgcgtatctgctgccactccttatggttggctcttaaggtatggaccgtcattgcaaacgaggagcgggcatagttttggggttttgatggtggaagcatcctacggtgttttgagtcccccacacctctgcatttctggatgcgcttctcttttaattatttgaattagactttccaccacacactgcacaggctttggtctttcactttttcctttcttttagtacctgggctccagccagagctcaggcgtcctcgagtcagtgggctagtgttgctgctctgggcctccaggctagcacagctccttattctttgggtctaaggtcagatgatatgaccctgccaacactagtcgccatcctgctccatggggcttcctctggttctgtgacctcgccagtgctcattcactgctctgagtttcggtcttttgatttttgatacctggaatttccacattcctacttgggagtaatggagacgtctggtttcattttacccagcattccatacagcttgaccaagttccttccctagagccactaaaaatcacatttgccttctctgttatgtagacaaacactcatttatgctaattcaggcagcagatgtcaatgaacccactccatcgggggctccctgccctcccagctcttcatacccagcagggcacacaggccaaagtcaaaccctctgagggatacccacaaatttactggcaaagctactaaagaagggaatgtatgctctcaggagttgaagatcactcttagctacatagtgattggaagccagcctgggctacataagattctgtctctcacaacaacaacaacaacaacaacaacaacaatgaccccatagcttcagagagaccttagctgaaggaggcacagccctaggtctcctcagtcccacgactgaggccattgagtggggtctcatgtatcatgtgctttcactgtggtatgggaaggtccactgaaggagctggagggattgattctgcatctgagacagtctccctatatcctgaaatgatgctgggagatgctaagtggtcccatgttttcaatgctaacaatgacaccagttgtgcccctgtacctacatgaagggcacatgggtatgagggagtgtacacacagagtcatctataatcctgctgttctaaacacactcctttggaatttttctcatctttttgttttttgttagatattttcttcaattacattttgaatgctatcccaaaagtcccctatactctcctccagccctgctcccctacccactcactcccacttcttggccctggcttttccctgtactggggcatgtaaagtttgctagaccaaggggcctctctttccaatgacggctgactaggccatcttctgctacatatgcagctagagacacaagttctgggggtactgattagttcatattgttgttccacctatagggttgtagagcacctcagctccttgggtactttctctagctcctccattggggcccctgtgttccatcctatagataactgtgagcatccacttctgtatttgccaggcactagcaaagcctctaaggagacagctatatcagggtcctttcagcaaaatcttgctggcgtatgcaatagtgtctgcgtttagtggctgattatgggatggatccctggatatggcaacctctagatggtccatccttttgtctctatggaatcttctgcacctgagattctctcttccatctcttgtattctgttgctgatgctcacatctatggttcctgatttctttcctagggtttctatctccagagttgtctccctttgggttttcttcattgtttctacttccatttttacatcttggatggttttgttcaattccatcccctgtttggttgtgttttcctctaattctttaagggatttttgtgtttcttctacctttttagcagtgtttgcctgtagttctttaaggacttctacctgtttagcagtattctcctgtaattccttgagggatttttgtgcttcctctttaagggcttctacctgtttagcagtgttctcctgtgtttctttaagtgagttattaatgcccttcttaaaatcttctatcaccatcatgaaatttgattttaaatcagcatcttgcttttcaggtgtgttggggtatccaggacttgttgtggtgggcatactgggttcttggtttctgttagtaagattcttacatttcccttttgccatttagaaatctctagtgttaatgttcaagctgtctctggttggagcttgatcctcctgtgattctgttagcctctgtcagcactcctgagagtccaactctcacctgagttccagtggtcagagcactctctgcaggcaagctctcctcttgcagggcaggtgtccagcagtctggagctctgatccacctcctgagtcctcaggtcagagccctccctgtagaccaactctcctctggcaaggaaagtgcccaggggtctgggtctcagctctgcctcctgtctgagaatgaaggcctgacgggaccctgaccaagaagctctgttgcttctatcgcccacatgctctcaggtgattgggagatcctgggtgtgctaggggtcctgcagcgtggagagtcctctggtatcctagatgccctcggctggtttcacacagaagatggtagggctgtcccagaccttaatgtatcccagcctctggtcaggcgaggttcctccatccctgttcctgccggcacaagaccctccgagattttttgaagctgatgttgcgttccactcacccgtgatcccgaggggattcccaaggtcctgcggtgtggagagcactctggagcccttagcagcctccaactgggctcagaaggaagatggcgggggtccaatttttctcatccttaaatccattttctcctgctgcctcagctcagtatgtcaaaaaacatgcaatgttcatgttctgaagggacagtctaggtttccatagtggtaggaagagcagcctgagtctcatttacacacacacacacacacacacacacacacacacacacacacacacaccaaatcctgggcaagctggtacaaatccagatctcaccctcatcctctgatgactttgatgacccatttgacattttgaaggcaaggctaagttgatatcagagtctgcacctcctggacctacctttccccctgggctaccctgctccctctccacttccggggtgtgactcacaggtagctcctgttagcagagcaggtgtgtgtcatttccttactctgaggagtcccaaagtctcactatcttccaccccagctaacccccttatagggcttagatgcttgctacagacatccttccagaggtccttcagctgttgggggaaacttctgtgccctcactgggaagttttggggagccaagaaccaagttcagtctattcatccttccctctcactgccacaccctccccgcttcccttcagcaaaccactcctgtacttcgacctgtcccctagccctggttcctagcctcaccatgcgtttctgctacccagtacccctctggtcatatcatgaccctcactggaagacggggtagggcgggggagaccccaaagacaccatctttgacacagtcccttgaaggacttggatcatttaagtggaaggagatgaaggggccataagctgttcttcacccatgaaaggggtcaacaggtggtggtgagatggtttttgctccacatgtatcctaaaggcagacacaaaagatgacagaaaatacacttgggccttctcttcatttctccttccttcnnnnnnnnnnnnnnnnnnnnnnnnnnnnnnnnnnnnnnnnccctccctccctccctcccttccctccctctcttcttctctcttcctttctttccttcttcccctttctacttccttccttccctttatccctttcttttgtctgcctgcctgtctgtctgtgatgtttgtttgtgtgcatatgtgtatgtgagcaggcatgtacaagtgtgtggggaccaaatttcaacatagatgtcttcctcaattgctctcaccttattctttgagacagcatctctcactgaacccagggctgatcagttcagctatattggctgaccagtgagctccagggatcctcccactgccttcccacatcactgacattgcagacatgtgctgccatgcctagtttttatatgggggctagggagctggactcagatgctcataaagcaagtaccactgagccggctctctagttctgcacttaaactgtataaggtgttctcattctttgagcaatggggcaggctgcaagcatgaagacccttatatctaaaagagttcaaacagagggggcctgagatgggcagggctgttgctcctgtgacctgcacagcttttttctgagatcctctgtgactgggattggagtgtatcatgcatggtctctttcaattctgcatgcttctgtagccagactctgctactcttcccagcgtagcccttctcctttgagtctcctttgagttatagaggctgagtggattcaagtacaccgtttctctgtaacactcgagcgtgtgcatgtgtgtgtgtgtgtgtgtgtgtgtgtgtgtgtgtgtgtgtgtgtgtgtgaattctcatggttcatttcaccaccctcaggcctaagggctacaattgttctctgtagagctgcagaggaggaagtgaggaaacagtcaggtccctgcagggctgattagagagcctggccacttgccaccaacatgcgtgtacatgctgagtatccattgattgggtgtccacattctgccaaaagagcccggagcctggctcttcacaaatccccaccctatgtacacccagcttgactttgcagtcttactacaaccctacaacatctgcaccgtcatgttcgtgtcactggggaggaagctgagaaggaggacagttggcagggcacttgtgacatggctaaggaggggtagagccagagcttgtccaaggtcttcctgtccttgctatgagatgccaccaaaagctgattcaagagctcttcacctggaaaggacatcgctggaatagatagggccactcagtgccatgttcctggatgagtgatgagctgcttattgtattctaggtcctatgataaatacaaattcagaaaaggggtgttccttttttttttttttttttttttttgcttagcttgcaaaaagctagtaggctgaagctggggaaacagtgcagcatgcaagcatgagaacctggacttgatccccagaactgatgggaaaaagctgggcttggccatgtacacttgcaataccagcactgggaaggtggagacggatatacccctatggtttactgcccagccagtctggcctgctaggagagctccagaccaaaaaaagactctatccccagaacgaacgataatatgaatgtggatggctcctgaggagcgacacctaaggttgacctctggcctccacacacacgttcaacacgtgtacaaacacactcacacactcaggtgcacgtaagaactagtagtcagaaaaaggaacataacaaacttgtagtaaaaacaggagtagagagagctcatcttactggggacataaagagagttccttggcaaaaacaaacaagcaaacaaaacacccggcatctgaggtgcctttgcacagaggaggctcgtatctgggctagtgatgtagcattctgtgctggaggggccaaaaggaatgttaccacaaggtctcttgcagttgcgaaacaagcgttcactaacgcttttgctttctctactctctcatgatggatggtcccacacccagacaaattccagcctagcttctccccacacggatgaggctctttatgattggctggtgtagacagcatcagctcttcctccaattggctgtgaattctttggattctgcctcaggataattcccttcgcccacgccttctgtatctttttgtgttgtccgtatcctgggtgaggttatgcttgccaaaatcaatgaactggccaccaaattattaccctcggggtctgctcctatggagtctacaccctggctagctatgggtacagccacctttgtaaactttggggcttctcttgcaccctacaacaaaccccatgtctcagccacctcctcctcttcacaaacccagctcaggctccacccttcccgtgagataagattaactcctttgcttgcactgctctctgtgtgtaatgacatttaaacctctcttgcataaaccacactgtgccctatggcattatttagcgtgtgtgtttctctctccaactggtctaagttcctgatttctccctgaactgtagcatttgtatcctctccattgttctcctactgtgtgggtactcaagctgtctgttaagtttatggtaatcacaatcctagccgtatatttcaagtataactgagaaaaggctggagacagagagacccataacatgtaatttaaccttgatatcttctctatgtttttttcccctttcttaacaaactgaactggtcatatgtttcactgggctaggggtgtggtgtagcagataagaatatcaaatataaatctatcattttttagctctatgttattgcgttaccttaatctcctcatgcctcagtttctccatatacaacatggcggaggaataacagaaccaacctcttccgtttgttctgacagttaaaaattagcatgtatgactgaaacattcaaagtatccagtagatgctcactatctaaggttatcacctggctgttctccttcctagaaggtaaaatgtatacaaccaggaaggctcaagataaccctggtaacgaagccttagtttctttagaacttgttggtaatttacctcctggccacttcaactgtcctcagaggatggaaacaaggaatgtcacactagccgttctgaggaagggtccagacaccactgaacagacttcctctcttatggttgtggactgttttcatccatatcgagacctaagaggccttcagtcagtactagctcagttgccttgttcctcaaccatggccacagtccacctcagcttcgggttaaagggggcagcagctccacttcctgtgatcaacaggaagtctaaaacccaaagaaattaatcatggctctttggtcttgagtggcacaagtcttagcctagaagatgtcagggcttccattctatgccagaccaaagaactagttcagttttctgagaacagactcaaccctcagcacctcaacttcctccctgtctttataccccaggagagtaagggttaactgcccaggtcctgggtttcatgttgacctagtttgtctcctatgcacacagtagaatccagtggccatgtccagtctctagatcagaggctcactgtgcctgtgaaggctctgtctttacctaaccaactcagagttctttctgacagccagattcttgtgtgctacaaattccacctctccctatagctttgagatggacagactccctagggcagaccacaacctctttcctgtacctccgaaaagaggaacaataactaccttagatggggggaaggaaaggcagaggcacccagaggtgtccccttccgagggccttttggtgattctacccccttgcagagggctgttccgagctgggatcctgcagaagcctcctctatcattagaggcgtttttcagcattgcctattttggagctacagctgggtgcttctcagaataaatagagctgtgatatggagataaaaggagaaaggaatcttaccatcttttagattcccgcactccccagtcttttccaatcttctattctcaaagcctttccctgagaccccttcctcctcactgcctgcttggtggctctccaataagcacaggctcccttcacgggcaatgctgggtaccctgctttggctctacaagttccaaactgcatagacgcagtgtcaaacgtcacaagagttcgtgtcccttatcggaaatgtttggatctagatttttgcaatattttggattttggaaaatttatgcggacatgatgatgtatcttgaagaaaggccccaggtcatatctaaacatttatttcttatgcacaactcatgtgtatagcctcaaggtggtgtcatacaatgttttagtgtacctaagttctggtggggtcagatgtggaattttccatctatgcatcacgttccctgaaaaatctaccagtagagcattattacaagcttggattttcagaatggggatacttagtgcagtggtttgataggaatagccccacagactcatgggtttgaattcttagcactattaggaggtgtggccttgttggagtaggtgtggctttgttggaggaaatgtgtcactgtggaggtgggctttgaggttatatatgctcaaactacacccagtgtggcacacagtctccttctgctgccttcagatgtagaattctcagctccttctccagcagcacgtctgcctgcttttacagttttgcaagccagccccaattaaatgtttatctttgtaagagtttagctcagtggtagagcgattgagagcaaggccctggattgggtcctcagctctggggaaaaaaaaaaagaactggacccgtctttcttctgagatgacactactaaattgatatccactctggggattgctgcactctggttcccagggctcctgtaggtgaggtagactcctagcactcaagactatacagcttttctccagccttacactgttcttatcccaaagctgtgtcctattgaaatcctcgggaagggagctagtactgcagggacagaaggatacatctgacttgtttgatttgtgtcatgcagtgggtccatggactgaggtggcccccatagtaaggcacccagtccgatgctctctaaatacctgcggtgagaaggcatggttactatagggcaaataagcagaatagcgtgtggcctcatttgaggccaagttatctggtatcccccgtgtgcctcccatggcaagtgggtcttaacagtgcatgggaatcatgaaagcctctggattggctttcactgaaagcccttgcttctcctttccctctcctgctgagatgtgctcaactgactgccttcacccatctcatagctgatgtctgccgtatagtgcagctcagcccgcagggtccttaggagatgtgtagggtgtaagcagatgatgatcctgagaaatggagacacgacatgacatgaaaccctccctcccttccaggagtaaacagcttcagctgttccatgctctcccttctcagcctggggggtcagatccatgtggtacctggaagcatctctgaggaaagacttgggggtatgagatagatgcttgtggtgagttttctctcatggcttgcttatgtttctgaagatggacccatccatggttaggttcccatattagtctatagaaacctcgataggcagctaaatggcataagctgtcactaggggtagaacagggtttacaggactgtgagggacagcacgtatccttcccactagctgagagacttacagctgtgaatgccagatcacatctggagactggcccgactcttccaggtatagtgccagggttgagaatgtgggttttgaactcaactgaacttagaagtatatctcatttctcctgtcttagctttgtgactttgggctggttctttagtgtctcttagagtccgtttctccatctattatgggggagtatgaacagtatctctatcaaggaattccttagtctttaattcaccccagcattcattgagtccactccataccaagcgtggcccaggagtgaacatagtgtgggaaaggctgacatgtcatctgtcctgatggttgccagtgcactctgccagaagatggagtgttatacggattctacaagaaagtttgcttgggccactcaacaccgtagaaaatctgtgatgctggctgccgtgacgttcagcattaggagcagggcacaaatgaaccacagctttagaaaacatgttttcatcccataagccatcctactcctcctagtgtggagattttattagtcaggatttcctgggggaagagaccaataggaagtactgaaagatttattgtgaagagttgggtcacgtgattgtagaagctgctaagactccagttctgagtccgtcagctggaagcccaagagggatggtgggtaaactccagtctgaaaactggcaggcttaagaccaagggagaacccatgctttggttttgattaaaagacagaaaaatcctgagtcctatctgggaggtctttaggcgggggggggggggggggtgtgaggggattcttttcttactcagggaagattcggtatttgttcttcaggccttcaacttcttgcatgaggcccacccaccttgaagagggtgatctgctttatacagttcaccattcaaatgccagtaccgtcaagaaatgcactggtaaatccactcagaataaggtttaacatggccctaagaaggtcctggaggccctggaggccctcattgtatgctcttagggctgaaaagatcagctcttccaagtgctgcaggaaaagcatgccacactagttgatttgttctcttctagaccagaggtactttaaatggaaccagaagggacccaagagcccagccttactccctatttgtaaaccccaagcactgagcctctcatggttgatctgggggtgtggctcatttactcacctagctaatgaacgtctggtttcaattcccagcatcatgggaagacaatgtgactcctgcttctgttccacaactttagaaccagaagcagagaaatcaccaagttgagggaagtggggaggggtggacagctctgaactcaaagagaatcaggggtagtttattctgaagccaaaatatgagtgaatgttctcaggaacatagatttagatctctccaaatacattttcccaacgtggaagcagtttcatggagtttttgtgggcctagaacaaagaaacttataaatcaagtcatttaaaacgttacaccaagggagtggcttacctccatataagagaacttcaaccataggccccagatggtaactgattcttagcccttccattggtatgatatgagttttgttattatgttccagagattttaaaatgtgtttatcaggatattaggtatgatacaggtctgactccttgtggggctaaaaatagccaaagagaattgtaactaaggtctcaggctgcagcattccaaacgcttcacagtggttaaaggctaatcagcctttgtagactcagaaacattttaggaattctcattcataaatccagcgtcattctttgctacataataaatcagaggctagcctgggcaacaaacaaacaaacaaaaaccaaaaccaaaaacaacaacaacaacaacaacaaaaacaaaaacaaaaaagaaagaaacaaacaaaaaacatggctaattgtagagcagagccaaactcaatgctttacccatattccttggggttgggttaagctggagggagcatgcccaagtgtctctgtctgtaggagtccttaaaccttaggaaaataggaggtcagaaatgctcctaacagtgacattaacagctgcctgggacagcaagaagacagcagcattaggtctctgccaggcttctcaattctaagcttagctaagaccacaagatgtcagagccagggtgctgcttgggatgagggaacctcagtacagtcccaatcttggtctgaaccaagtgttgggcagctggtttcccctctctggtaccagtcttgcaaatgtcactcagtcacactcaaatagctgtgtcatcattcctgttaaagatcctccaatgagaccagaaagtgtaggctagagaggtctcagaaacagagagaccaggcagaggaaggaagcaggagggagtttcattataaaacgaaagtacaaactcaagtggggagggcagccttccccccagaaagctgcaaaccctgggtttctggacagagtttgatgtgtaaactttaatggaaggagggttaatcctaaggagggaagaaatattcacgaggaggtggtggccatgactaaggcaaagcaaaggtaggcagttccgggaacgggttgggaattttttcctgcagagtttactccaactttgtgtccttatatgggatttttggatgtgtcatggcattgggtgcatgacgggaacagtggattttgcaagatgaagcatttagcagttagtttggtccaggctttggatggtcttgagtttttgtccttttagaggtcacatggtgtctgctgtgacagtcctgaggctgtatcaacctctaggtactttgaatttatctctcttttccccaattctctctctatatatgtacatgcataactacacacacacacacacacacacacacacacacacactacctgtttcaaaatcctttgttcagctcggtaagtaggccatgtgtttttttaacgactttccccaaggatcttgcaagttctagaaaaaacagcagagtggatgatctctgaaaccctatctagtgctgaattctatagtgttctgatttagtcagggctggtccaagggggtaaattgttaccactgcaccacagaggcagaggagggcagggacagacaaggagagagagatctaaagttattagctgttcaggagtgaagggctgaaagccagaacccaggcatcctgtctccaggggaggactgtgttctttcgtctgctccacgagctcctcctccaacaggccctttctcctcatgccatatgtctgtgccagagaacctcatggaacacaagtatcacagtgcccattcatgttcggtttagtgttctacccatataacctgcttgttgccagtagggctgtggctatgtagtgagcagggcaggctgtgttctagattcttcctttccttacctggcgctcagccatgcaagaagggctgtgggttatgcagtgagcagggcaggctgtgttctagattcttcttttctttacctggcgcttagccatacatcgagacacttgacgagagctggcaatgttgacagctgagaatagaacccaagagtgggaggggaatctgctcagccagtactgtggagataaaaagagtctggggatgccaccttagctgaaggatgagcaggggacagaactcagaatggactcagcatctcacaggagccaatggttgagctttaaggccatggaaaaggatgtatgaccctcagagcttattatactccaaaattctaagtatccaagacctaaacccagaaagcagagactaggtttacacccagaaaatatggataggaccactggcttggtgactatctgggactagctttcaaaatttctgcttatcacccctagtttttaacaaccttgctcattttgattattatagacttcttgagatgggagtgaaatgtatgtgaatagtaggtgaccttgtcatggaagggtgcgtgaatacttcagaccttcactacaaggttgtgttaaaacagtagatcactgacagcaaagcctgagtgacgctcgtggctggcacttccagagggagagctaggatctgaaagcagatgtagaaacacttcaacatgtcctaggaaaatgctatcaacgctaaaaatgctccagaagtgaaatgggtagatgatgggtttccttgacaagataacttgtcaccaaaatgtttatggagatgctcaaaggaaggatctggaatcatgaccatgaccaatactgtatattggaggcatctatctggcgctttcagagagggagttcagagaagagagaaatgaagtaattgtgagggtgttctcaacctgtgggtagagaccccttgagggttgaacagctcttacacaggagttgcctaagaccattggaaaacacagatattaacattatgcttcacaacagtagcagaattatagctatgaagtggcagcaaaaataattttgtggccgagggtcaaccataacatgaggaactgtattgaagggtcgcagcatcaggaagcttgggaggcagtgtgttatggggaaagcattgggagggctgtgcttcccaaggaagcagcctggcctgcaactttggattcgtcttataggcagctttaatggagggagaataattcatgagaaaattgttcatgaataataaacagattataaatattagtttagttaatcttcccaactgttctgttctgttttctgatcatcaggaactcagcccaggtctttgggagtttaatgtctctgtcctcaagttttactttcttctaaaatacagaggaagtcaaagcccagctgggatgcccagtggccacccttcccacactgtcaagtttatttgcggggttggctgcttttccccttaccaatgtctgtccgcagtatctgtctttcttctctggaataggacacctgactgcatgccctcctctagaagaccttccctcccctttatctcttttctctcactttctacctgctcagctgtcacattctccttcccataaaggtctctccttgtggccaatgattttaactcctaagttctacttgggaaagcctctagtctagacaaggaaacttaacccatcaagctggaacccttgcaaaggggtcttgggacttctgtgtaaaggcttagagaggagtggtgtgttcagtccctggagaagcgagcctgttgctttaggcactgtgaatattcacacccaaggtattgttgggaaatcattcttagctaatctgaggctttatataaaacagaagtaggggtcagatagaccagctgtgctacttaagccatctgggtctctttctggatgtccgtggaatgcagttagagtataaaatcttggtgtatatggtgtgtgtgtgtgtgtgtgtgtgtgtgtgtgtgtgtgtgtgtgtgtgannnnnnnnnnnnnnnnnnnnnnnnnnnnnnnnnnnnnnnnnnnnnnnnnnnnnnnnnnnnnnctcctggctatgatcacaacctcatacttccctttatgtgtcacccctccccctcccccacatatacatcttgtctgccagaagaggtagcctacaccattcccctgagccctctgctaggttctctgtccttcctgccttctggtctgtggtgagctgtagtgaggtgaggtgctattctttttctgacttcctgtgctcttcagaaaccttaacaagagagggctgatggacctgtaagccaaacacagcctctgttcgattcagggaagctggagtctcaagtctgacaggtaaaacccaggattctgattgtgtttctgctagcatccagcaaggggatgtgaaaagcttgggaggggctggatgtagggtgcagagccttcactattttcatatttgggtcaatatattttgagaggtggccaaaacaatcccagagaagcatctactgttgaatcattctaacacggaatgggcaaactaaattttctatctcaagtaactgacttcaaggctctatttgttctcagctacactctagctgtaaacgtggatatgcagttatatcacaactatgtgtaactttgagatcttgggtaaatgtaacagaggatgcctatctagtctgctcaccggttactttttagggtagactagagttgattctgaatgaggctctgggtcctggtggcatggaggccagtggaaacacggcattggtttactcatcacttcccttcttctttcctccctccccttcccctctttcctcctccagtttcctttgccttctcttctcttccttcccctcctctcctctcctctcccctcctctccccccccctctctctttctttctcattttcagataaattgctggtctctctctctctctccaaactctcatttgtagagctttgcttctgggagattcttttcctgcgcacccctggccacctggctccccattcctacacctgcctctgggtccatgtgaccattttctttcatggcttctttgctacctccgtgctgtggaggtttccagttgtgttttcccatggtcttttatttgaatttctaaccagggaatgagaagtcctgctgctgttggatcaacagtcaagaagttgcagtagaactcacatgggagggggaggggaaaagggagggggaaggagggagtgggattgctcttttgggatctggctcctccctactttgaattctcatagctagagttttagaagaacaaatttcccccaaagtttctgagctctgcataactacctgtttcttttcttggcacccatttcccaatagaaggcttgagtaacaagacactgaaatagaaactaccagggcactgggatgggaggccccaagacagccaggaaggcctgcatttatgacttgtaacctactgaactctgtcacaattcggccttggtgaacaccacactgtcaaggggagtcttgtggcctgggaactgggggtttctgggatcccactgattggcgcaccatttagtttcctaaattcagttctcaccagggagataagggctatgcttgtggtttcttacccttcctgggaaggtgttagaattacttagaatgtcaaaggttgggaaagagggagatgctgggcccaggatataatgtttcagcaatgcagaatgaatgagttctagatctctaacaagctctgactagtcttgtatcctgtggttaatcgtcactgggaatatatctcacaccctgctccccctgccagatggtaactatgtgaatagatgaatattgccagttagctctgccataatacaacatattgcacatcttaagtatatataatttcaagtccgggttcagtgtgtggctccatgtataacattggtgataggtatgtgtgtgtgtgtgtgtgtgtgtgtgtgtgtgtgtgtgtgtgtgtatgagtgtgtgtgtgtgagtgtgagggtgtgtgtgtgtgtgtgtgtgtgtgtgtatcagtacttttgggttgttattacaatataatgggcttgtcctgtgagtgcaactgcttgtccatagtgggagtatgggggaaagattctgttacctgtgctgtttgcagaaatagctctttcagggagcacagagaggcagaaagacaggataggtgggtgctcagggactagaggctggagagaactgaaggcacaggatggtaaaggaccctgagacaccatcagacactcatctcccaggacactgcttagaggccaggatgcctttccatgtcccaggcctctcctaccaggctgcatcagttgcctgtctatactgtttaccccagacctcagtttggattggattcggaaatgctgtttgctgcctagcctggctttgtgctaagaagactggccactctccatggtctgtgtggagaatacaggaagtcagactgtaagaaagagagctccaggaagaggcaaagctttatgcgtgtgggacagacggtacatatctttaaatacatttaaccaatatagcagcaagagagcttaaagtcgtgtaactgcatgggattctaaatgtgggtgtgtttttatgtagttgcaaattccattctctgtggcttaacatttttatatacatcttttcacatactactactcttgtatttttatcatggctcatctctatgttattgatactgctgaaatttccttctgagctctttgttctggttctcaccattcccctgtggtaagcagtgaacatctttgtacaaacaatctactttcctcacctcagacccatggagtgttcaggttagcgtcaaccttcaactaaatacaacctagaaaggcctggaaatggaatctcatttgaggaatcacctagatcagactggcctggggcatgtctgtggggattattttaattgctaatcgatgtgattgggcaccgcccactgtgggcagcaccattccctaggtttctggtcctgagttgtataagaaagctagctgagcatgagcctacctgccggccagcaagcagcatctttcatagttcctgccacacttctttaagttcctgttgactttctgcaacaatggacaaggatgtgaaatcctaagccaaataaaacccttttcccccagaagtcactttttgtcagagtggttcttatcaaagcaataaaagtgaaactaggacatgggacatgtttcccaaaccaggttagcaggtgtgagttatttagtatttaaaaaggttgctcaccagaaagccagttctgagtaactcaccaacccatcaacatgtaagtttcttttgttttccctctgggtctcttggctcctttaagttgtttgcagttggtttcttaaagttgatttcattagcatttttaaccacaagggtttctccatctatttttaacttcccaagtcttttcacacacaggtggcatcctgtttgcttgacggggcatctggattgttgttttagttgattgccattagaacgaaggctggttgctgtagtgtacagatggggacatcatgctgtttgacggtttcagtgtctgtttacacaatgcagaactttggtgtagactggatttgtagaccagcagcagattggaggctggcaggtggaagcttgttcaagaggatgtttttgtgggaatggggagggcaatgcctatgatgaaagtgcttgtgtttatactttataggatttttnnnnnnnnnnnnnnnnnnnnnnnnnnnnnnnnnnnnnnnnnnnnnnnnnnnnnnnnnnnnnnnnnnnnnnnnnnnnnnnnnnnnnnnnnnnnnnnnnnnnnnnnnnnnnnnnnnnnnnnnnnnnnnnnnctttaagttgtttgcagttggtttcttaaagttgatttcattagcatttttaaccacaagggtttctccatctatttttaacttcccaagtcttttcacacacaggtggcatcctgtttgcttgacggggcatctggattgttgttttagttgattgccattagaacgaaggctggttgctgtagtgtacagatggggacatcatgctgtttgacggtttcagtgtctgtttacacaatgcagaactttggtgtagactggatttgtagaccagcagcagattggaggctggcaggtggaagcttgttcaagaggatgtttttgtgggaatggggagggcaatgcctatgatgaaagtcttgtgtttatactttataggatttttttctgagtgcttgggttttctcttttttttaagttttaatttcatttgatgatttttttttggtttgttttaactgcatgtacatctgtgagggtgtcagaagctctggagctggagttacagatgggtatgagctgcaatgtgggtgttgaggaatgaacccaggtcctctagaagagcagtctgtgctcttaaccaccgatccatttctccagaccctcgagttttctttttaattaccatttttttaaattaaatatatggatcacattagatcccttaaataaaattctctgtactcatcttactatacacgccactctgctgaaggcctgcattccggtcaaggctgcatagctagcagcagatgatgaacttggcgaggaatttttgttgaagcgatcatgtctaggagccatgtcagaaaagccacgtgcagctgagctaccctttgacactcaaacacatccagagctgcagatcccaaagtggagcttcggctgtgtatggacgaggtgtgttgggtgagacgggaacgtaagttcttgcccagcatctgcctcttaagaaaggggactctacggtggctggctccatcagttttccttaatgctccaagtgggagagacatctatctgccttaaggacttgagcaaagcagcgagagcaaagactagtaaaaggggaagcctgcgcagccgggaaggctcctcatctaggtgcttaccagccaaagatggaaaagacctgaaagacattctctctgtcctgaatatttacagattcatcattttctaaagtaataggataaaataaccatttgtatattaagtgtatttgttatcttgggttcagtatagcaccaacaggaggataagcataagctagatagaagtgccacgtcctttctaggaggagctggaacacgcttagatgttgacatctggaaggtcttagaatgagttgcttgcagacactgaaggacgcctgcatgtaaatataaagactcttcctcttcccctccttccctcagtcacagtttaaatcttggccaaaattaataaatcaggtctgtccctttgaaggtcaaaagagggaggaaggacagctggctccttgggacaccttgcccttatccactgatctgcttttgacctgccttggcacagcaaagaaaaggatttgtcaacagcttccgggtgttcaagggaacaactgagaaaattaagtggttgtgggtggggggtgnnnnnnnnnnnnnnnnnnnntggttgtgggtggggggtggggggtggggctaagaagagaacagtcagcaggaccaagaggcagccagggtttggaacccaagggagcttctagacctttctcagagccaatcactccaggcattgtagctaggcaaacttcccacctgtagcccgaaacccaagaagggtagcagagctagacaagcctctccaaataccccatgccaatctctactctcataacattctgatgacaccccaaaacctgccagctatagctcctccatgagctctcagcttggccatagcaagatgaaatcactccctggtcttcaatctgtggcttggttcgtggcaaggactcatgcagcccctgtacccatcagaacactgacactccatcttgtcttcccgagcctttcttctccccctgtgctcagggatctagaaactttggtactcggtcaggagtccttcacccctggaacaaagaccctccaaaacctgtggcccttaataagacagaaacccaggctatagccacaagtgtacaaagcccagggggaaatttttttggagttttctaggtagtgcaactatgcattaacttctgatagaccacattacgttaacaaacagtgagttacagtacagttaacatgaatcaatgttaactgtttttaaaccatggagctgctaagtcccaaatcttccccccaccccacaaggggaagcttttacttatttatctgtacatggcaggatatttctctgtagcacagcctaccctcaacttgaaaatctgataaacctccatctgtttttgttgttgttgttgtttttgtttttttgttttttcaagacagggtttctctgtatagctatggctgttctggaactcactgtgtagtccaggctggcctcgaactcagaaatctgcctgtctctgcctcccaagtgctgggattaaaaggcgtgcgccaccactgcccagctctccatctgtttcttgagtgctgggattacagggtgagtgctacgatgaccagcttaatttttttaatgttttggtctataagaagggatttacccattttacaaggttaattcttgccttgttctcactgtgtgtgaagatttttgagagtttgtgtgtgtgtgtgtatgcgcgctggaaataggggtggaaacttgaccacctcaggtatcgttcttcatgtgttgtctagctttttttttttttttttttgagacagaatctctcactggttgggaactcaccagctagtctaggtatggctggtctgcttatccacctctacaacaatgggattacaggactaagttaacactcctgaattgttttgggttttcctattgggttctggggagtagactgcatgctcatgtatgcaaggcaagtatagtattgactgatcccattccctgccaagaatctgctttggtctgccatcagtgtcttctctttcaatctcaacttgatatacctcattcagtaactacaagctctctctatggagttcaaaggcatgggcagagacagctagaacactcatcttcctcctactagattctcatgggcatttgactaacaagagttgtttgaaaacttgtgacttcccctgcttatcatcatggcctgctcattagcctctcaagaagatgtgatgagaactcagtcagatgcccaaagcaagctctggttgcatatggttcaggcttccctacccaaacaccaattttgtgttccacatgattgcatgtgggagcagtcagggagagagttaagcctgcctggactgatggatgccagagagtgtgggttctggaaaggttttccagctctgagaggagcaagttcctctatagaagacctgtggcctgcttctgcttccaagcaccttgtgcctttctctcttgccagactaggtagagaaaccactgagtgaggtagggttgggggggtcaaaggtcatgggtaggctggtagcctgtaaccaggaaacctgccctgccttgccccagctcttacactatccagacaggacaaggctagaactgcactctcatgagcccatggccatttctctgccatctgagagatcatacaagtgattgaaaagggccatgatggaaatagttacagcagagaaactggcacatgctatgaaccaaggcatccctgtgtactaccaggagctgaatactcactaggctttctcctaaccacccctgctgccttctgaggtcatacagtgagtcaccctattgccaggttatagttattaaaaataaaagtttccccccaccatatgaagttcaaattctttaataacacgttgccactttctctggtcttgtttctcagtgaccccctctcccactcttatcctcagcccagtatgtcatttcatttcctgatcttctgagtcatactttgcagagtcccaaagcccagtgagcaggtcctgcttcggtgtttgtcaagcagaacacttaaggacactttggggcccgtatcatgctatgactggtgcatgggtatgtgtggtgtgtccatgtgtgtgtgcatgtacatgtacacacacacacacacacacacacacacacacacaagcaggtgctaaattctttcttttggattaatggatctcttttggatagaaatcctcttttcttgtcttcttgttttcatttaatcaacctctggcatagctccagagattcagaaaagtggaggaaaggaggacagagtcagagagggtagggaacggggaggaagagaagatgaggcactctacaggaactatccactttgattgtctgaggcagggtctcccattgaaggtcgctgactaagctaagctgtgagcctcaggaccttcctgtctctgtcttccctgcactagaattttaaannnnnnnnnnnnnnnnnnnnttttatgtgggtgctgaggattgaattcagcaatcctcacgcatgttcagtgtgcaccaaccgggctctctctaggccctgcttagcttgagagggaaggtctccatagttcagtttgacctgaaactcatgttctccccacctctgcctcagtggtggtgttgcctgcgccaccatgagtgctagcgattgtggaaagcaatggaacccaaaggtcaaacaagagggagaggaatctggccagcagcaaggaaagccttgaacgaatggggagaaccaaggctcccttaacaggaaggtgaagcgcctggtttctggtgctctctcggagccagctgacctgcagggaggcaggtgttggtaacagaaggctccaagtgggtaatgggcgcgggggtgggaagcagaaaatgtggtggagtctcaaatgctttttgaattacgctgaattatagctggcagtaatcacaaccttccgggttcattcctttgccttgggaagaagggaagagattaaccaaatgacaggttggggggtcccagggctgtagaatgctggccccacaggagcctgggggttgaaaggaccaagtcagtgggtgcagcatggagcctggggcacagctgggtccagaagctcaggaatgactgcaaggtcacgacaattagttaagtgcctgtgcccagcaggccctgagataggaaaggcctgccttccccattttgttgatgtggaaacagccaggggaagtgactcagagacagagtggaaacaaagagtgcctctcgtgatattctgacttctgttggtctgagtggctggtgcttgggctctctcccgtggggcttccttccatggaacatacttctgtattctcaggtcaggcaggggaacttgagtgggcagagcaggaactcggggagtctgggaggctttccaggtgaacagaatggacacaggaaggcgagcttggttatgaaggcagtctttgggctggagagacagactgggctgcagaggccacctcatttactgctgagttgggcttggaaaacctggccttgctgttaaattagcttttccagttctttctttagctaattctcaggcacaaacaaacaagcaacatgtgtattgcaatgcccctgattcttcagaaagactcggtaaatagataacatcagcttcatgtctccatagagaaaacggacctaaaaaggtcacctggttcaggtggcatagctgataagctgcagaaacctcagaccaaaattgccaaaagttactgctggcatttcatgaaggaatgagccttgttttgttttgtttttttaaattaggtattttcttcatttacatttccaannnnnnnnnnnnnnnnnnnnnnnnnnnnnnnnnnnnnnnnnnnnnnnnnnnnnnnnnnnnnnnnnnnnnnnnnnnnnnnnnnnnnnnnnnnnnnnnnnnnnnnnnnnnnnnnnnnnnnnnnnnnnnnnnnnnnnnnnnnnnnnnnnnnnnnnnnnnnnnnnnnnnnnnnnnnnnnnnnnnnnnnnnnnnnnnnnnnnnnnnnnnnnnnnnnnnnnnnnnnnnnnnnnnnnnnnnnnnnnnnnnnnnnnnnnnnnnnnnnnnnnnnnnnnnnnnnnnnnnnnnnnnnnnnnnnnnnnnnnnnnnnnnnnnnnnnnnnnnnnnnnnnnnnnnnnnnnnnnnnnnnnnnnnnnnnnnnnnnnnnnnnnnnnnnnnnnnnnnnnnnnnnnnnnnnnnnnnnnnnnnnnnnnnnnnnnnnnnnnnnnnnnnnnnnnnnnnnnnnnnnnnnnnnnnnnnnnnnnnnnnnnnnnnnnnnnnnnnnnnnnnnnnnnnnnnnnnnnnnnnnnnnnnnnnnnnnnnnnnnnnnnnnnnnnnnnnnnnnnnnnnnnnnnnnnnnnnnnnnnnnnnnnnnnnnnnnnnnnnnnnttacctcactcaggatgatgccctccaggtccatccatttgcccaggaatttcataaattcattctttttaatagctgagtagtactcccattgtgtaaatgtaccacattttctttatccactccctctgttgaggggcatctgggttctttccagcttctggctattataaataagactgctatgaacatagtggagcatgtgtccttcttaccggttggatcatcttctggatatatgcccaggagaggtattgcgggatcctccggtagtactatgtccaattttctgaggaactgccagactgatttccagagtggttgtacaagcttgcaattccaccaacaatggaggagtgttcctctttcttcgcaccctcgccagcatctgctgtcacctgaatttttgatcttagccattctgactggtgtgaggtagaatctcagtgttgttttgatttgcatttccctgatgattaacgatgctgaacattttttcaggtgcttctcagccattcggtaaggaatgagctttgtaatacagaagagagagtgtgattcgagaatgagcagatgtcttttaaaatgaatacattcaacactgggagtgacagccaatacctgtgactgccagactcagatggccgagcaggagaaagtggaaggccagggctagactgggccaggatatatcacaaacaaacaaacaaactaataaacaaataaacatgtggtgacatacacctgtactcctagcatttgagaggtggggccaggagaaccaagagtccaaggtcaggagctaggctatggctatagagaagagcacttacgatgcatacatgaggacttgagtccccagcacacttgaatccccagctgagcatggcttcatatatctgtaaccataccgaggggcagagcctgcgtatatctgtaacaacagcattgaagggcagagacaactgtcccaagaactcactggacagctattatcctgggtgatgtgtttgtggttttgtgagacttcacctcaaggtactagggaagagaataaatgagaaaagacatctgatgtccttcactggctgcatgtatccaagtgcatacatacgctcaccagcatactcatatgcatgtaactcccacagagaggtgtatccacacactcctaactctaaaagagaattcaaggttccctatagctgcatagcaatctcaaggccagccttgacacggaagaccttgtctcaaaaaagcaaaagcaaaaaaaaaaaaaaagccttcaaaacagaacaaaaccaaaatcaaatccactgggtcacaacacgagttttctgcacgatccttatatatcagattttgtggtagacacatgaaaacattgtcatggccaccatctgtctcccaaccacaatttggaaactctgattcacgcaacctccatctctaaccatcagagccagtcagtggctgggccttaatacccaggccctcactaacagcagtggacggtgacaccaacctggtagctttggtaactggtgttagtcagcagcgcggttggcatgatgtcaggcagatgaatgcttacccacttgactcattcagatgtgggtttcaaacttgtctccagggccgctgtgccacatcactgggctatccctcactgtggactttggagtcgggcatcatggtagcctcaagtcttggccactcgctggctctgtggcctggcaaagctgacctctgtaggactcagtttcttctcatagtacataaggacaagtcccatctgcagaattattctgggaaatcgggttactgtgtgaactccctgttatgtgatggtagatgttccataagagagaacactgccttacaatgtccacctgacaaaggactttcttttcctgtggtgatccccagaaccttcctcaggctgggaatgcagagcttggtagtatagctgagtcgtctggaagaggtttaaatcttacttcagtcccacctcctttgggcaggtagatgacttgccgttcaggaagggcatcattgagtttcttccagaagattaataggggctcggagactcaataggcccctgaagtatcctttgaaagtttgagccaagaagttcttgtagccaatcaaaatgtttcctgttttaatttgggcccatttccttgtgtttgttattctttgcctgtagcctgggcagttctggggcctaagaagcacactgaagcccactggtggctcagagccaagggttcactggtatcatggtatggacacgccttggacaccacttggagggccgagggcagactaggatacagggtggagtggtcaccggtggtgggagagctgagtctggagaaaagggtagggctttggctcatgaactgaggggtcaggggacttttcaaaggttaaggcaacagatgagaaattcaaatagccaggaggtgcaggcaagttccttcacgagtactaggagccgacggtttgttggtcaccgtctcgtcctgacttggaattcagtggtatacagtgatggcttgaaatcagccatgatgggaatatctacaccataggtgggaaaggctgaagacaaacacttacccctgtaaaaggcacctggcagaaggaacaggatactggaacgtggtggtcacatacgatgttggaatataggcaagcgatagccaggaagtgatttccctttgtgtcctactactattaatggactcccattccttctctcccttcacaaggcttccagaaggtaagcagggtattattgccccatgttatcagtggggaaaaggaggctaggaaaagttaagccatttgctgggtctcgcggaatttttttttttttttttttttagttctggaacagggtcacaggcagagtgaggaagagagactggagaatctaggtaaatctcaggccagaaggacaggccttcctaaacactaccgtctggtaactctgctttggagagtttgggtaaatcattatagattgttctctgtggaaggagtctgggcaatttttatgtgttaatagagatctgggcactgccttgtaggctagggtcttcagactcaaattctgttttcatttttagtttgttttttttttttgagatttatttactactataaataagtacactatagctgtctgcacactagaagacacaccagaagagggtgtcagatctcattacgggtggttgtgagccaccatgtggttactgggatttgaactcaggaccttcggaagagcagtcagtcagtactcttacccactgagccatctcaccagccctcattcttagttcttataggaccagtggagacagtctctcagggaaggtctggattgtgtttgggctgctgaatgctgcttggcacatatgttactgcagctttatgtcattctacccttggagcaatactgcctttgtgtgtgtgtgtgtgcgtgtgcgtgtgcgtgtgcgtgtgtgtgtgtgtgttttaaggtttttctagaatctatagtaattctgctggtttcttctgcaaatgtgttttccctgggacaaaatgcagaactgaggggcccacatcaggctgaaggtaaaagcggatcatgggtaaccagaatgactttgctaacatatttctgtcagcaccctgtgggccatgagctcactgggctagaggaagctgccgaagataagaaatccacatcctctgggcttacaggcaatggctgacttgtcagctggtgtgggctgctgttgctcagaggtactgggtcatggtcaggatttggggacaggatgctcactgtgctagacactggtcagattcggaaatgggtggggctcccaagtataccaggttgtagttatacatgcatatatacataatacatacacacataaacacatacatacatatacacacatacatattcacacatacatatacacatgcatatgattatgcctatacctatacatacataatacatacatacacacacatatacatacttgtttttttaagaatagttttaggcttacagcaaaattacaggaaatgcaaagaattcccataatgccactcatcaccacatgcacggcttctcccattactaatcccatactgataccattgtggccttctcttgtcgtttaacatcagactttatccttcctgtgctgtctacaagacagatagaagtatgacgatccttatggaatcatggtagactgaacatttccattgtctgagcatactctgtgctctctgttcatccctccctgtctcctcacggcaactcctggccttaaatttaatctttaaacttttgtttttccacaactggaaccatacaggatgtacatagacttctcttttacttaaaaaatattcatttagctgtatgtgggctccatgccttgaatctcagcactagagaggccaaggcaggtggatctctgtgaatgtgaggccaggttgacggacacactgagaccctgcctcaaagaaaaaatataatcactttaggttcttccatggagttcatatcttgacaactcttctctctttgtgcatgcatgcttgcgtgtgtgtgtgtgtgtgtgtgtgtgtgtgtgtgtgtgtgtgtgtgtgtgtttgcaaatgtgttcctatacatgcgagtagcacatctgtgtgggagtatgcaagcatcaatgcgcatgagcatattggatctcaggggcttggccagcagccttgggtcttagcagagtgtagtctaccttctttgaaataagctctcattgacctggaactcaccaggtaggcctgtaaggcccagatttcctgtctctgctttctctaacaatggggtgataaatgcatggcaccacgcatagctattaaaacaactacagcaacaactcgagttctggggagagttcaggtccacgtgcttgcatagccagcactgtgccgtctttacccagccccaactcttctcttcagtgtgaataagagttcattgtgtggataccagtttgcatatccattcaccttgactcatcccgcattttggtgattacagataagactgccattcctcgtgagcaggtgttggcgtggctgttaagttttcaaatacttcgggtaaataccaagggagaggattccgtgatggtgtggtaagaggctgccaggctgtctcctaattctggctgcaaccgtcacgttcccccacattcttactgcagttttctcactgactccttgttttgaatggaaagcaaagctctcctctaggagcagccataacagtgcaggctcaagagcatctgaaggtctcgttcctaagtacctgacactttgccctggccgtgtctaggcatagacttcaaccttctgctttatcttcaagcaggtattgctgcctccacattcctcagtactcagtgacacatgacaaatgaccatggagtgttccccagttctcaccgttggatcttgaactttaccaatacattttaagcctatttaagtattctctcgtacttgtccagcatttcagggggcatctgggggtgtctaggatgtgcctactgatgctgcagccctctgaatgaagatgctacctagactgaaggggcacctgatgggatcactaaagacatttctctctttctctctatgtaaacctctctctatgtatccctatgtcataccagcatcttggggggttagaatttgagcatataaatattaagggactcatgcattcagtccattgcagataaggtcaagtccctggggttgtgtgtcataggtcactccacttcccccctcagatgcctgtctcccaatccacctttgtgaaagccttgtgtacaacttaccacatacaaattgaagcctaccagaccagcagatcctcaagccagcaggccagcacttcctggagcatatgcagttgcttgtttgtactcctgactaggactatgctatttagggactaagtacccccccatcttcccaatcctaatgtaccattgccatcatccctcctgggccccctcaggccttgccacttcagtattctccctcatctcccagctgcctgttctgcatctttgcctaaaggctttctggcatctcccttgtgcagaactgacaagaactgccaagaacactgagcatatgaagtggagtagacatgctcccagctctccctttctctgagtgagatgtggtcggtccatcctgggctccccagtcccctccagttcccagaggattgaaagggggcttgtccaagattcagtactcagcacagtccccttttcgcctgtctttccttcaatgccacattgttctacgctcctgggggtgcttcctgcagacacccctcaaataacttctgaattccttcaagaagaatttatatggattgttactgtagggtagaacactagggtccactatacatagagggattattgagagaggggggttacatataaagagagagaggtatacatagagacaggtatacaaattcagatagacttctagaacacatattctcctttctgtcagtctagtcccaagatgtatccacccttgtgagctcagccttgtgctccccttttctgcttcccctgaccccagagacatgtcttctttctccctgaattcttacaataccgcctttgtcccttcctaaaacatatctccttttttgttgttgttctttggtgttgttgttgtatgggtatacacacatgtacatatgaggtatgtgtgcacacacaggtagaggtaagatttgaatgtctttctctttcactgtccattttattcttggagacaagatttcttgtggaactgagagcttgtggattcaactagactggccagcaagctccgagacccatcttttcctctccacagcctccattgctggggttataggagcacatcaccatacctggattttatgaggttactggggatctgaactctggtctttgtactttattgactgagccatcttcccagccactgctttattgttttgttttaaaggaatagttccttagagtaatgactattcaaatctttccaggtacctggatcagtataaataaacaatcataggctatgttctgcttctaaaatacttgactccatatttatattgttactctgccagctccattatttttccctcctaattcctggtgcaggcaacaccccaccaccaaactacacccatatgagaatgcacatcttttatctctaagaataactctcagacctagggcttagctcattctagaactagctgggtagttttctgttttgagacaaggtcttgctctgtagatcaggtcagcctgacatttatgacaaccctccttcctcagcttcccaagtgctgcaatgacaggtgtgagccgtcagacccaagtttaaggtgatcgttagaaaaattcttggaaattaagaccgcctaatcctcaccacagacacattcaatacatgcacagagggcagggattgggggtacactggtgacccctgtacaagcctcagctgatgttgccaatgcatagttacaacttttcttacttctttggacattcccccactttataattttatacatttatttatggtgtgtgtgtgtgtgtgtgtgtgtgtgtgtgtgtgtgtgaacccatgtacatgtgcagacagtcacgtggtgtacaaactactctctggagtaagttctctcctgccaccttgtgggattgagaatggaatttgtgggatgnnnnnnnnnnnnnnnnnnnnnnnnnnnnnnnnnnnnnnnnnnnnnnnnnnnnnnnnnnnnnnnnnnnnnnnnnnnnnnnnnnnnnnnnnnnnnnnnnnnnnnnnnnnnnnnnnnnnnnnnnnnnnnnnnnnnnnnnnnnnnnnnnnnnnnnnnnnnnnnnnnnnnnnnnnnnnnnnnnnnnnnnnnnnnnnnnnnnnnnnnnnnnnnnnnnnnnnnnnnnnnnnnnnnnnnnnnnnnnnnnnnnnnnnnnnnnnnnnnnnnnnnnnnnnnnnnnnnnnnnnnnnnnnnnnnnnnnnnnnnnnnnnnnnnnnnnnnnnnnnnnnnnnnnnnnnnnnnntccttgcagaacactgtatgctattttaaaatacaaatgtagttagtgtttaagtttgaaaataagggctctgtgtcactagcccttctgaagtttcaaaaacctatgtccactggtgattaaactagattaagacagctgagattcaggctgaattacagattgcacggattcttaatttacttctgtgtcagtactgtggccaggctgtcctcagtacaggctgcagtgtgcaggagcccagactagctccatctgtcatgcaaaacaactttctaccctaaacagcagggaaccagccaaggggctttttttccctaggccagcctttctgtgatccctggtactctatgtggtgagttcctatgaggtccaggcctcctatatgaaaactctagcaagtactgaggttgtgagcaagatcagtcaagttaatggcctgtacctgatctgggcactttatcttcttctctgtacattctcttggggccaccgacccccaagttatgtttcttctcagattttcctctccactcctgttttccttctcctatttatcacagcctcactccctgctttttctgctctgctgtgtcatgccacagccgcctcctctcgcagctgcctcatgtgctaagtgtgggcctcttgcctaggagccagtgtcggaggagaacagggaaggaaatagggccagaaggcagagcttgcgtgcttgagagtgagtctagattatatacctggatgttttatcaaactggctcccatgcttcaaagcctccccagtcgaagcagctggaggcctttgcagggagttttcaggattaaaagaatgggctgttgtatccatcctgggtcttgtgggtgtgccagcctgggggatgtggcatgtggcttgcaagagctcactctgtggctgtctctctgttgtctctgcaggactgcaatgtgccggtcctagctgcagtctgagaggatgtccggggtgtctgagcccttgagccgtgtaaaagtgggcactttacgccggcctgagggccccccagagcccatggtggtggtaccagtggatgtggagaaggaagacgtgcgcatcctcaaggtctgcttctacagcaacagcttcaacccagggaagaacttcaagcttgtcaaatgcacagtgcagacagagatccaggtaagggtggcggcctctgttcctcagctgctctgctcctccttccacttcctggacagatgagcaacccttcctgagcctagcaacttcttctagcattgtctgggcagggcagatgttggcatcaggagagacattttcagcttgctgtaccactctcctctagctgtgcatgcagggttacactacactggcctgttttaacttgcctttattgaacatttactatatgtatccctgtggtcagtttctcaacatacatgctattgaattctcccatgaggagacccaataagaacatacccannnnnnnnnnnnnnnnnnnncccattctcttccgaacattccttcatgatggccctcagaagattgctctggagggctcataatttgagcaaaggaattgggtaccttgggggaagtctccccaggcccaagggggctaaattggctctgtcactagcccttctgaagtttcaaagacctatgtccactggcgactcctttcatcagtgctatggtagtcctagctgccaggtcactgtgctgtatcttgtacaatgcacactacagctcacacaccagaataggatgcattgatgaacacgctgtctcttccagttagcatccttgcttcagttgggtagacttctgttacccatagctgatctgattagggttctgcttgcccgtcacgtgtgagggtgtgtgcagagagtaaggaggccctttcctctggcctctgctgatactcaagcctcctttgggtgtcccatttctgcacacaccttatgccatccaccgccaactcaacctgtttgtttccaaaagttaacttgatttccaagtagtgagaagcaccataatgacccaattttgatgacaaacgaacacatctagctattcccactagaatgtgttctgaggatgtgctgaaggacagatggaattgaagtcgtggcacaactgtccatggggaaaaaatggtggagacaaacccagacactattgcataggccagcaagattttgatgaagggatcctggtatagttgtcttgtatgaggctatgccagtgcctggcaaatacagaagtggatgctcagagtcatctataggatggaacacagggcccccaatggagaaactagaccaaggagctaaaggggtctgcaaccctataggtggaacaacaatatgaactaaccagtaacccccagagcttatgtctctagctgaatatgtagcagaagatgacatagttggccatcactgggaagagaggccccttggtcttgcaaactttatatgtcccagtacaggggaatgccaggaccaagaagtgggagtaggtgtgtaggggagcagggcggggggagggtatagggaacttttgggatagcatttgaagtttgaaatgtatataaagaaaatatctaattaaaaataccttaaaaaaagaaatggtggagaatggcaggaaggttgttttagtgaatagagagatttcaaatgtggcacaagctatatgattctaagtatctaaaggagaggtgggcacagataatgaaggtgtagaacacacgccttggaaatccagagttagactgggggctagggagcggcatgtagttgttgtttgcttggtttggtttctaaacatggtctcactgtttagcccgggctggcttcatattcactctgtagcacagaccaatcttgaacacatgaacaccatacctcagctttccaagtgctagcattacacatactcaggctcacacacatagttcttaagcaggagatcttcctggctctgtagttacttaaggtcagaatgtatgacaggctacgagtgtctgaagaattctctggaggggcacagggacagagtggataacaaaagagtgacataactcttttcttggaacttatacccaagccttttgattttccctgcttgcaatgtttcctactgtcaaaacgtaaccttctaatgccatcctgttattacaagctgtgactttaaaaccacctggactaacagtcatgccaggctccagctggatggcttatgtgggcttggatctgaatgcgtacggaatctgtgtgcagatttccctcaagaggaccatgcccacctgttgctttgctgtagggactcaagatgataaatgagaattacctagcacacagtgggttaagtacctggcacatagtggattccaggatctggatccgttggtagtctggtttatcattgctctgcacagctatctcagagctaccagtgttccacaggaaaaaaaaacctcaatttttttatttatccacttatctgtcttattttcaaacttagacagtaactacatttgtattttaaaatagcatacagtgttctgcaaggagtttgccccggggctggggagtatggcataatagattacacgcccagtgtgcccaaggtcctggtttctatctctagtnnnnnnnnnnnnnnnnnnnnnnnnagggaagggaaaggaagaaggcaggctcagagaagagatttatgctcaaagaagcttgggaaatgcttcattaaacaattgggaactggataatagcttagtgataaggcactggcccatcactgggaggccttaggttctatccctagaacatacctctcagcccttcctgaaaatcatgaatggagtctttcacagcaagacttctcagaaccctcatgtttacctgatgaattactgagacagagccatatgtggtacttttcatttgcctaaaggagttctttgtaggcaggacttgttgattctctggcaagccttttaagacacattttccccaccccccaccccactccaccccacccctccctgctccatagcagaacaggagagactgagagagagagtgggctatgggctgggaggttatagttactaataggacagaaatgtggatttttactaatggagtgttggggcacaaagataagttgatagttctggcctgtatcaagaagatagagtcaatagaaactgatgattaactaaatgtgggagggaagaaaaggaaggagacaaagataactcagactctggcttgggcagcagaaggggtgctcagtgccattcattgggacgagaaaggaagtccaagctgagatttcagcttcacgcctgttctgtttgaagcactcttgaaacacccctgtggatagacatggtcctgcagctcagaaagatgacaggacatagacgagacgatttgggtgtcaacctgcaatgaaggacaagccagagaactaggccatcactgaaggatgagaagagcaagagaaggattcgaggggggggggggtgatcagggaagccagaagctgggagagaaaagatagtttaaaaaaaaaaaaaaaaagcaaccaaccaacagaggtgaggtgggggcggggccaagaaaggaatggttatcagtgtgggatgctaagaagttcacagataaagccggaaataggttccctgacttgaggactctcaggactctatatcacagatggtattctgctgggcagttccactacaagaggcctttgttgtggagagagaattaaccaatatggcagagcattttttatcatgaaaggaagaaaagaggagaagatacagcaaagggaacatcataaggtcctaaactgagaaggtacatagtaggtctgagtccattagtgccccaagatggacaattaaagccatgttagtgaaagactctgagaggagcccctcgctcaggcctcaggacaatagcggacacccaagaactcacgatagaccgagcttgttgcaaaccacatgaggctttattcggggaaagccagagctctggggacgactcatatccctcgcaggggtagaggagtcgacctcgaggggaaagaggtcccagtttttataggccctcaggggggaaaggagaagggggagagtaggggatttccagatctaaacgatatctattctcaagaaatgggtatgggaggggtacaaggaaagagtctaatgaaggtgcagcaatgggcacacacctggtcagaacattggcagacacacaggttcgaggagtggccagagcattgtgcacctctattattctaaatcagtgaagctagttctgctaacactgacatctatcttgccaatttcagggcttctgtgactttttacattctgtcaggatctttcattagtacctttgtcttcactccatctcattggaaacattgatataaatgtaaactactgagtgatatgagattattcttttaaaggttgatgtaggttacatggtggagattggaggaaggcaagcgtggccataggtagaggtctgtggagagatggtaaggtcatcaattaggatagccacagatactggtgatggctccaccaatggtaggaatgataacagtggtggtgatggtggtggtggtggtaatgacaggggtaggtgactatgctgatggtgaaggtgatggtaaaaactaacatttttacacacacacacacacacacacacacacacacacacacacacacacttgttatctcactggcttctcaaaaggcccctctgaaacacaaagtgttattatctctactttctatttaaggaaacttcgtgcagaggagttaagcaaattgttacttaagtggtgggttttgttttcaaacccagacagtccacctccagagcatacactcttacacaattcagtctataggaggaagatcagtgatttggaggatacaagagttggcagctctctgataggtcgggaatgtgaggcatgggaggagatatggagaactgctgcctaactcagatagacaggagcccattgtctgagatgagcactggaggaagctggctggggatggggcatcctccactcagtttggtctctgagtacatttgagatgcctttatattttcaagtggcaacatttaaaacaccacgggcaggtgattctggagaaagattaattcttggtacagacatttgaattggtcagcctctggatggtggctgaatgaaagaaaccctgtggacaagacaatacagaagagcaacctgaataatctgtcttctattccacagcttatggttgtgtgcctctagtaccaggcacctggatggggcactgacattctctaaacacggtgtaattccctgttcttgtaaggcttcctgaccaaggctatgacattcattcatatgcatgaatgaatctttaaaaggcaatggaagtgctctgataaaaagaaatagaacctgtgcaagcacaagcatgcaactcaaagaggttgttggtccagctttgtaaagtgcctgtttgagaacactgccccctgtgtgtagagatggggcccagacccagcatccttgcttaagattcttctgaagttagtggcctctttctcccctgcttccaaaccccacactgtctcccctatcacttggtcttgactttggtgaatttttcttttactctctgtccctttatcacccccccccccacctcctgctcccagttctcaaaatgctgccaacaccttcagacttgccgaggacatgtccctctataagaacactgctgcaatgtcaaccccttctcttagctgtgtgtgatgaaacagaagcaacagagactgcctcaaacagcccactttggtgtcatggtcacacagtgttcttatgccagacagactgctaatttctttattattattattagatattttcttcatttacatttcaaatgcgatcccctttcctagttttctctccgaaagtcccctatacccccgccctgctccccaacccacccacttctgcttcctggccctggcattcccctgtactggggcatataatcttcgcaatatgaagggcctctcctcccattgatgaccaactaggccatcctttgctacatatgcaactagatacacaagctcttgaggggcgggggtaactggttagttcatattgttgttcctcctatagggttgcagacccctctagctccttgggtactttctctagctccttcattggtggcctgtgcttcatcctatagatgactgtgagcatccacttctgtatttgccaggcactggcgtaggctgacaagagatagctatatcagggtcctgtcaaaaccttgctggcatatgcaatagtgtctgggtttggtggttgtatatgggatggatccctgggtggggcagtctctggatggtccttccttccatctcagctctaaactttgtctctgtatctccttccatgggtattttgttccccattctaagatggaatgaagtatccacactttggtcttctttcttcttgagtttcatgtgttttgcaaattgtatcttgagtattctaagtttctgggctaatatccacttatcaatgagtgcatatcatgagtgttcttttgtgattggcttacctcactcaggatgatatcctccagatccatccatttgccctagaatttcataaattcattgtttttaatagctgagtagtactccattgtgtaaatgtaccatattttctgtattcactcctctgttgagggacgtctgggttctttccagcttctgctattataaataggtctgctatgaacatagtggagcatgtgtccttattacaagttggaacttcctctgggtatatgcccaggaaaggtattgctggattgtcttagtcagggtttctatccctgcacaaacatcatgaccaagaagcaagttggggaggaaagggtttattcggcttacacttccatactgctgttcatcacaaaggaagtcaggactggaactcaagcaggtcaggaagcaggagctaatacagaggccatggagggatgttctttactggcttgcctcacctggcttgctcagcctgctctcttatagaaccaagactaccagcccagagatggtcccacccacaaggggcctttcccccttgatcactaattgagaaaatgccttacagttggatctcatggaggcatttcctcaactgaagctcctttctctgtggtaactccagctgtgtcaagttgacacaaaactagccagtacaattgaccccttgtcaacttgacacacaaaaacatcactagtaagcctcaacccttacaatcttattcatccccaagatctaaataactttaaaagtcccacagtctttacatattcttaaaatttcaatctctttaaaatatccatctcttttaaaattcaaagtctttttacaattaaaagtctcttaactgtgggctccactaaaacaatttcttccttcaagagggaaaatatcagggcacagtcacaatcaaaagcaaaagtcaatctccaacagtacaatgtctgggatccaactcacgatcttctgggctcctccaagggcttgggtcacttctccagccaggccctttgtaggacacgcgtcatcctctaggctccagatgcctgtactccactgctgctgctgctcttggtggtcatctcatggtactggcatctccaaaatactgcatgaccccttcagttctgggccttcaattgcaactgaggctgtaccttcaccaatggccttccatggcctctcacagtgccgagcctcagctgctttgcgtgaccccttcatgccttcaaaaccagtaccacctgggtgacccttacatattaccaagtcccgctgcagcaggagtacaaccttgnnnnnnnnnnnnnnnnnnnnnnnnnnnnnnnnnnnnnnnnnnnnnnnnnnnnnnnnnnnnnnnnnnnnnnnnnnnnnnnnnnnnnnnnnnnnnnnnnnnnnnnnnnnnnnnnnnnnnnnnnnnnnnnnnnnnnnnnnnnnnnnnnnnnnnnnnnnnnnnnnnnnnnnnnnnnnnnnnnnnnnnnnnnnnnnnnnnnnnnnnnnnnnnnnnnnnnnnnnnnnnnnnnnnnnnnnnnnnnnnnnnnnnnnnnnnnnnnnnnnnnnnnnnnnnnnnnnnnnnnnnnnnnnnnnnnnnnnnnnnnnnnnnnnnnnnnnnnnnnnnnnnnnnnnnnnnnnnnnnnnnnnnnnnnnnnnnnnnnnnnnnnnnnnnnnnnnnnnnnnnnnnnnnnnnnnnnnnnnnnnnnnnnnnnnnnnnnnnnnnnnnnnnnnnnnnnnnnnnnnnnnnnnnnnnnnnnnnnnnnnnnnnnnnnnnnnnnnnnnnnnnnnnnnnnnnnnnnnnnnnnnnnnnnnnnnnnnnnnnnnnnnnnnnnnnnnnnnnnnnnnnnnnnnnnnnnnnnnnnnnnnnnnnnnnnnnnnnnnnnnnnnnnnnnnnnnnnnnnnnnnnnnnnnnnnnnnnnnnnnnnnnnnnnnnnnnnnnnnnnnnnnnnnnnnnnnnnnnnnnnnnnnnnnnnnnnnnnnnnnnnnnnnnnnnnnnnnnnnnnnnnnnnnnnnnncacccactccccctttttggccctggcgttcccctgtactggggcatatgaagtttgcaagtccaatgggcctctctttgcagtgatggccgattaggccatcttttgatacatatgcagctaaagacaagagctcccgggtactggttagttcatattgttgttccacctatagggttgcagttccctatagctccttgggtaatttctctagctcctccattaggggccgtgtgacccatccaatacctgaatgtgatcatccacttctgtgtttgctaggccccggcatagtctcacaagacagagctttaactgggtcttttcagcgaaatcttgctagtgtatgcaatggtgtcagcatttggaagctgattatgggatggatccctgcatatggcagtcactagatggtccatcctttgtcacagctccaaattttgtctctgtaactccttctatgggtgttttgttcccatttctaagaaagggtaaagtgtccacactttggtcttcgttcttcttgaatttcatgtgtttggcaagtaaaattgcaaagcttctgcaaagcaaaagacaccgtcaataagacaaaaaggccaccaacagattgggaaaggatctttacctatcccaaatcggataggggactaatattcaatatatataaagaactcaagaaggtggactccagaaaatcaaataaccccattaaaaaatggggctcagagctgaaaaagaattctcacctgaggaataccgaatggcagagaaacacctgaaaaaatgttcagcatccttaatcatcagggaaatgcaaatcaaaacaacactgagattccacttcactccagtcagaatggctaagatcaaaaactcaggtgacagcagatgttggcgaggatatggagaaaggggaacactcctccattgttggtgggattgcaagcttgtacaaccactctggaaatcagtctggcggttcctcagaaaagtggacatagtataccggaggatccagcaatacctctcctgggcatatatccagaagatgtcccaaccggtaagaagaacacacgctccactatgttcatagcagccttgtttataatagccagaagctggaaagaacccaggtgcccctcaacagaggaatggatacagaaaatgtggtacatttacacaatggaatactactcagctattaaaaaaatgaatttatgaaattcctaggcaaatggatggacctggagggtatcatcctgagtgaagtaacccaatcacaaaggaactcgcacaatatgtactcactgataagtggataatagctcagcctgctttcttatagaaccaagactaccagcccagaaatggtcccacccacaaggggcctttcccccttgatcactaattgagaaaatgccttacagttggatctcatggaggcatttcctcaactgaagctcctttctctgtgataactccagctgtgtcaagttgacataaaactagccagtacatggatcttccagtagtactatgtccaatttttgaggacccgccagactgatttccagagtggttgtacaagcttgcaatcccaccaacaatggaggagtgttcctctttatccacatcctcaccagcatctgctgttacctgaatttttgatcttagccattctgactagtgtgaggtggaatcacaggattgttttgatttgcatttccctgatgattaaggatgttgaacattttttcaggtgcttctcggccattcagtatttctcagttgagaattctttgtttagctgtgtacccgatttttaatagggttatttgattttctggagtccagcttcttgagttctttgtatatattggatattagtcccctgtcagatttaggattggtaaagatcctttcccaatctgttggtggcctttttgtcttattgacagtgtcttttaccttacagaaactttgcaattttatgaggtcccatttgtcgattcttgatcttacagcacaagccattgctgctctgttcaggaatctttcccctgtgcccatatcttcgaggcttcccccctctataagtttcagactgctaatttcaagtttttaatcttgactcttctctctgtaaatgtgaatgccccactgtgctttctctgtgatgaaacaaactatggcaaagcaggcatagcagcacttagctatgatcccagctttgtaggggttgagaatcatcagtaccaggacagcctgagctacacagtgagaccctatatccaaaacagaacagctttgtgaataatcattggccatggagcctaagtccttgtagaaagcaggcagtggctaacaagaccagcagtgccccgatgagacattggtgctgcccttcttgaattcctactttgttttctttttctttagaatcatgtttgttaggagttctgagacttcataacaggtggaagcttaagtaatattttcctctaatatgctaatttgctcgtctaggaaagggattaagacaacaccttgcaaacaagaatcatccttcacgcttttaaaaatctgccttctagtaccttttccttttctttcccttccttcccatctccagcttatttgcaggttgggtgaccatagtcctcggttccatcccagtttgtatgcactgtccagggatgattagcagtgccttgctaatatcaatccaaccatgaactagagggcaaattttaccatcacccaggtctaagtgccatgctcctctctgatcaggatgctgaagggctagttcgcactctcttctccttctagctgactcttgctagtacattctgtgtgcattagaacttctgcttttcatatgggagagcattaagctaagggtgcgcttgtgcctgtgatacaatgtatcttaagagttgctctcacccatgtgatgatacaatgtatctcaagagttgccagagcccagcaccatcttcatcctagatcccttttcaaggccctaccttgtacaaatataaagtcaagatttattttttaccaggtgtagtggcgcatatctataatctcagcacttgggaagccaaagcaggaatatttctggaaatttgagaccagtctgagtcacagaataacttttgggttagccagaaatacatagcaaaaccctgttttaaaaggggacagggctggaaatatgacttagcagttaagagaacttcttcttgaagaggacccagcacctatgtggggattcacaagtctgcaatacaacttgtaaggaatctaatgccctcttctggtctctgtgggcaccagccactcatgtggtacatacacatacatacagacaagcaaaatactcagacacataaaataaacctttttaaaaaacacgcacatacaaagaaaaaaagaaaagaaggaaagaatttatcttggttttgtcttgaagtcttctggagcgttcgttccccaccctgtctcgatgcattcctcccacccatggtgggctctccagattgcagatgtcctttgggtgctgcttgacacgaggaaggtggaatctagctccccaaagcagcaggctctgcacccacttccactcactacatgacctgcccatccccacaagcctcccagactccccagaggaagaagataaaggtattgcaatacatagccctgccctaacttagcaagacacttaccccaagggcttcaaatttagtcctgtcacctaactagatacagggaattaggggatggatgcttttgtaccccttaattcgtatgttgaagttctaatccctaatatgatagataggaacataagaccctttggaaagaactagcactgaatattagtgtgttccccaaaataccagtgttgaaacttaatatttaatatggcaacatgggaaggcaaggcctttgggatgcgataaaatcatgaatggcattagaagtccttaagaaggggttgagagcccagtgagctgggccagcagttaggattgcatactgctcctgctgaaggctgaaatttggttgctagcacccatatcaatgggtcacaactgcatttactccagtatcagggttaaaaacctaaaaacctcttctggcctccatgggcactatactcatgcatacagctcttcctcccatacatacgcacataagtaaaaataaaaatgtaaacatcattttttaaaagatgtcaccctggccacccccctctcctatgtgaggatcgagcataggctccatcttgaaacccttgccagatgctagatctttgatcctggacttcccagaactgtaagcaacatattttcactgtctataactgatcagtaaggaactttgtagcggcagaagggacagattagcaccagagccagggcaggagctccctaaggctggcaggcagtcccaggcccagaggccatgttctttgtcacctaagcattcctcacttccctccttcagaggcacaagggcaatgcctcaaggttggaggagctacagaaagaaaggggagggctccctgtccaggaaagctactcctgaaagaaggcttagnnnnnnnnnnnnnnnnnnnnnnnnnnnnnnnnnnnnnnnnnnnnnnnnnnnnnnnnnnnnnnnnnnnnnnnnnccccccccccccccacataagaccagcccatgaaacaggcaggaagggctcagccaggaaaccacaaaccatcaccacagagtgacataaaaagaggcacattaatacacacttcttcttttccgcaccccttctcacttcctgtgtgtgcctccagctcctcacacatacagacactcaccacactgagaacaaagaagatgtgaagcctgatgggtctctcttcgtttatctgtatgcatagactccgtgacgtctgcgaaggaggaggcaggtgtcggtgctgctgttctatttttgatccgatagtttcgtggttgaatatcctcttgagagcttttatcacttcggaatgaatgctttcagagtgaaaagttgtgcaaactttagtatttttctctgctaccactagttgaaaaatatcagccccctgaatcgaggattcagaacttacgtagctcttgtctttacttcctaaccccgccttaataggttactaggaatcaatggttaaaacaacaggaatgtttctctcaccgctctaaagactggaagtcccaagtgcaggtgtcagaaacacatctggtgactcctactgctcctgggctttggtagcatcacttcactctgcctctctattcctactgccgtctttaccatagctctcataaggacacccctgattagcagccacacagaaagtccagaaagactgtgaactgagttgttcgacttaattatatctatatagagcctcttttgaaatgtgatctaagggtgagaacatgggaatatcttcttggagcaatcgatcccctgttagctacctggttgaaattactagtgttaccttcaggtatgtgcagtgagtttaatgtaaaggtgtttcacatacatattaccttgacacccagctggggtcagggaactgagcccagatgatacaagtctgtcatttccccccattgctaagggtctcagttaccaaaaagcctgtgtgctgccctgccctgcatctgatttcctgtgaggctgtcagagatatggtgccttgtcacttaaaaaaaaaaaaagatttatttttagttatgtgtttgttttttcatctgtgtgaaggtatgctaggtttgtgtataggtgcctgcagatgccagaaaaaaaagcattgaaccccctggagctggagttacagtggatcgagtcacctgacatgagtgctgggaacctaactctggtcctgtggaagacaggacacacactgctattgagacttcctccagtgtaactttgtcatttcctagataaccacatcctattccttagcttatgatgttaacttcaatggtacccaagttttgaatgtgatatacagtcttctgtaacactctcctgctcacctgcctgctctccatctctaccggctatccagatcttaatctcttgaagccctctttctagagactagttagaattctactatgctgttgacaccaagacttggacatgaagattgaacttcagtggccctgggtgttaaatggccacatgcaacaaagaatctttttgccccgttatagttagtgtcactattgatatgacaaaacaccatgaccaaaagcaagttgagaagaaaggggtttatttggcttgtgcttccacattgtagtccatcatgaaggatgtctgggcaggaattcaaacagggcaagaacctggagggaagagctgatgcagaggccatggagggtgctgtttacaggtttggtcatcatggcttgcctagtctacttttttttttttttataggctctagaaacactaacccaggaatggcaccacccataataggctgggctttcccacgtcaatcactaatttagccatgccctacaggcttgcttacagcccagtcttatagaagcattatctcatttgaggctccttcctctccagtgactctagcttgtatcaagttaacataaagctagccagcacatgccccaaatgtcaacagcaccctgatcagactcactaatgcagattattaggcactatagcaaatgtaaatactctagatccatcccccacagccaatgacactcttccgttgttcattctgaagcaaggcatgtgacccatcccccaagccaacttcacaatgtattataaagtcattactttaaaaggtatcagagtagcggggaacttttattttattttattttatttttgtaaaaaagtacattaacctgcctggtactttcctatctgctttttcttattctttcttcctcctgaagctcatcttagcattaagagctcttccttgtggcatattaacaatcagaaatttgaatagaacaggtctatatttaacagagtatttttatttttgaagacaacccctatgctccaagtcagttaaagataagacgcatgttactgtctcaaaatctttttattcttccttttcgaagttctgtctccatgtagaacaaaaaaggtaatgaagacacagctgtgttgggcttaatgcttatgccataaaactcttacagttctgtgctctgggcagaatgaagtcattttcctctggactatttcttccagagggcaggtatggccagatcagctctaggtgtggcctgatcatcctgggataatttttattatttataatcttctttctgttcctggtagcatccacatccacccaagctatctcatcattacctatggtgccatcataactactatttattgaatagctaatgtgtaccaagcattgtctgagctcttaatgtacttggaatgtacataaggcaggccagtcacagttatgtgtcatacgtcaaaacaccttagtctgtcaattaaaaataactggaaataaacgtaagcctgcactggtgtctcttggagagttatcacgggaagattctttttgaggcaggacacagtttttggaatcctcaaccaatcactgattagaactcaaagagtgtatgtgtccatctgatccaagatcagacacagacagttgttttagacctattttgccaatgtctttattaaatacctaggagtcttaacaaaataccccctgtagtgtggctgaagactacagaaatgcatcgcctcgtggctctgaaatctaggaagccaagatgaaggtgtgggtagggctatgcccttgaaccctgtggaggaacccttgcttgtctcttctccagacaagcatgaggactagagctcagactcccagcacctacgtcaaagctggtgggcacagagcacacctgtgagcccccactctggggactgagacatggtgtcttcagagcaagctggccagatagaccagcaaaatcagtgagtgctgggttcaagtgagagaccctgcctcaacatatgaagagggagaatgtcttctggaagacacctggcataaacttcttatctccacatgtacctacacacatgtggatatgaggacatacatgcatgcacaccacacagatataaatgaacattagaaagtaaatatacaagtcgtgacagctatgacatcactagatgatgtcacctcatgagactactttcttaaatgtggtctaccaccagctgaaaagtcctcacctagtgtatgtgggtgtggggacaagctaggtagagataatccttctttgtttctgacctacaagtgaaaaggtcaaagatgggaggggagccttctagaatcttcatactatttaacgatttgaataaatcaacatgaatctagaggaaaggaaaattggaggaatacagacattttcaagaaagtaccagaagtctttttgagtctagactgtaactcaaggcagctagaagacccacccttcagcactggaagccttggtaggggaagaaggtgaggtcttcctggagcaaaaagaaccctgggcttatctaaagagacagcacttggtaaaaactcaggttacatatggcaattgagtgagtaggggaacctcatgtactgtcatttttaaggagtgctttattaatagagaaagaaagactgactgtggcagctggtgagctggggttgagcaccaacactgctgcccctgctgtgtgcatgggtgagcaatcaagggaggcagggctggaggcagaagagcaggtgagccccctaatggaagccattctcttgacacacagacttctgcatggctggagggagggggtgtgcgcactggagctgtggccccatcactcttcacagtgtgcacatggcagatgggggctgatgctttgaatacagaaccactgtagcttgatagggcaagggtagacaatcacaggggacactgtggcccaggaagcttgtcatcctgttagaagacctttcttgtcagaactagattcacagcctaattttttttaatatatatcttatattttgaggtaattatatcattttccccttccttttcctcctcccatgaaccccactttgctctctttcaaattcatggcctctttttctttaattgttgttgttttgtgtgtgtgttcttaaatatatacatacgacctgctcagtctgtataatgttattcgtgcgtatggtttcagggctgaccattttgtattggataaccgatggtgttctcttccctggggaagactgttccgctgttctcagcactccttagttgcctgaagtttgtcttgtcttgtcttgtcttgtcttgtcttgtcttgtcttgtcttgtcttgtcttgggttgtggcctcttgagattctcccccctttaattttatcatatccatgggtgtcagctttgttcatgtcctgtttgtgcaaccatgttgatgagacttcatgagtgtaacttctgacatttccaggaggcaaaacgtcacaataaactccccgttcctctggctcttcctttgccccttcctccatagagatgcctgcgccttaggtgcaggacttgtgttgtgaacgtatccattgggactgggctccaccttcttcattttgattagctgaagttttctgtaatggtttccatttgttgcaaagaggagtttccttgaggaggggtgaggactctgcttctgtgtgggtatagggttacatacttagaatgcagttgaggggttatgctggtttagtgatgagtggattatagattctcctctaaactccatggctttactaactccagagagctgactaggtttctagtatcgggcatgatttccctcttactgggatgaccgttaggtccagtgagaaagctattgtttaccaacagggtttgtgtgcacccttagggaggcctgcttcgaaagcttgcatgatgccttctggcaccgtaacagggagacagctttcagttcagatcctgctctgtgctctcgtccctatttctgaagtgcatggtcacacattagtttgcatgatacggtgttgatactctttctgtgtggttatgagcctcacattcatttctcccagccatgtctgaagggtggacatagcttgcctccctccaagttctgacacaatgtatttccctcagctgtaccgttaacagacttcacaggttaagggcccagttcatcagacaccctttccctcagatcctgagtcacccacacttttactatgaattagtagttcccacttcctcctcaggctcaatgaattactagaacaagtccaagaactgggaaagtacacgacttgatgctgtagttttatcctagtggatacaaattggtacctaagaagcatacaggacttctgggagactcctagacaggaaacttctgtatcaagatccatcacctgctaggcaaagcaatgcacatcaccaagactcaggtgaacatcctgattcagatatattagagctttcaaaaggaaataaggcatggttgatgatgagtgaactctttggctgcatggaccaacttgatttctaccaccccgcagccccaagcttgggctgactctcaggctctaagttgcagctctccaagaacatagctagctggtctttacaaactgaaaaccaatatgtgattgaccagtgccccccgcttcccccatgcttctgaaactgtgggtcccccatatgttaaaaccgaacaagaataacaaagctagttctacctcctggaaaatcccaagatttggaaccaaggacaaagaccagccaagtcctctataatccaacctcagtaaatcagtccggtcacgtgggtggaaggtaacagtgccgttcagtgaggctgtctgtctccagcaccatccacattcatcctcaggaaagaaatgtatggcttgagctatgcctgccttacctcgtggaagcgcttcaggatgatggagtgaagtagtcagggatgcccatcatactccagccattggtttctggtccaaatcgatgttacagactcacctagtgctatctgtcttcctctcagccctggaatcatctatttctacaagggccttggacccttttccggaagtatggcgcttggaaactaaaactcaggcttggcttggaagccactctgacatggcattgctcgttaagcccgttagtagaatcaactcaaaactcaagccctctccccttcagtgtcagtcacacgaaccacaacttcaaaacaatcccttgttgcatggtctgctctagctctctcctctccgtggattgaatactttcccgaactgttagaaggggtccattcttttcaatacaggtctccctttgctaagctcccctgtagggaactaatttcaccctcattcagttctttgtgtccctgggctggctgctaatgccagctccttggccttaccgttctgacccttggcccatcagcacttacaagaaaaggaaagagataagggtgtgtgaggggtggggaggggcaggtataaaaaaagatacaagaacaaaacaaaattgtgttttttataatacagtttaaatgggatcctgtaagagactgctgtgttaaggtatgctcattaaaagaaaaagagtattaacctggagccaagcaacatcccaaagagttaactaacgtaattttcacaaaaatcacttcgctcagaagctattgcgtcctcatttattaggaaaagcctagatctgaagcttttaggaaaagcttttggaaaagctggacctggatctgaaggcatgtatgcacaaattatcaaagaagtaatttaaaaatgaagaaaagaaatggagagaaccaacttcaattctgtcttcaataaccactcttagtccccaggccacctctccagccctggcaggtttttacaaagtccatgacccttgacccagtaattctactcctttggattaattgcaagcaaacaccagtttattatttatataagaaacacttttcattaattttcaaatgttcacgacagtaaaaacaaaaacaaaaacaaaaaacaaaaaaaacataaatgccttaggtttctagaatcagagggctaaataaacatattatggtttgttgatacagaagactattattcatctccaaaaaggagcaacaaagctggggtgtaggtcagtggcagagcacttgtctactatatacaaagccctaggttcaattcccagtgtaacaaagcaagcaagcaagcaactttgccagggtgtcatgatacctacttgtaatcctagcccttgggaggctgaggcaggaggactgtaaggccaagaacatcctgagctatataatacctagtatttcatgcatatgaaattgtagaataggaaaattcattaaaacaacgagaggggaaaaggagttagtcacaagggttgacccggacaaagaatcatctaaagatgtggaaaacatctgttttaatcagtaagtaggtctcaagagggtatttatgtgtcagtactgaattgctaaaatttatacatttttaacatgttacacacacatacacacacacaacagtgtgtgtgtgtgtgtgtgtgtgtgtgtgtgtgtgtgtgtgtgtgtgtacatacatagatcaccttaaaggaaagctgaagaatggcagcatctcttcgctgaagcaggctgggaatgcaaagagggctcttgtgctcctgaacttatttttgcataacttaactgagattttcagttctacctcagtcagggttcctaactactacaaaatgaagtgctcagctaataggtttcagtttggtaagaggtaggctctacacttcagcaccagaggtgggaactgcaagtaggactcagtggagacatgagagattctgggtaaaatatcagggtgaccaggtgggtagagatgagcaggaggtcaggagcagaagtgggtagagacagtggcagacctgcctgcttcataaggtaggccttacattctcgtccaggcttctctctctggagccactgtagatcacttccttcaccttcagccttcgttctgatttcagagatgatattagattgctggtctgtactctggtccccacatcccccaccccacaccatgcatctcacagagcggtagtgggcttctctgagagccattgtctttctttgtaggaaagagagttgtatggaagttcaagagaattgaaaggaggcatctggaacaagacgttaattggacattattttaaaccagcattacttaaatattagtcttgacattttcctagaagagagaaaaaagcaacatgcttgcttctatttccaattatggaattaattgcattttgcttgctaacttagacaacttcttgggaggcatgtttaaaaaaaataaaaaaacatacagtctaaacaataaagcctccctcctcttcctggccagcctgccgtctcgggtaggctgatgtaggttgggtatccatgcatttcagactcctagttcagaagggtcagtgtcagtgaggttttaaatctgcatccagggaactctgctctgccaggagtggactcagctcactcactctatgtggacccaagggagaaatgtgattaccagcagctaagttgggctagtcagggctttctggtgggcttctgggaagccttgcagttgacattcatattaatcaggctggcctgtgtctgggccaagaagtgggggcactggtctgtgggtgtgggacctgctgaaactgtgggtaaaagaaaaagaaaaccccaagagcagaacacagaggctagtgccttcctgtcagctctcctaagatcatcttttcgtgggtctgtcccttaaggtcagcctcatgcttccatcttctccagctctgccatgccccaagtcagcttggcaaagcaaaacattggtgtccagggctcaccatcccagcttagtcctggcatcagcttacttaccaacaataacgcagtggtaacacctgcttgcttccctgagtcacgtggactctgtgcagtcatgtgtggagaagacctggcagatcttagtcctgtactgcatcctgctggctagactggaaactatccagaaggggcttttcacagggcacatgcccagctggtattaattgtttttgaactgtgctctcagcctctgcatcttgtcctcgcttctgctacctcctcccacttcctctatgtctgtctcattctgccaaattgttcattcaccgggcagagcacactgtgtcccagggcctgtgctcactgtcagagaatcagaaataaataatagccaagacagactgccacacaggattaggggatgttcatggggagcctgtgagagcccagcaggggtgcatccctgacccttagccctcctgtctcctccctaggagatcatcacctccatcctcctgagtgggcgaatagggcccaacatccagctggctgaatgctatgggctgaggctgaagcacatgaagtcagacgagatccactggctgcacccacagatgaccgtgggcgaagtgcaggacaagtatgaatgtctacacgtggaagctgagtggaggtaggaatgtcatcctcccttcaagcatgcccgaggctcggaatcttctagaaaactggagtggctttctagacttagtcctcccacccgtccggatgagaatagttttgaggtctaacctggcttccatagagaatcctcatttcaggacagtatctaggttacagttccagaccagatgctgttggtgctatggtaagagggagcagagggcgggaaggaaggagagcccaggccaagggcgggtctttgaggtaaggaaactagtatctgtgccaaaagcctcatggatggcccttgcatgctgagggtagaggagctttggccctgtgagtcttactgctctcttgggaattcagcttcccagtgtcaaccagagtctgtcttgatacaggtatgaccttcaaatccgctacttgccggaagacttcatggagagcctgaaagaagacaggaccacattgctgtacttttatcaacaggtgaaaagcaccccactgtcttcaggggagatggaaagataaaggccagccttctagaaggcttcccctccccacccccaggctgtttcttatgctcctatctcccatctgtgtggctgtgtacctgtgaagcaggaaaagcaggttggtgctcaggcaccgaggtgtggtttcctgccactgaccatcctggtattcccaaggacttcatttgcatgagtttgctttctcctctttaagtttagagcggtaaagagagttgtcacagggaccaagtgacgtccattcatggcagagtactggcaaattggcccgaggaagaacaagttgtagttcttaccacttcccatggtgtaaatactcctgttgtggcctctttcaagccatcagtgtggcacctgctagctcacagaactttcaaaggtgtgcnnnnnnnnnnnnnnnnnnnnnnnnnnnnnnnnnnnnnnnnnnnnnnnnnnnnnnnnnnnnnnnnnnnnnnnnnnnnnnnnnnnnnnnnnnnnnnnnnnnnnnnnnnnnnnnnnnnnnnnnnnnnnnnnnnnnnnnnnnnnnnnnnnnnnnnnnnnnnnnnnnnnnnnnnnnnnnnnnnnnnnnnnnnnnnnnnnnnnnnnnnnnnnnnnnnnnnnnnnnnnnnnnnnnnnnnnnnnnnnnnnnnnnnnnnnnnnnnnnnnnnnnnnnnnnnnnnnnnnnnnnnnnnnnnnnnnnnnnnnnnnnnnnnnnnnnnnnnnnnnnnnnnnnnnnnnnnnnnnnnnnnnnnnnnnnnnnnnnnnnnnnnnnnnnnnnnnnnnnnnnnnnnnnnnnnnnnnnnnnnnnnnnnnnnnnnnnnnncagtgcctccattttagtctttttcaaagatttatttatttatttagtgtcttcacacacaccagaagaaggcatcagatcccattacagatggttgtgagccaccatgtggttgctggggattggtcccaggacctctggaagagcagtcagagctcctaacccctaagccatctctccagccctgccccatttttttctttttttcttttcttttctttctttctttttttttttttttttttgagaaagggtctctctatgtagccctggttctcctggagctggctgtatagaccaagctggagctcaaagagatccatctgcctcgcaagaactgggatgaaaggcacaagccaccaccttggctcaaaagtatctcattaagctgattacgctggccttaacaaactcatgtagcccaaagataccttgagcctataatcctcctgcttatcatgtggagtagctgagattacaggcctaaccattagaccggcttcagttttattctatcaaaaaaaaaatggccatgggagaaaggcacgaaatgcttctccatggtgggatactgtcttcattacttttctattgccgtaaagaggcatcatgaccaagggaacgtactgaagaaagacattaggtttatggttcagagggtaagtttgactattatggtggcgagtgtggcagtaggccagcaggcatggtgctagggctgtggctgagagcttatatcccttatctgtagggaagaggctgagcaagaggggggggggagagagggagagagggagagggagnnnnnnnnnnnnnnnnnnnngagagggagagggagagggagagggagactgatagataggcagatactgggagtattctagacttttgaaacatcaaagcttgcttccagtgacacacttcctcccactaggccatagctcctaatccttcccaaacagttcctccaaaagggaactaggcatctaaatttacaagcctataggggccattctcattcagcccaccaatactgtacagaagagaccaagccctgtaagcatcactgtgtttacctcccagggcctctgctccaggaagcaaaagtgagggcatgagtctgatccttgacctttctcccatcagctccggaatgactacatgcaacgctacgccagcaaggtcagtgaaggcatggctctgcagctgggctgtctggagctcaggtaggtcactgcgcgccctcttctgggaaagctgggcgctggctttggacttgttggcttgtccctcttctaggaagtgaagtaggcatgtgagagacagaaagaggaggagaggaggctaataacctgaagggctcactgtctagtctttatggtagacaagggagaagagccactcccactctacctggtctcttcccacctatggcttgtcccaaccccccacccacccacccattgcctgtttccacccaccattgcctgttcctgccctcatttctaagctgcctgtctctctgacccccccatcactgctgctgttactcagtgattcagagatgtttctagaactctagcctgggtttaggaaaccactcaaaggtagggatctcagtctgggctgcccatggctgcatcccaagctccaagaggtacgtactcagtttgtacctaggttagcacaccatcaaatcagtttgcagtgtttggagatggcatgtatgccgttaattataattagagacagaatgggtgtgtctcaaacagtcttctactaggagaaggtgaccaaaagtaaagttgaactgttcctggaaggaagtgaaagatttcagctagcagatagtgggtggagttaggttggggaactgggcattccagaccaggaaatgtggggcaaaagccatggctgggaatgagatagtggaagcaatgaccattttgatggcaggctgatgacatcattagaatgacatcgttagagtgagacaggacagtctaagaagccaggccttaccctttgctgttgtatcccattgccatttgagacagaagaggaccctgtggctaaacctatgtgcttagcctggtcttgaccaaggccacaataccttcagtttgatcagccaccccctggtcaaacctcccttccctgttgtgcggccccatcagtgtaaaagcagcttcaacatctgagcacacattgtggttacctgggaggtagaaacactagcgtcccaaccccacccttggtcctgtggtctacaagaccttagaagatgaacttttagctagcctctgaggtggtttagaggcagttagcctggtcagaattgctgaaagactttcaaggagtgttgccaagtgttacttctgtttggcccaaagtgtcattctgggggatttttgactctacccatgacatccatccacattgactgaaaacggaactctgctgactcttccatggaactggggggtggggcttagagagaggttgttggggtccatggtggggattgtacagccggaaggtgaaggttccattttgatttgagtatctgagattgttggcttgttaaggacacctcatttccttacagttagtggcagctggtcccacaaaagcaaggacctaatagtacccagtatagggtctgccatcttgggtgctcatagacagtgtaccagagaacctatgaagtttgttatatgtgtccttgtctgtcttctgtgtctgctgtagtcatgaagcttgaaccagatgttacaggcttcctctcagaaatgagacaatgctaaaaagcagatctattgagcttgatatttgtggagctcatgctagactgtggtgttattctgagactccagtaagccacctggtccagatctgctggcaaatgacttcatattcttacacccttcaaccatcctcaaactgatattggttacagtccaagtaccaagcttggcactcaagggttagacaaccagagaagtatctgaactggcctctatagtcacattgagttagacaatcagagaggtgtctgaactggtctctatagtctcatcaagagggcatagtgtgctagagtctgttccttaatcacctcagggttgtccccaaactcacactgtttcatgatccaacatcctgccattctggtgatatcctgagcctgagaaagaatcaggctctaactctgagggccagggctgtggtattccagtgggtatgtggaaaacacctatgtaaacctactaggcttccaggcccagtgagtttcaagtggacaacgtagaattcacagcttacatggtgatggggtgagtggacttttaaaatgaggttattactaattcttaccaagagtcagacaggtttttgaaaatcagaccataaggcagaatcttctagacctatggttctttacttaaactcatgggcaattggcctccttctaccaacatcaaggattgcataacctgcctacagataaatgacatcaccagaaaaaaaataacatatcctttcctggtttaaagaagcacaatgtgcacataagacaggagactggtgatgtcagacctcaggggactggtgacatcagacctcaggggactggtgacatcagacctcaggggactggtgacatcagacctcaggggactggtgacatcagacctcaggggactggttcctgttgagaagaattgggctgactgggaagaacagagggtctaaagcggggtacctggacaggaatgctgagtcttcatttgctgtgctgttcttgacaagttacatagtccctctgtgccttaatttctttatcttgaaaataaggatgatgttagcagtaaccatcttggagggctgttgggaagagtgagttagttaatatatttagagtcctgcgaacaataacaaagtgtcctagaattagttctttattcattgattctataaggggtctgagatctggactatcctgaagagagggagaaagaccaggaggaggaggtcacaggccctgacaggcagcaaaggggtgaccagaacggaagaaagatgttcaagggagagcaggcagtctccctctgtccctgtgccaagtgggagggtgagggccttttcatatcactcttaattatatctgtggtacaggattttgtgtgctcgaggcaagccctctagcactgaggcagacccccttgggctcagtttactcgtttttgtttgttttgttttgttttgttttgtttttagagaagttttaggttcacagcaaaagttagcagaaggcacagaggtttcccatggatcctgggcccagcaaacacacacacacacacacacacacacacacacacacacacacacacagagtttcccctattgtgaatatccctcaagagcagtgaagttcttatggtgaatgaatatccacagatgcaccaggatcacgcaaagtccacagttcacatcaaggttcacctgagtgtcacacattccacgagtgtggccaaacgtcatgcagaagtttcactactgtgaacatctattgtttgtctcgccctccccggccaccaccaacctttttattattacggttttgcctttcccagggaatcacatagttgggatgatagctaattgatacttatttattatttatcgaagggttctttatagatgccaaacacatcactttgtgtaagcattctactgttgggtccagggtggaagccaagaaaatatacttcagatgtggaagcttaaaaatgaaagctttattttctgagtgctcaggaaggtggccagttcaggatctgaaccgtaaccctgaagggagattgtacaacatttttaaaggatgggaacacaaagcaagggggagctaggagcgatgcagtgttagtttgtgtcttgcaattgtattttgacattatgggttaagcaagggagtacccatggagactgggccatatccagggtacctggcttcaaggtccttaattcattctcctagacattgggtctggagctcagagagatgtgtggagaaaggagtaggtcagcctcgtgcagttaattagggcataacaggcaattgattatatgtttttacaacataggcaccttgatttagataacagcaatttctgtattctttaccagttaacagagcattaagaaaacatttggagaagtgggataggtgttcattcctaggcctgggaacgtgaacttgtttgaccctgtcagcagatgaagaagttgtccttgagaaacaggtcaactatagggaagtccccaagtcctctagggcctgggatcttgaactcagtttttaaaaatgaaatggtagtacttagagtaagtttctttttcttgttccctattgcacagtaaactatgaagtgcatgggccatatgctagagttagtcagaaggaccaagtaacttatcttctttgaccagatggaaccaggaatatttcccttagccagtgagacaacagaactttctgggccaaagaatcatagtgaatgtgttacccagggcttgttcagaagtgactgacaaggctaggattagagaaagaatactcaccttgctttgcttcagaaaatcaggaaggaatttgaccttgtggttaacctgtaaatgttggcaacaagttaacattttattactgccaagaggattttgcatgtctttattttccttagttctggggattgggtgtggatctgttaggagtctgcacccgcccatagactgctgccatctagtgtttgcttctcagaattgcaggctcggcctggagagaacctatgggtactagaggcagtccaaacaactggcacctcttatggttcccctcttcagcctgagaaaaaaagtctattttaaagtttcgtttttgattgacacatctgcttctgttgcttttgaaatatgaaattgttgttagcttccgtcatcacgctgtgcggcagagcatggagcttaggtctcttctcacatttaacattataaaagtggttgggtgtgggaaggtaaaggctcccatatttgggcaacttctttaaggtgtgtaagtcggtgctacctgcctagctttatctgcagagggaactttaaagcaggtctggggaagcacgtctttaaggaaatgattgttcggcccgagagtctctccatcattgaaggccttttctgcccctcactcacctcacgcacatgctagactgtgtggttggttctgtctaccctggtaaacaaaaacgtcaatgaattgatgtcttagatgtttttgaatactttgaaatctcaaagctcacccccaaaggctcacttcatccaacaaagccctgcctcctcttcccaacagcccgccaactggaatagtcaaacatatgagcctatggggggccattccaccacattctactccctggtcccccacaaacttgtgggatcgtaatgcaaaatgcatctagtctaactgcaaaagccctggtagtctttcagtttcaacactgtttaaaagtctaaagtcttctgctgagactcaaggcaatctcttaaactgtaaccatgtatgaaattaaaaaaaaaaaaaggcaggctgcatacttccaacatacaagaggacagaatatacattacaattcaaaatgggagaagagaagacacagtgagaaaagactgggccagcgcaagactgaaaactcacagggcaatctctgggtcttcttgctccatgtctaaagtcagaggactgagatggcgccaccccaggggttctcaacctccctgatgctgcaaccctttaatacagttccttatgttgtggggacccccaaccataacattattttgttgctacttcataactgtaattttgctacagccatgaatatctggtatgcaggggatctgatctacaacccccaagggggtcgcgacccacaggttgagaaccactgctctattctttttctgctgactgcaccatgcttctccctctcgggatgcttccactccctgtatgtagctcttcttggcagggtcttatggttccagcacctcctttgcgttgggatcgccagagcaatccaggcttagcttcactcagtagcttcatgtagggactcccttgccacacacctgccctcaggggctctcctcaaccatagaggaagactccatggtccctttactcatgtatccattctgacttgaaatctaggatcatgtggatgacactgctatgtttgactgcccatgtggatagagcctggcctgttgaatcacatttgcaaaaaaaaaaaaatttcctctgttattgatttattaccaaccatgggacagaatcaatattaggctgtcttggactctcctccaccaagaaaactattccaacactttttaatttagcatcaggcagattctaaggacaagagaagtcagcagcctcatattttgttgttgttgttgttaaaatatcacaagaatgatatagagccgtgtgtccaatagtgatctcctctgaaacctcttgaatggctcttccatggttcacattgctctgagcactattttcttccaagcctgtgctaggatggcccattaagccttacttaaaggagtcaactgctttcctagctaaaagttccaaagtcttccacattcctcccccaaaaaccagcacggtcaggtgcatcataacagtactgactccactctgggtaccaactttttttttttcctattgctgtgataaaatgccatgatcaagacaatctataaaagaaatcatttaatttgggtcacaatttcaaagggtttatagttaagttaatggtggcagaaggaaggagcagctgacagctcacattctgatccactgggaatgttgagagtcttctgaaacctcaaagccatcccccaacaaagccacacctcccaatccttcccaaacaggtccaccaactggggaccattctcattcaaaccaccacacttggtaactcacaaaggactaaattcccctttttttagttctgttccaatatttgtgctgttaaaacaaggccatttgtgtaagggaagccagtgtgtgcagttacccaggacatgtgtcatagctcactcagtcctggagggaatatggacaaccacactgactagaacagtcctgggaaggcttgctctgaggttttctagaaatgtcataagaagcagatagcactggcttgggggaacttctaaagctgccatgactgatcttggagaacttaaccacagggtgctttgggtgggtgatgaagcaccctagacaggccccttagagctcctagttgaacctgctcccggagctatcattcatcctgtgatttcacgtctgcagacctgccctacagaggctcattcctctttcctggcatcgctatttccaaaacccagcagagagaaggggcagaaggaaagagccatggctctgcgttttccaagttctctcctacttagggacgtttagggatgggtaactccttgtcaagatggggctttcctgggtacacactgtagtgtacatctctagatgctgctgtcagcatgtggagcaaccaaaagcacctccagatgtagataagggtttcaggctacagggggatagtgccaagttgcccccatttgaggacacttagacccatgcaaggcacacttgaaatgtgtttaggaaataaaacacacagcgtgactgtagattttcttttagttcagtttagttttgagacagggaccttgtaacccatgttcactctatagttcaggctagccttagactttgacattcctgccgcaggctgagagtccaggtaaaaccatattcttggtttcatctcctggcttccgttcatttgatatggtttaagactttctacccttttctcttggcttggaagtagatagaatagaggtatattccaatatcgttaactagaatttaataatatccctcaagtagtcatgaactgtccctaccacactatcctcagtcgaatgtgtccctttttgattgaataagaaaaaaaaaactttaattttttttttttttttttttttttgccttactccattctatccagtggtgtttgaaacacattcaatatggaggctcctgtcatgttgtgttctcattctcattcttactttgtgtcacttcttttcctgtgtcaaacagtggaaacaaatgcagacgatggtctggtgtgtgtgtgtgtgtgtgtgtgtgtgtgtgtgtgtgtgtgtgtgaggggggggggataagggagagggagagagaggggggaacacgtgtcacagtgtgtgaggaggtcaaagttcctcaggtttggtggcaagcaccattgtaatctgagcctaaggactgtttgtttttgctgatgcctacagagctgctgttttctctctcagctacacatctgagaaatccaaggactagagccctaaagcacggggaatctccggggaactcagctcactggcttcccctttcctcgtggtttcataaatatctggtttcattgctcttcgagtcttgttaccccacccatcctcgctgctccctacatctggtagagacagatgctcataggccagcacatggatgttgggtgccgcactcgtaggcttcagccttcagctctcggccctcttctccatcccatctctccctctctctccccaggagattcttcaaggacatgccccacaatgcactggacaaaaagtccaactttgaactcctggagtaagttttgtgtcagacatgcatttcccccacccctcccccagtgtcccgctgtctggttcacctgcccatctccccaggggccctagggctcagttccctggtctccaggccctctcacctccttttggttggtcagaagttcagcgtgtatcaaatgtggcttctgttttccttctttcagaaaagaagtcggtctggacctgtttttcccaaagcagatgcaggaaaacttaaaggtgagggaagcagagatcaaggagcccagggagccctgttcgatgtgggtttgggacaagagctagagagtccagagaagaggatctatagcctgaggctacctcacagaagacagcagatgcacgtgataggccctccaggcctgggaatcaggatgaggtgcacctggctcacaactgccttcgaggcctgattcctttcatgacctgggtggtgggattccatgccacccaccttccttcaaaagggttagcgtgtgcttctgtggaggtggtcctgagctttagggactatcttcagctcagtatctgtcgtggcggagaccctgggagccaagttgtagcggtaggcagcctttctataagatctaaacaggaagctgagttgaccctgtactccccatcctctgctcagcccaagcagttccggaagatgatccagcagaccttccagcagtatgcatcactccgggaggaagagtgtgtcatgaaattcttcaataccctagcgggctttgccaacattgaccaggagacctaccgctgcgaactcattgtaatggcctgttcctcttaccctcaccctgcatgaactccaggcctctgggatggaaccccgggggggccaatgcatggtgtgggggaggggaaagaggaagttgatcagggagagaaaagagatgggaagaggtgagctgtatggtggagtttagaatggaagaagggctagagagatggtggcgtttgtttacgttaatgagattttttttaggagctgggcagtgtggtaaatggtgccctttctccttttattccagcaaggatggaacattactgtggacctggtcatcggccctaaaggcatccgtcagctgacaagtcaagatacaaaggtagagagagcccaagagtgagcctcagtccagctccggctcaggtctctttcctcctccctgcctcttcttctatcctcccatcatctcttctctgccccattgcccagggcagagactttatagggtctgacctgggtgtagatttgttgagaggatccggggatagcagcgagggtcaggtggttccttatttgccgtgatgctggtgcacaaagtggagtggggagcgagaggatgccgtagatattcttgtggtgcataaggaagagtccccccttcgatggtaaaacaagctagtgacttcctgggaacctgggtccagctctggctctaccccccaacctgacatacaatcttggcaagagcacctttctcccctttttcttctgcaacctgagcatctttggtttctgagacagacttgccagcgatattctctccatcctcaagagagattccgcacccctcatcttcaccctcatcttgaccagtttccttggtcagatcctgaggataattggtcttcagtcttccctgcttccttcacagcccacctgcctggccgagtttaagcagatcaaatccatcaggtgcctcccattggaagagacccaggcagtcctgcagctgggcatcgagggtgccccccaggtgagcatttctggggtacctgggagctctgtggatgagatttattcaagccaagctgtccaagtctgggagggactaggggttctctgttaacagatcttgttaagcaacatgtatccaggactggcaagagagaggaggctaacaccaaactcaataatcagagttcagtccccactgtcaccctgacacccagcccatgtactggaaggaaagaaatgacctggagagaattttcctctggtctccacatttatacagtggcgactttgtggcctctctcctgcagccaacaataaataaatgtcttagtcagggtttatattcctgcacaaacatcatgaccaagaagcaagttggggaggaaagggtttatttggcttacacttccatactgctgttcatcaccaaaggaagtcaggactggaactcaggcaggtcaggaagcaggagctgatgcagaggccatggagggatgttccttactagcttgcctcctctggcttgctcagcctgctctcttatagaatccaagactgccagcccagagatggtcccacccacaaggggcccttcccccttgatcactaattgagaaaatgccttacagttgtatctcatggaggcatttcctcaactgaagctcctttctctgtggtaactccagctgtgtcaagttgacacaaaactagccagtacaataagtataaaccaaaataaaactccacccattatccaaacaaggtatccatatccacactatgctaatggtaagatttaaggaaatttggaggaaaattatttctttaatatcaagaaagaagtagaaaacgttttaggataggtagaggtgactgaaaataaggtacatgtatagcagaagtctaacacttagtgaataagcaatagtttagaaatcaagatctaagggacacggggctcttttgtaattagaagtaggggagagacctcagaccaccaaacatttgtttctcttctcttagcagcatgcacttagcccccaattctgtccacctcccaattctcagttttggcctgtacacaatgagcgcccaccaaatacaaagcatcttgctatttgctcaaagatcagagagccagacctggccttgcaacaaagatcactaggtagccagcaggagggacggacagtgcgccctctggtggctgtctctaacgacacatgagtgggtggagtcccacagaggtgggccgggtcctgcagccctttcttcctccctggggaaggtactctagcccagctctgctttctcaccattggctggccccttctttacagtccttgtctatcaaaacgtcgtccctggcagaggctgagaacatggctgatctcatagatggctactgcaggctgcaaggagaacataagggctctctcatcatgcatgccaagaaaggtgggtttctcgtgggatgtagactagcccagaggtggaaggcagagggaagatcaggcattggcccttacatggaagcaaagattttaagagtgcgaggaggtgctaagtctattctagatggtcagctactggaagtaacttctcaaggggctgtgtttgcagcctctggcatagcagagcctttgataacatataactgttctgttctctgtgatcctgattagggaccagtcaggaaatgggtaagactggagcacgtgatgttggcaggaggaagttttcaaagagggttctagttccagcttccaccatggtgctgacagggggccttagatgcagtgttccacctgccatccattcacccatatgtccctgtccccaaccctaccttcctctactttcccttagatggtgagaagaggaacagcctgcctcagatccccacactgtgagtacaagagagatacctctatggcacagggctggaagactatgcagggaacaccaccacctcccttgtttctgagagaatgcttgagtctcttcatttcattagggtgtgtgtttcctcccagttcacacccatgggacattccctgtcccacctggtgctatcttgagaagaaggcttctgtctttccttcagctcttgccccttggagtcctgggctactacactcccagctcactgatagccaggttggctgtttttaaagatcccgcccatcatggatgtgtggatggaggcagagtggggctgcttgaggggggatgtttcagggctctggggtcagctagctcctgccctcttaccttgtcctacagaaacctggaggctcggcggtcgcacctctcagaaagctgcagcataggtaagcatgctcactgaaccctcagcctctactcctccttcatgcttggcgcatgctcactgaaccctcagcctctgctcctccttcatgcttgcccgaggcctgtgtttcctctgccgatgttactgagccttctaagtcacagtggtaactactttctctatcgcttctcaatgatggctcaaaaaaaataccatttgttgtaataacaagtgtgaataatttgtaccacggtactgttttgatcttggtcagctgtatcggcacacacaatacaatagactgaatgactcaaaaccagccatttctttctccgagttctggaggctggcaagccccatctctgcagattctggctggagaaggctttaggttggtctccttgctgtggggccacatggtagatacagcaagctctagtgtcttcttttaagagctgattttaataagagtcctctctcctcatgatgtcatctgactcttatcgcgtcctggaggacaccagacgtcacactgtagggtaggactgggacgtgtggatttgggagagatgaagacatcaagttaatggtagagtaaaataagtgatgtgtcatttgaaactaacaacactgagagaataagctcgggtcaagctaagtgtccctgactgtgtggcttccttgaatcctggtgtaggagcctggagtctcctgcatgagcccaccccccacctcgatgccctggcttcctaggcaggagccatgctttaattcctggctgtgcccagtgaagacacatagcccatgggctgggcccctttctgtcattacagagtcagacatctatgcggagattcccgatgagaccctgcgaagaccaggaggtgggtacttgaagaggttggtcatccctccaccacggtgaccagagtcagggccctgggaagtgacaccatgagtattcatgggacaccacaggagaaccttctgttcttccttcatcctcattttcatgtgctcagagaaaaacggaggaacccttggtttgggacctgagattctgttacagattggccttgtgtgggtctgtgtagcttcagtgaggaccttaagaatgtggagctaggaccaagggatcagggaccagggaatggggaacagaacaatagatctttctaaagctgagacgatggaaccatctagatgccatgtccagctatgtccttggatctttgctgttgaaccctcaggtccccctggggaggccagctgcactctggaccctgtgacccccaccccgtcttctctttctatgcaggtccacagtacggtgttgcccgtgaagaagtagttcttaaccgcattctgggtgaaggcttctttggggaggtctatgaaggtgtctacacgaaccacgtgagtctcagactcttatctgacgtccctctcttctgcctgagaagtgagagaggagtgggtttggaggtagcagctggctgacacacagtgggtcctcattcacatggcatgggactatttctggagcacccaagaagtgagggggacgagagtcaatcctgagattggggagcagtgtactggggggtgggggaaaaacactgcggtctcaagcttgtgggagaatgtagaggagggaggatggtaagatgaggttagaccagggctgaagcaggaatcaatgttcaggtcgctgaagctgaggtgagccttgcctatgtggttaggctgccagcaggctggagaaggcagaccccatggagagcagaatggttgaaagccaacagtaacgacagagaaggaggccctgtgtgtgttctgccacatacctgcttgcctttgggcagatcacgtgaacgctgtgtcctcatctggacacagggggggcggagtggggggcagagtggggggaaggtgccagtcagaagccacactgtttgcctaggctggtagtcaagtctgagatggttgtgctgaggctgaagggaagacaccttcttctgaaaagcattgtggtccctgaacacacacttctattgcagaaaggggaaaaaattaatgtggccgtcaagacctgtaagaaagactgtacccaggacaacaaggagaagttcatgagtgaggcaggtaggcatcccctggggagaggcccctgagatgctccagccccccggaacgggagctgggaggccgggaaggaagtcagagcagcaacgggaccccacccccccactcttgattgcaaaaggtctcttgtcccatgttccacagctggggcaggaaactgtgtttctctttatgtgtctaggaggggaggctgtgttggtggtggaacacttgcctggcatgcataaggtcctgtttgctcctcacctcagcactggggaaagaaaagccaagtgttttctgtatgacctttaacctgcttcatctccctcgccctccttcagtgatcatgaagaatcttgaccaccctcacatcgtgaagctgattggcatcattgaagaggaacccacctggattatcatggaactgtatccttatggggaggtaagctcaggggccttgataagggacttcatgtgacaaccgggctgcggtggagcaaggcatgggaggcatttacagcaaagggtttttcctattaagtgtctttcctttaactattaggtggaggaattgccgaaacatattaccatctttgaatttgcccctcaagggaattgaagggtcagtggctttcagtagcctggtgccttggtgccatgctgggacagaaagtcattctggtgtcctatcttttcctgcagctgggacactacctggaacgaaataaaaactccctgaaggtacccactctggtcctgtacaccctacagatatgcaaagccatggcctatctggagagcatcaactgtgtgcacaggtaggaggggtgtgagactttaacctggttcccgagagggagacagtgtatagaatttaagagtgatatggtcctaagccaggcccccagcctggtctgtgcctggcaactgagagtgctgggtactccagactcagatagtctccatgaaacgtttcctcaccgggaaacttgaaaggtccaaggatactgagaggaagtccaaagtctgaggtctcactgtagctctgtgccttctgctgcatcctggcaagtgctggggggaggggctgccctctggctcagagctccagctcctccactttgctctctgcatgacacacagtctaggaagaaggaagtgggctagagaagtgtctggagcttcctagggtcttttggtctccaccctagttctctggtgttcctgaaccaccttctactttaactatagctacacgggtggctcttccctgctctccactggctttgttctcattcccttgagatcatgagccccgaggagactacactgggatgctcaccccaccacagacatggcctgtgtggctttgagcctgattctgtgcagagccatggaggaattacaaacaactactccccgcatcccccacttcatccatcaacttccttggaacaccttctcaatccagcctgtgtcctagaacaaagtcagaccaacagaaacaagaatcctttccctttagaatcacattctagtgtgagggtcaaatgggggttgcacatggcctggggctagggagatgtgctcacaggtttcctttatgtatctgaagctgtgtgttttaagaatcatccttttagtagcagaaactgcaggaagtggcatggcctgtgagaagcaggagggccctttggggttggtgtgccactatgaatgcagccggtccaggtcagcggatactcctcaaggagagctagatacctatgtgttttagaacttatactaccctggtggcactctcttcctgtcagaaacctcttggtatgttccttcaggccgatgtctggctctctcagcgtgtaccagggtcctgaggcagtgcctcatattagccctcgattcctctttcagggatattgctgtccggaacatcctggtggcctctcctgagtgtgtgaagctgggggactttgggctctcccggtacattgaggacgaagactattacaaaggtgagggcttcccagtggccagtatggtttatagagctcaaaattccagagcaaggaagttgggttcaggcagcctcggccagtggtctctgaagagtaggaatacaattctagatcttatatccctaaataatcccttaaacctctttgtcaaagcctctgtgacacgtctacccatcaaatggatgtcccccgagtccatcaacttccgccgcttcacaaccgccagtgatgtctggatgtttggtgagtggtgattagaatcgggtgggcctgggaaagtgctgattctcatgtctgtggcctgagcaggagggcagaagagagaacaagggtcttacgtgtgcccctcaggtcccagtgtcactgagaagtcccaaaggttcagagagtcagagcagccatgacatgggcaagggcccggttgggataaactgggctcactccctcgtaaagactcttgtcaaaagcttggactacatcagccatccccagggactgtgtgggaaaggcttcatggagaccttaaagaaagctggccagcttcttttgatgaggaggctcaagaagagagagaagccagctgatgtgatggacatttccgcctgcagctatgtctgggaaacaacatcactgctccccctgagcattctccacttgaggaaatgaaggctcagaggagccaggaccttggccaaggacacaggcaacaagtgtcagtactagtattagaactccttaacccttgaagaagaggttttgtgtcctacctgcccatgaggaagttctgatcatacagataatagcctcctctggatccccagcatcttagtagctctacagggagggttctaaggagcagattgtagttcatgtactataggtataggctgtagttgtcttggcctggaccattgtgatgggcaggacctcaagggagattgtgcctcctccatttgggacccaccagtggccacagttatcgctagggagagcaagctggtccctcccctgagtcttccctctctgctctcagctgtatgcatgtgggagatcctcagctttgggaagcagcctttcttctggctcgaaaataaggatgtcatcggagtgctggagaaaggggacaggctgcccaagcccgaactctgtccgcctgtcctttacacactcatgactcgctgctgggactacgaccccagtgaccggccccgcttcacggagcttgtgtgcagcctcaggtgagcataaggtggggaactctaagtagaggatgacgctgcagatgctgtgggggtctccagccctgtgcagtgggtatctttgttcccctttgtcaggagagttcgggttaaagttggtgacttgatgcctaatagtgacaggtaaaatggcacttataccagaacttccttctgatcagcaagaggaaggtgccctctcttccagtagaagcacactgggtggcagtgttggaagacagaaagttgagaccaggttcactgttccatgcaagctcagaggtgagggcaggcagcctggggaagccttgtttgatctgatgcctcatggaacaactacttatgcctgggaccttctctactttcctgctccacttgacagtccttctcagttatggaagaatgggggagactgtgccccacaggttacctgtctgttcagtctgtttggggaccagtagcctacggcttagatccttcgcaatgcccagctgctggttctccagtgtcaggaggccactggcaggactgttgtctatcttaaggattcagggtccccatctgcctgcctaccactcatgagtcatcaacttcttttggtttcctttagggtagggatccgcaaacttctgttaagggcccaggtagtaaatacttggagctttgcggtctatgtaaatctctcttgcaaacacttggctctaccattgtagccagaggtgctgataaaggaaaaggctggctgtgtttgataaagttccatctgcgtatgccaaaacctagcattattttgatgtcataaatatttttaaaaaatcaatcgtgaaaaaacatgatgaccattcttaatgtgaaactattaaaaaaaaaaaaaggttgggagggtgggcttagcctgtggctgccatttgctgacctctgtcttagggaaatttagataatgtattaatgtagagagcttagataacgtagcaaactctgtgtgtgtgtgtgtgtgtgtgtgtgtgtgtgtgtgtgtgtgtgtgtgtgtgtgtgtataaatacactgtggaacaagcccagggcttagggaacgttaggcaagtgtattaccactgagctacactcctgactctattattcgagggcaagaaaataggctctagggaagacatggcatcacatgcttataatctcagcatgtgaaaggtacagacaacaggatcatgagttcaagaccatcctcaacacaaatttttttaaaaggttaatggggggcccaagggagaagctaagaaagcccaggtaaagatgaccctgcatttgttttttggcttagagtctcgaacacattcagaaaaactgtagttttacaatgcctatctgctcctgacttccctccgtgactcttctgaccaattccgcaccatctgttggtccttcatctggaagccagaaagttctaggataaaatgtaattgaaagatacaaccagagaggataaaagctctggggtgaaaatggaagggtcttgagaaccccagggagccttggtagttgactatctctgggctgacacccactcctatcccctaaagagactctgacgcctccttcaggcacagcctggcagtccttctaccatgcttaagaaaggatccaactaaccctccccatccttgtgtcgtcaaactttgagaacttaaacaaaatactagcgaactttcagaatccttttgattgacaaaacatagtaggctatggacacagtgtgtgtgtgtgtgtgtgtgtgtgtgtgtgtgtgtgtgtatacacaaacatatatgtacatgaatatgtatatgtgtgtgtgtatatatatatatatatatatatatatatatttgaagggacagtaccatttgatagtgcataatgtttagtattcctttgaacaaacggacttaaagactctgcagtaattacaagggcctctggactgagaagtactgcacagagagagaaagtcaagacctcattatgagagtagacagtagccccagagaaagctatggagtgagaaggggagtatctaatgtcatggtgaatctgggccccagacatgaacttggatgggacactggagacataaacagggctttgttgccaatagctggtacagaaagcctgggggtgatgggggcagagctgccagccagctcctgccacccatgggactggctttctaagggcttctaccaattgaatccattcgtgtggccctctcaaaccttgatgtccttactttcaagatctatatcctaatctgtctcagaggcacctcccaagtcactctgtagggaaaatggaggcagaaatgggatcggtgggggccctcattcaggccgcccctgacttcagtctgttcccctttgacctggtttctctctctacctgacctgactcctcaaagtgacatttatcagatggagaaggacattgccatagagcaagaaaggaatgctcgctaccgaccccctaaaatattggagcctactacctttcaggaacccccacccaaggtaagctcggtcccctggccacagcaaagccaggtttctttgtggcccactgccttctcagaccacaaagagctgctttcttacaatcctctctctgtcctgaacccaacccctaaccacccatgggggtgtcccatcaggagaaatctgtggccagcacatagcctgtggggggcagggggaattggagcaagaactgtccttcagcgttacccatgaaaaccaatgtgcttcttgggatggcacatcgggcatccattatgataagaaaggagaatgtcccaagcccctgagattcaggctctatgtccatgactgcaatgacagccttggtctcaggatctaggaccctgtggctccaccagaaggtggttacatttctaagaaccagggctgtattaactagagctgacaaaacaaaataccacaggcagaatgacttaaacaacaatttcagaaaatgggaagtccacagtccagaaaacatcaaatttggtctctggtgatggtctgtggtcactacttttctcatcattataataaaacaccagatgaaagtaacttaaagagggaagagtttatttggactgtacatttaagagtatagtccatcagagcaggaaggcatgaggtcacaaacatctgccgtcaggaagcagagaggtggatgcctcttctaagtaaggtagctttgccttattatatggtccaggatcccagccctaggaatgatgaccccacatctggagtgaatcttctctcagttaatttaatatagaaaacccctcaaagacatgctcagagtcttgtctctttggtgattctagaactgtcaattatcaatcaatattaactgtcatggggccccttcctagtttttagatggcctctccttgctatatccttgtgtgtgttagggaaaatgagaaggaccctctcagtctcctgtgctattctcatcagggcattgatctcatcatgggatgacatcacccaactccattcctctctcagagaccacacctcataataccatcactttggttgtagcatgccagtatatgaacaggtgttggaactaggcacaaaagatgaatccatagcaatgtctagtctggtccaaggtcttcgcttctagtctctcttgcatgttctcctcccatcccctcccatcactagccatgtaactagtgctcaatgagtggctgcagaatgaatccaatgataattctgttcttatctctccactgtaaataaacagaactgcctctgactttggtgtatcccctttgcagaagtggagagtcagactgagatagccctgtgttctctttctagcccagccggcccaagtacagacctcctccacagaccaacctgctggctcctaagctgcagttccaggtaaatgtgtagccagatgatggggaaagttgactccatccctcctcaaggtcttttctgaaatgtcatgcctacacctttgaggtgcagcagcaaacatctgcttaggggatgcccggattggctctttcttggtagacaagaaagaatttcaagttatatcaaaagaacagaaattcagttcttccagaagttctgcctgcagcccagtccacccgtctgcagtgtctgctgcttcctgcgcctgcctgcagctgtctttctgtgtccctggcttctctgacctcccacactgagcagagccttctgagaaggaattccagagctctagggatggatgagggtcctatggacttgagcgccacccaaggctctgtgcagaggctctggttaggacctaggtggtcagtgaagagggagcaggggcccatctgagctgtctgcatccatcattgccagccttgaacctctccaaggctgtagcctgtgactcacaattccctgtgccactctcttgcatctgagtgggagctagcccagcctcctgcctttccttcccctccattcccttgaacggagttgtggcttgaaaatagaatatttcaaaagacaagaaccaatgttagctttgctggtcctccagacaggaagagaaagcctcccaaccacactttccttgtcagggagatggccctgtgtcaaaaatcaagcccagccaagaatggacgacaaattctctccacataaagaaaatgtcctgcaggaggtgacaataatgcctttaaaaagagatatgtaggctgccacaatagtttagtgggtaaaggcacttattgcctgagttcgatccctggaccccacatggtggaaggagaagaccaatgtccagaatttgttctctgacctccacaatcactatatggcatgcacccattcacacacacacacacatgcacactaacaaaggttttttaaaaaacatgtaaaataacattgttagactggagagattaaaacacctgctgtaaaagtatgccagctgaagtttggagccctgggacccacataaatgccaggtgagcatggtggctgtctggaaccacagccttagaaggtggagacaaggaaccccccagagagaactggtgaatgttgacacaagctctcggtttgacattgagaccatgctttggtgaataaggtaggatagtgataaaggatgactcctgacatcaatccagatcccatgtgtactcacacacacatgcacacaacatacacacatacacacacacacacacacacacacacacacacacacacacacactaatgtacagcaaacacacacaaaaatggaataagttttaatcaaggtgattacaccccagacacacatatacatatatatatacatacctacacatgtacacatatacttacacacacagacacacacacacatatgagagagagagatctattttttctgttgtggattcaaccgaccaataatgataaatatgaaaaaaagaaaagaacaaagccgatatccgccatgaaataggtacagattgttcttgtcattatcccctaaacaatatattacaccacttatatcaccttcacatactattcaatgtaaatgatctagagatgctttatatcacatgatagctatagatatacaaatataacaccattttatgtaaggaattccatatctatggtgcattctgtaaccacacacccctgggccactgagggataactctgtgtatatgtctgcattcattatctgcaagcttattgtaacccatgtcacaactatgacacataacccttttcccaagggtcctgaggtcccctagtctcgggagatgagctgtctgtgagcatctacccatgtgaagagcattgtgtaggaggtgtgtctggcagaggagaggccacgctgttctgccacacctcttcggcagggaaatgatacaacccatgttttatgtgccacagtagagcaagtctgcacccccatggtgtgctctcgccctttttgtgtgctcctgtttgtagcagctaattgtcatcctctcgccgtgtccctgtgccttgtgcttctttgcttctcatgaataggtccctgagggtctgtgtgccagctctcctacgcttaccagccctatggagtatccatctccagttaactcgctgcacaccccacctctccaccggcacaatgtcttcaagcgccacagcatgcgggtaagaggactctgcatgctgggtgtcagcctcaccgcggaggctgctggagggaggtggcctgggaagtgctccgtggttccgtgtgccagtcagactcctgagaacctctgtggccctcttccctttgcaaacatatcagctggaccgacccggtttttttgtccagactggtgctgtggccaaggatggcagattctcttcctttcctgggtctcaggagtcaggtacaataggcagtgtagaggcttgtggacagagggcctggggttgctatggaataagggatgctggaggtgcctccctgtgctgcctttctgactggtggctttggttgctaaatctatccctggaggaaagacttcctcatggtggctttccctgctgcttttgtgatttgggattctgggtatgaagaatagagactggtaagaaaacaggctcatgaaccagctcactgcagcctctttgtctccagtgaagccctggaggcttcctgggccagaatgtcaggtcttctgcgctgagcacttggcttgtgagcaggtgtccacccccaacatcaagttgctgtaagcacttgatatattttactaagttatgaaacagactgaaatactcaccgtttcctctcttgctctatatgtatatacgtttcagcctcaagatccataactctaaagctttttgtggggaaaaaaaaatacatgttcgttagaacacatttgagaaatgtaggcaattatttgaatatgcttctgtgctattattcttaatttagcaaaaatttgaaatgagcataatttagaattccaggcagctgaggtctgttatgaagtcaaatttcttcaaactcactctgtttttctctcttacattaatttcaccaatttcggtcttcatgtatgattaaccataattaacccacagttttaaacatgtgctctaatttaggcaatgctcaccaccacccctgccctggactctttattcatagttattaagttttggagagcttttttaaaaaattgcattcgttctttcagaaagaggctgcttagtgcctgtggggggcagcactgccattgtctgggctgtgtttcactgccaggacttttttcagttccataaagacaggctgtgcaggtcttttgtggcaggcgtttagaagtgattgtcataaaggaactctgaaagaacatgaagagttcttctttaaatacataaaaaagaaaaagtataaactccattttatggtgtacgtgagacagtcgcttgccagtgccatgctcacgagataacagctttcccacgaagcatctgaaagcatttaacaaaaattcggagatggcaaaatcatttcctgtatagtgtggctcctctgggagtccggtggaacgtcgcacaaggatgatgatagtcatccccccaccccatatcccaattccataacgaggtgcagcagggtgctgtcctaggtgctgaaggaggaaccaggaggctttgccttcagggcacaggtgcacactcacctgtatcacctagggaaacgttggaaagggacaaaactggaatgtgggagatgtacaaagaagaggctgctataggagccaagactaagtggcagaaagctatagggtaaggggtggggccactgctttgctatgaggcaagggggcgggactatggttttgctagaacaaggaaggttttatgcggaggtgtaaatgaggcaggaaggatgagcggcagcagttactgaaaacaactcaggagcaccattctgtaacgcaaatccccgattccttccaagaagtgtgggtgtcggttgcctagggagaataccagaatgtaaagaagttcaaggtttaaacgttattattgaaattactggagctgggacaatggctccaaggatgaggcacttgctgtgcaagcatgaagaccagagtttggatcctcccactcacctaaacgctgggtcagcatgctggttcacctgtaattccagttcctaggaaccgagaattctgggagcgaggtggccaggttgattaatccgtaccagtgagttgtcagttcagctgagggagataccatgctccaagggcgtgaaaaacagttgaggaagatgcctgtctcagcctccagctgccacacacacatgctcccacaacacacaccaacacacatacatgcacgtgtgcacatacatacacagattaagaataaagcagaaagcctctacctttatcctttagttttattatgtaattagaagtcatcagaacaagctttctagcatttgtttgctaataaatatttgccaaggtcaagcctggggtatacatcacgtataacctgtggcaatctcttatgacaaaactatatagaagattttggagtccagtaacttgtcctatcagtatttaatattcctcggtctctatattttcttttatatttctgaccctgaattgaaaacttttgacacttagttctaccatttattaaaagcccaaggtgaccatagacctgcattgagtttaactggggatatttttaactttaaaatgcttaccttcattttttgggacatttgtgtcttagtctgttattttgcttctataacaaaatacctgtggctaagtgcttcacacagaaaagaggtttagtgagtttagtttttagtgctaagaacatggacaggcacccactgggctccactgaagacctcctggcccatcataccattgtagatagcattgtgttaggggcataaataactctttatattagtcatttagccctatgaaaacagaaacacgtggtttttaaaactgctgttcttccagcatccagctttatgcctaccacacagtagctgcttaaccaatagttgctgaatggattggatgaagaatattataagaaataaacaccgagacttgaatctatattaatgatgggcagtgtactccaattcaactattttaaagctatagtgtaatgatcaagcctgttttatggagcttagtgggaaacttttcagaggcctggcagagacatgacttgttaaaagtagatatgacttttttttaacattttctttgagcaccctataaactagcacataaaagggaagggaccatgttgacttgttgtgtgcttctgtaatgggatacctgaggctgggtgctttttactggacagaaggtcattacttccagtttgggggactgagaaggccacgatcaagggccacctctagcaagggccttcctgctgtttcctaacttggcagaagacaccatgtggttaagggagaacacagaatgacaacagagaggcaaactctcccttctttcaggagtccacatgtttgttaacttgttcatgaagtcagtgcctccatgacctccaagtcaccccacctctcaacactgttgccctggaagtcaaattcccgacacacaaatcttagggggccacactcaagccaaacaggacttcacaagaggactctgtcactgacaaatgtttcccaatcaagaagatacacacaactttcttcctccagtcaacccaaggcaaggtgatccatcacagtagatgaaaggcaagggtttaggggggactgagaaaataattttgtaaatgcaccctggaaagactgaggtaaataggaaaacaccaacacccacttaagaaacaaaactaagaataaagtccaaagcctcactggtatgtaaagaccagggttagggctatctaggaggaaggaaccttcttcttatgtctgtagagttaagcttctgagagtttaattatttgtctcctttcttagctccttcatttcttttaacctccttctgtatcattgaagctgttctcctaaccaagcatgcatgatcgatgggcacaaataatcctgtacacctggagctcagaggtagcctcactgtagatgtttccagatctgtcaccatagtgcgtaggtgaaaacgagttccaaaggttaggagccagctttgcatttctgagcctgataagtgtcagccgccatcacaaatgccagcagagaaaaatgggtagatagttgaaaatatatcattggcagactgtgtgacagtttgaacccagtgctctggggtttggcatctggttacagccaaccatgtggttgaggctgagaccagagctgtctgcatttgtgcctctggctttagaaatagcctagagaagagcagcaggtgatgccaaggtttggctccttggggcttttcagctaatcctccccagtccaggcctgaggatggggctcactgcggctgttgtcctcacaggaggaggacttcatccggcccagtagccgagaagaggcccagcagctctgggaggcagagaagatcaagatgaagcaggtcctagaaagacagcagaagcagatggtggaagattcccagtggctgaggcgagaggaaagatgcttggtgagtggctcccctctgtccctactcactagagtggatgcttaccatgtatatcatagcccatacttcctattctggtctctgagtcctttgctttggtctcctctacaggaccctatggtttatatgaatgacaagtccccactggtaagtcacaaagaaaggccactcagagccacagcctgaaagagccctatttactcatgtgttggacccctggctgtgcctgtctctgccctttaggctcaccccatgcatctcctcacctgaaagaagatgggagtcatattgttagtgctggcttgggcctctagaaaggtcacttggagtcaggagctctcaggtctccttgttcatgactgcagtgtgtctaaaccagaaggggatgggcaagaagaggaataggatgttctctggaggcagagtagtgactcctttctcccttcctttccttacagactccagagaaggaggccggctacagtgagtgcttccttgggacagtttctgcccggggtgtgttggggggtgtgatgcgattgtagctcacagtcctgcaagaagcagacggttgtctttgactttaagaaggaaaaagtaccatctgccttgttttatcctgaatgtgtgtttggattttggaaggagcctcccctttagctctgcccagtgctccccccccccccccccgacaactctccatctgccgaggtcctttctactcttcaggagatggcaacttcacttcttagaccttctttcctctttatctttcatcttcatttcttaagcgaacctggaacgctctctccgtttctggtttctgagctcatgatctcattctccagataagaactagggctgggggtgtaagcatctgccttggatgagcaagctcctgtgtggtggtgagatcagaggcaagcttgctggcttgcatcttggttcactcttacagcagctccacccaggctctcatgtactattgctcatcagagtcgagtcgatagtatgaaaaatcatcttcggttttaaagtttactctccccgaagctgccactgtaccatggtggctcttgaagactgccacctgcagactgtggctttctttcccatggatgcacaaagccagtattgctgctcctcaggaacttgcccatcttagagggcatggagtccccatacttgctgtgttcatgcagtcctgccttggctcttctttgaaagccttggacagatcttgtctctggctactgggaaagcaggaagaccaagatcctatttccttggtcatcttcccagaatttgggggttacactcttggggtctcctgatggtcgagatgggacactggcttgattacaagaaggtagaaagagagaccaggtactgagaccttcacccactccctgtccttcctattacagcggagttcacagggcccccacagaaaccacctcggctcggtgcacaggtatgtattggggttatgactgtcaaaaactgtaggcctgacgtgttcagaggccctcagagataatccagtccaatgccattattgtagagatgagccccagaaaacacatgcatccagtttcaggtcaggcttcatcgctaattcacaacaaaataggagacgggccagttttttttttctcttctgggtctcttccctgactagaagaaaggtctcattggtttagcctaggattgaaaggtgtgggtttcttctcttccggagccttcccccaggtaccaacattctactgtccatcagttttcttggttctagaatgtgtattctcagtatcagcttcacacataaaaatcactggagagatgttaagacaatgtggactccaagactagatgctgtctaccctgggctggcttgataacacactaacattttatttgggctccgaagttggggaatgtgaccccaaaggcagaaggcatggctctacccctggggcagagtgctgctgttgcaaagcagaggcccgtttcctggttgatatctgtgcattcccaggaatgaataatagtggtagagaggtcctcctggctcccatgagccactaaccatccacccctctctttccagtccattcagcccacagccaacctggacaggaccgatgacctcgtgtaccacaatgtcatgaccctggtggaggctgtgctggaactcaagaacaagcttggccagttgccccctgaggactatgtggtggtggtgaaggtgactgacagggctggactgggtcagggagataggggcttcctagactgaccctagaaggaaaaccactatgtccctctcattgaccagccctgtagaccccagaggagcaaggggaccctaggaagttcaatcccaggcagtctcagagggcagatgctatcatagagagcagtcccaggagtggcagcttttcaccaagcaggtggaatagctgccttgctcttgctctcttagaacgtggggctgaacctgcggaagctcatcggcagtgtggacgatctcttgccctccttgccggcatcttcgaggacagaggtgagtgtcctcattctcggccatgcctgctgtacctccccctgtccctggctgtaatttccaccagtgccatctgggcagccttaattctcccaacaaatgtctctgcagagcatcagagctgttggcatcacagggctgagcctgagtaaaaaaaatcacagtctagatctcaaatagtctcaatgggtttatgcaagtaaatgcatacctccccccacccagtaaccctctgcattcagattatcttattgagataagaatctattattgaaatcaaggtggagtcctggtgctttggtggaatgatgcacggtgatgtctccaaaagctgtgacctacatgtaaggtactctgcagagtaccttacatgtcaaaagaaactttattgggctgataaagttaagggtccaagaaggagaggtgataatggagtatccaggggcaaggggtcaaagtcagagacacgggaatgtgagggcagcatttaagtcagagggatgcctctgctggaagggaccacaaggaaagagataacctcaaagctgggtaaaacaaagaacagactctcccctggactcattaacaggggtactgctccactgatgcccttagctcactgtgggacttattccagaattctggcctctaggactgttcaagaatgaacatgcaaagtttgcactgctgtgttcccatggccaaggcagacagatctgtttcttgtctggaatatgcagtgctttgaagccttgccttccagtggtcatctatgctatgatatgatctctgctgcccgtggttgcccaaggcaagacagaacaagggcagagctggctaccttctgggtaacagcagtggcctcccaaggagtgccagctgggcaggtgccaccagagggctgagactgctcccgagaacctggacagctcactgggtgaatttcacagtgcagagctgatgggaaggtttggcacagccaattgatttactcattcattgcattatacagtagctttcgtgctgtgtattcatgatgctaagcactagcaatgcgatgcttaaatagatatgggatctgatctctgtactcgaccacagacagctaaagaatcagtgtgttacttttcttatggttggagtaaaacacttcaggaaaatgtccaaagaaaggtttgctttggcttcattgtttgaaggtgtggtcccttacagcagggaaagtatggtgggaggggcgggaggtgactgttcacatttcgtctacagttaggaagtgggaaaatgataaatactttctcctatttgctcattccaagacctcagcccatggagtgctgtcaccacattttgggagggtcttcccaccttaattaaccccatctagaaactcccttacacacacgcccagaggtttgtttccatggtcactctaaatgccatcagtatgacaatcaagatcacccatcgaagtaggtgaatgtggttgacctctggtcagcatgcagggattgctgctgtgcaggaggccactggagtgcctactgcattgatctttgtggaccagctccagtctgtgcagaagggtggattcagcccaggtttgagattagtttgtccccagggaacttctgatgtcttagccaatgctttctcccctgagcatttctcattcagcttctcatgtgtgcttgcccaccagattgaagggacccagaaactgctcaacaaagacctggcagagctcatcaacaagatgaagttggctcagcagaacgccgtgacgtccctgagtgaggactgcaagcggcagatgctcacagcgtcccataccctggctgtggatgccaagaacctgctggatgctgtggaccaagccaaggttgtggctaatctggcccacccgcctgcagagtgatcaagagaggggccacctgcctgcatcttctgcccccacctgtcttggcatacctttcctgccttgcctttggttattggtcttccagggaaagctgagaagagtccatcccccttgccactttgcacgacgccccctcttcccccaacccatcccagactgtgctactcaggctgcatctggacagaaaggactctgggcacagacacggggtggggtgacatagttcataggggtactactgccagccactccctcttaccccagcctgggttgctggagcatcattggggtcatgagtgtacccctaacggccaagatggctttctgcatggacatttgagagccagtattcctccttcctcttcagccctcagggacccctgatacagaggggacagagaggggttttatttgtagagaagctggtgagatgagggctggacctggctctcttgtacagtgtacattggaatttatttaatgtgagtttgacctggatggacagccaagggccatagtccaggagcaaaccaatccagtcacaggactctgtgtttttatggaactgagtgccacagggaagaagcagagagtcggaggtcagaatgggactttgtgcccttcctgcgtttctcttctccctctttccttctcccctcttttcttacgtctcctttttctcctcccccttttcacatctgctcccctcctctctcatgtctgtggagaacatttaccttccttctttttgatcggtggttgaattaaaattattaccatttgctttgtggttagcttgactgtgtcggttatttgacctgatctctgtgggaggaagcagacctgaaaacacagccctgggagaatcagctacgttcctgtccagtacagagcaggagctgactgacgccaatgagaagtatgtagtggcctcatgccttttgtctcatgtgggcagtagtgacacctcatctcgaggcagctctccaggaagacactttgggacatacctctcttgactgtccttgagccacctaggctctggaggggacgagttaatgccagtgacagctgaggtagctggcatgaaggcatgacactcttgacggcagacattttagctttattttgacatttcactcacatgcaaggaggatggggggtagggatcatccaacaagcatctctgcatcaggaaatcatgtcttggggtttgacacagagaaaagaggtgccggctgcattcagtggagaaagggggagccaaggcctgagactgagtgggtatcattagaactggtaacaggaagtctgggtaaggcctccgacaagcagatctcctaggtctgtcgaggtgctgtgtgtggggttcggaaggagagcaccccaagacagagaacaaacttggtctctatatctcttagtgaccctgaatctcattgctgttagcgtctgggacctaattccttggggactgcagaatgttctgaaaggcccaatccgctgggcttctatgcaatgaagggtcgtggaatattacaagtaaaagaacaagctacacaggacagttcagagcaggttagtcacctgatggggccctgggaagactggggaagagtcctcccccaaagctttggtattatgtagcagttctggagcctaaagctaccaggttggtttctctccactactcacgatggagggtccagctactgagctctctcacccagctcaggatgagtgaaagcaacaagagcagagactctgccctgaaggagcacacaattgaaagagcttgatgcaaagatctcagttcctatgtgaggcatgctgacagagccaggaattgaggaccaggtccctgtggacagcaagaagggtgccaacattggagactgccttcttactttgtcctcttgatttgaaggtagccctgatcccttgtagaaattgctatacctctttttttgtagcatagaacagtgagacatgacactgaggggaacttgaaggctccaaagtgcttttggttgaataatggcccagcaacttatacccaatgttgctattctgcctcaagcatccaccagggcacctagatcagtggttctcaaccttcctaatgctatgaccctttacagttcctcatgttgtgaccccaaccacaaaattgttttcatttcaacttcataacagtaattttgatattgttatggactgtcatgtaaaacatctgatatgcaggatatctgatatgtgacccctgtgaaagggtcgtttgactccctgaagggttgcaacccacgacacaggttgaaagccactgctctagaactttctttgtgccccactcctttgggaagtacccctgtccctctgacatttcctgcaaagtgcatagagacaggttcagtgcagactctgagcttcttcttgggcctgggtcaaaaatatcccaacttgcctcccagcctccccaccccagctggctgtcctctctgacattctgaatccacagtgttgtgcagaactcttccacaccaggcactcccattgtccccttgtgcccatctttgggccagtgttctatttccctttgtcctggtctgacccctccatccctttgtttgacccttttgccatagacaactcctatatgctctttcagaactatcttgctctccccccatatcaccaccatgttgtcatcacctacagagcagccttcacctcttctagttcctcagcatccctaaatagttgtcatgttgagtggtctcagtgcttgtcaccgcaatggcaccatgaactgttgacaaggaggatatgaagtccaggctagatcaggggcctcgtagaaacatcgcaggcaggtggcattaagtcaaaagaatattctagagatggctccagtcacagaagagcagaagatggttgtccaggccaccttggagccaacatgagggacatcaagtcagatcattccagccaggaacggagggaggaagagcccgatggtccccaggaagcagacgataatgaacagccagaggaagatccggtctaccaccatggccacatacttccaatcttccttcacctggagttagaattgggcttacagtgacaagagccaggctttgagaagatgtccctcccacatccagcctcatggaggcagtagtcaccaggccaccgaaggcttgcaaagccaaggttatcccacacatagagatgggtggagagagaaacaggcttagctcagggctgatacatccctgggaatcccattttatcttttcccatttccacatactgctaggctcaggagtccagagggacatgaggagacactaggcacaggccatcaaaatcaggaaattttaaatgtagctcatagtagtccccaataatgtgctgtcccatgctacttccccacacacctgaaggggacagaaagaggcaggttgtagcccagggcaagccagtgtggaagagctggagctttgtagctcttcagctcacaggccaagccagaggatctacattcttagaaatttccaaattaatgatcaatgttcttatctactcaataagattgtcccatagtaacctttcactcctcctttggttggtaaggggacagccaggttctgaacactaagtacttactatatgcagccctgggggaggggagcctaccctggttcagctgagaatctgcagggtttgagagtgactagggaacgtcacagactgcccagagcccagatggaggagaccctctaccacagggtagtgcagcggccagccatgcactgagtggatgcgtttgtatttggtttctgtaccttctcagagcagtctatctccctgccctgccccgccccaccccgcccctctcatagagggactgcccagacaaagacaaagcagatggagaccagcatctgagctccccaatttcctcactctcccccacttaggttgaagagagggggatggaccctgtggtattctgccatcggccaggaagtaaccagaggacttctagctagtgtttccctttcatgatcaagtccagactctttggacatgactgagggtgactggtccttacaagaagaagggaaagggttgcccaagggcatgccctgggcttggatttttccctgctaagctggcagagtcacccacggggtggggaggggctttcctcatcccaactcaccgaagagtcagcatcctcagacctcaggtggtcagcaatgtagtgtacaccttctagtgctttctgtatttgaggtgacagcaggatctcactagcctgggatggagtcttggcctcaggccccatggccctcagatgcaggctgccatggccatagaggacacccatggaagagtctgggaggcctgcacacatacatatgttttcatcttcttcctcctcctcctcttcctctgtctcctccctttcttcagcatccatgttggtctccagccaatgataagtggggctgagcttcagacctggagagccatggagctccatgggcggcaggggccgattcatcatcagccaccggggcacccggcctagcagggccaccctcacccagttgggcatgttgtgcgtgctaggggaacggtggtggacattgagcacgaagactgtgatcacaatagagagggtgacgaagatcatggtgaagagcaggtactcgccgatgagtgggatgaccagtgaggtggatgggataatttctgtgatgagcagcaggaagacagtgagggagagcagcaccgagatgcacagcgtgatcttctctccacactcagagggcaagtagaacacgagcacggtgaggcaggagatgagcaggcacgggataatgaggttgatggtgtagaacagcggcagccggcggataacgaagtagtaggtgacgtcggggtagatctccgcgcagcagtcgtacttcttgctgttataggttccggtggcgttgataatggcccactcgccgctctcccagtagtccttcaggtccaccgtccgctccatctgctccaggtcgatcttggccttgtcgtatgtccaggagccaaacttcatcttgcagttctgctggtcgaaggggaagaaagtcacgtcgatgctgcaggagctcttgtagatggctgggggcacccagtgcacagtgcccgtgaagaagaggtgggccttggtcatgtgggtcaccgcaaactccccgtctgcactgggaagaggagacaagctgggatcctgcatatctgcctcttccgtgaagcagggcaactgagtaaacaaactcactattgactggctaagtagagtcatccaagcaagggcaagataaatctctcctacagacagacgtatctgagttgccttttcaaataccagtgttttaattgcagaagtaaaaaatttaaataaactaaaaaaaaaaaaaaccacgattgccattttgatgtcataattatatatctgactgtcataaagactattccttaatttttcatatttcaaatcatgggacatttatagtctgatcctgttattatccatttagtatgttgaagtttttgtggttgttttatgagacagggatcttactatgtggccccagctggcccccaacttgctggctggatttaaacttgtgatcctcctgcctcagtatcttgagttctggaataacaggtattctccaccatacctgactagagtaaaggtttttgagtgttttgatctccctcacgattaaatgggaactcagttccagaggaggaggatcctagatcttgtacccagatctttttcgttcctttccagacgagactaacattttggctggtgaggaaactccctgtactctgtgcatttagcacagtatttggggccagtttcatctaccagggcctgtacctgagggatgtgagatgtggttcctgcccttggggaaccacatggaaatgaaatatagtcacatgacatcaccatgcaactgggcatttggaatgcttctgagatcaggagggacttctggctgggctcaacaggattactgtgaaagcttaattagttcttgacctgggaggtgagacaagagcataaaaacaggaagcctcacaagaacaaggaagaaatcggcaggcaggactccataggactctgggtttccctgggtagaaatagtctttaaactccacccccaattcctacattcaacccaaaccggtagtgataatttcggtcatttcacataactaccactagatggcagcaggcccccattcgggggaagaggccatgtgacttcactgaccctttgcctattaacctgcaggagggtgtcgttcacacaccccttaaatgcagctgttctgactagcctttgtcctaccagaagaacttgatgcaatcaggtattagcaaccagctgtcttattgacaatttaaaaactcagataaatctgctgctgggactttgttcctgatctgtcagagagaaccagaaactggaaggatcctaggtgccacctcagggcacagagatggggcctggggaactcggggcatatgactcctgcagaagcaaacaacaggtgtttaaggcttagaccaccagggggtgactatgctatccaaaattatgtcacatgccaacccccccccccacacaccaccaccaagaaccttccatgcctattcatatctcaagaaggtagcagtgtcccccagagacctgctttagaaaatgttagcaagagacactgccatcatttaagtattaacgtctggatttctctgtgaaaccttacccaagccaaaaaggaaagaataagttttagtttcttttatgagaaagtgtgtgtgtgtgtgtgtgtgtgtgtgtgtgtgagagagagagagagagagagggagagagagagagagagagagatgccagtgcacatgagtatgtgtctgtgtatatatatgcatgcatgtttgtgtatgtgtgtatgtatgtatgtatgtattagagagagagtgtgtgctggcacacatgtgtgaataaatgtgtgtatgtgtgtggtgtgtgcacatgtgtgggtagtgcttgtgcatatttgagtgtgtataggcctaaggctgccatcannnnnnnnnnnnnnnnnnnntaggcctaaggctgccatcaagtatctttccttgacctgctccatctttacttcttgagacaggtcctcaagaatcgaaggcttgtctggctaaactgactggccagtgaacttctaggatctacctgtctcccctatccccagtgctaaagtgctctctctctctctctctctctctctctctctcatacacacacacactcacagaaacagacagacagacagacagacagacagacagacagacagagcgagccagagtaccactcccagcttttatgtgaccactgaggattcaaacagattttcttgctagcccagcaagagctcttgctcgcctagttctctcccctcccagatgcactttaattagtaactggcttcttacttgttgtagagaacaatgtctgggatccagatcatctctgaggggacgcggagggaggtgatgttgccaaactcagccgggtcccagcgcagcttgtagtcattccattcctgctcaggggagtggtcacatcagagcactgccccaccgggacctttaggtgatctgaggagctgtgggactgtagcacccctgtgtccctctcctagcccccacagaatccacagagtctatggcacgaggaaaaggctgctatgggaatagggcaaaccatttctgataagcagcccattttgttccgactctggtagtgaaaatcccaggcagccagtgccagcacacttggccctctagctgtgcctctggcccttgttctgatgctccccacttagtgaatctgttatgcagtcactccttctccaggcagggcttgccagagacagccaggagagttacccatgaccttccaactatgctctggagacctcctgatccagggagtcccagcaggaagaggatgctctaggtcccaactgtgttccaccagagcaggtccaagtgcattttaaaaccagattttgttattgtttatttgtttgtttcatgcacaagctggcctccaacttactgtaaaggtaaaaaacgaccttaaacatttgcttcttctcagcccctcttcccaggctctggatggagttcatgagccccatgcccagtgcctgcggtgttggggagtcaaacccaggcaagcactgtatgaaacggagctttaccctttagttcccaataccgagctcttattccctctctggtatatcctttaggatttcaggttcatatatttggggacacttacatcaaatgggggcatctgacggccataggtctaagacagatgagccaccccttcacagatggggagaaaggagcttccagagggttaataacttctccagcatttcaggctagtcctgggcagctgcagaaggcctggttccaccactgtgccctttcctctcctcctccacaaccctggcatgagtgaccaggacaatcgtggtgatcgaggatctaggaccacaccaccccccatgacatgactgcacacaccttttaaagcttccccctcactctggttcccattggttcatccatagagatgaggctcagaccctccaatgactccagaataagcaatagcagaagcaattggctcagagcagcccctgacccaagtagctatcacgcatccagaacccagtgagtcgggggttgtgtgtagaacccctacagtgagcaaggaacctatttgaaagactctgaaatggcattgccttggtgggtttctgcctgctggcctctgagtcagggccagtcaggtacccaaggggccagagtagaaagctgagggcaggggttagctttcctttcccatgtccctttgtcatctccactttaaggccttgggattttctgggatgacagaatgagcctgcccaacagtggcccatcccagaactccacacacactctccttccatggagaaatggtatctttgtctcttcccgactctagattctttactgactgtgcctatagaatgaagtaagatggaggctagattgctatagatccataagtggctttcagcttctactttctgtctcttgtcactcagggagacttgaagacaccaagtgagaatccatcaaatcaactgccaaagagaccctagtgaaggaacctgagagtgcgcatggaggaccccagcctttcagaatcttccagagctttccaaatatccatgtaaaagacagacatgtaaggcagtggccctcaaccttcctaatgctgcagtgctttaatacagttcctcgtgctgtgatgacccccgagcagaaagctatgtcattgctatttcataactgtacttttgctactgttatgagaataatgtaaatatttttggagatagaggtttgccaacaggctgtgacccagagattgaaaactgctgatgtaagggaagccattttagacagtaacacactaaccacagctggccaggtgccgccaagtaccttagtcaccatttgaagcagagaaagccatctgaccaccagaccacaaatgtgtgataaatgggtcattgctttatgcttgtgagctctggggtcatttgccaggtagcacagactctaagccactcctaggagatggaccttggagctgggcatacctgggtacccccttgtcctatgatgaagggagccgattcagtgagctgtcttgtaaacctgggactatgagatgcttgttcctagaaaggcatcccttggtgctgtgggtgaaaagaacagttgagtaagagactggccaaacaaaagccagcccccggagagagcagcctgcagtaccacagctgcctcacctcttaggtgactactgatcatgacccatgaatttagcatcttgccgatagataatgagggtcctagaagggtctggagactgcacaagtctgccaattcctactatggaagactcacctgctttagccagacattggtggtcatcatttgattcttctcatcctggggtagcagagatagaaagtaaaatagttggggtatctgatgaaccatcccagaagacagagtgtataggaggcactttgaggatctactcataggacactcaaagcccagccacccttcctgtcaccagtactctgattcctcagggtcacccaatcacagaggaggggagttgaacatgtgttttagacaacctatgctcttgggggctccaaggaatgggaacaaagggaccatggcaacacaacaaggtagctgcatgctgtgtccagggtgggctttgagggctggtgggagaagggctgagctgaatccaaggaggaccaagagagagatcgtgtgggctgggggcggggggggggtggggtgggcgctgattaagggagtgcagcatgaaaaggcaggcccaccacatctatgagctgtgcaatggatagtccaaagcgcacgatgaccacatcggaagtgttgggcactggccgtgcccagcgattgtagcctccaaagaggtgtttgaacaggcggtcctcggcatgggtgtgcgagccttgctgggccaacactgtgagatagggacagaaaagaaagagtgagtctgcatgaagtcaa

SEQ ID NO: 504 - DNA, 3944 bp, Mus musculus
ctgtcagcctcttactcagcctctgcaggcagagccgcgcgtcctacctgcggcggctgcgctcacctggcccagcccggagccctggcccgagtccgcgcctcgcccgagggactgcaatgtgccggtcctagctgcagtctgagaggatgtccggggtgtctgagcccttgagccgtgtaaaagtgggcactttacgccggcctgagggccccccagagcccatggtggtggtaccagtggatgtggagaaggaagacgtgcgcatcctcaaggtctgcttctacagcaacagcttcaacccagggaagaacttcaagcttgtcaaatgcacagtgcagacagagatccaggagatcatcacctccatcctcctgagtgggcgaatagggcccaacatccagctggctgaatgctatgggctgaggctgaagcacatgaagtcagacgagatccactggctgcacccacagatgaccgtgggcgaagtgcaggacaagtatgaatgtctacacgtggaagctgagtggaggtatgaccttcaaatccgctacttgccggaagacttcatggagagcctgaaagaagacaggaccacattgctgtacttttatcaacagctccggaatgactacatgcaacgctacgccagcaaggtcagtgaaggcatggctctgcagctgggctgtctggagctcaggagattcttcaaggacatgccccacaatgcactggacaaaaagtccaactttgaactcctggaaaaagaagtcggtctggacctgtttttcccaaagcagatgcaggaaaacttaaagcccaagcagttccggaagatgatccagcagaccttccagcagtatgcatcactccgggaggaagagtgtgtcatgaaattcttcaataccctagcgggctttgccaacattgaccaggagacctaccgctgcgaactcattcaaggatggaacattactgtggacctggtcatcggccctaaaggcatccgtcagctgacaagtcaagatacaaagcccacctgcctggccgagtttaagcagatcaaatccatcaggtgcctcccattggaagagacccaggcagtcctgcagctgggcatcgagggtgccccccagtccttgtctatcaaaacgtcgtccctggcagaggctgagaacatggctgatctcatagatggctactgcaggctgcaaggagaacataagggctctctcatcatgcatgccaagaaagatggtgagaagaggaacagcctgcctcagatccccacactaaacctggaggctcggcggtcgcacctctcagaaagctgcagcatagagtcagacatctatgcggagattcccgatgagaccctgcgaagaccaggaggtccacagtacggtgttgcccgtgaagaagtagttcttaaccgcattctgggtgaaggcttctttggggaggtctatgaaggtgtctacacgaaccacaaaggggaaaaaattaatgtggccgtcaagacctgtaagaaagactgtacccaggacaacaaggagaagttcatgagtgaggcagtgatcatgaagaatcttgaccaccctcacatcgtgaagctgattggcatcattgaagaggaacccacctggattatcatggaactgtatccttatggggagctgggacactacctggaacgaaataaaaactccctgaaggtacccactctggtcctgtacaccctacagatatgcaaagccatggcctatctggagagcatcaactgtgtgcacagggatattgctgtccggaacatcctggtggcctctcctgagtgtgtgaagctgggggactttgggctctcccggtacattgaggacgaagactattacaaagcctctgtgacacgtctacccatcaaatggatgtcccccgagtccatcaacttccgccgcttcacaaccgccagtgatgtctggatgtttgctgtatgcatgtgggagatcctcagctttgggaagcagcctttcttctggctcgaaaataaggatgtcatcggagtgctggagaaaggggacaggctgcccaagcccgaactctgtccgcctgtcctttacacactcatgactcgctgctgggactacgaccccagtgaccggccccgcttcacggagcttgtgtgcagcctcaggagagttcgggttaaagttggtgacttgatgcctaatagtgacagtgacatttatcagatggagaaggacattgccatagagcaagaaaggaatgctcgctaccgaccccctaaaatattggagcctactacctttcaggaacccccacccaagcccagccggcccaagtacagacctcctccacagaccaacctgctggctcctaagctgcagttccaggtccctgagggtctgtgtgccagctctcctacgcttaccagccctatggagtatccatctccagttaactcgctgcacaccccacctctccaccggcacaatgtcttcaagcgccacagcatgcgggaggaggacttcatccggcccagtagccgagaagaggcccagcagctctgggaggcagagaagatcaagatgaagcaggtcctagaaagacagcagaagcagatggtggaagattcccagtggctgaggcgagaggaaagatgcttggaccctatggtttatatgaatgacaagtccccactgtccattcagcccacagccaacctggacaggaccgatgacctcgtgtaccacaatgtcatgaccctggtggaggctgtgctggaactcaagaacaagcttggccagttgccccctgaggactatgtggtggtggtgaagaacgtggggctgaacctgcggaagctcatcggcagtgtggacgatctcttgccctccttgccggcatcttcgaggacagagattgaagggacccagaaactgctcaacaaagacctggcagagctcatcaacaagatgaagttggctcagcagaacgccgtgacgtccctgagtgaggactgcaagcggcagatgctcacagcgtcccataccctggctgtggatgccaagaacctgctggatgctgtggaccaagccaaggttgtggctaatctggcccacccgcctgcagagtgatcaagagaggggccacctgcctgcatcttctgcccccacctgtcttggcatacctttcctgccttgcctttggttattggtcttccagggaaagctgagaagagtccatcccccttgccactttgcacgacgccccctcttcccccaacccatcccagactgtgctactcaggctgcatctggacagaaaggactctgggcacagacacggggtggggtgacatagttcataggggtactactgccagccactccctcttaccccagcctgggttgctggagcatcattggggtcatgagtgtacccctaacggccaagatggctttctgcatggacatttgagagccagtattcctccttcctcttcagccctcagggacccctgatacagaggggacagagaggggttttatttgtagagaagctggtgagatgagggctggacctggctctcttgtacagtgtacattggaatttatttaatgtgagtttgacctggatggacagccaagggccatagtccaggagcaaaccaatccagtcacaggactctgtgtttttatggaactgagtgccacagggaagaagcagagagtcggaggtcagaatgggactttgtgcccttcctgcgtttctcttctccctctttccttctcccctcttttcttacgtctcctttttctcctcccccttttcacatctgctcccctcctctctcatgtctgtggagaacatttaccttccttctttttgatcggtggttgaattaaaattattaccatttgctttgt

SEQ ID NO: 505 - protein, 995 aa, Mus musculus
LQSMSGVSEPLSRVKVGTLRRPEGPPEPMVVVPVDVEKEDVRILKVCFYSNSFNPGKNFKLVKCTVQTEIQEIITSILLSGRIGPNIQLAECYGLRLKHMKSDEIHWLHPQMTVGEVQDKYECLHVEAEWRYDLQIRYLPEDFMESLKEDRTTLLYFYQQLRNDYMQRYASKVSEGMALQLGCLELRRFFKDMPHNALDKKSNFELLEKEVGLDLFFPKQMQENLKPKQFRKMIQQTFQQYASLREEECVMKFFNTLAGFANIDQEYCELIQGWNITVDLVIGPKGIRQLTSQDTKPTCLAEFKQIKSIRCLPLEETQAVLQLGIEGAPQSLSIKTSSLAEAENMADLIDGYCRLQGEHKGSLIMHAKKDGEKRNSLPQIPTLNLEARRSHLSESCSIESDIYAEIPDETLRRPGGPQYGVAREEVVLNRILGEGFFGEVYEGVYTNHKGEKINVAVKTCKKDCTQDNKEKFMSEAVIMKNLDHPHIVKLIGIIEEEPTWIIMELYPYGELGHYLERNKNSLKVPTLVLYTLQICKAMAYLESINCVHRDIAVRNILVDECVKLGDFGLSRYIEDEDYYKASVTRLPIKWMSPESINFRRFTTASDVWMFAVCMWEILSFGKQPFFWLENKDVIGVLEKGDRLPKPELCPPVLYTLMTRCWDYDPSDRPRFTELVCSLRRVRVKVGDLMPNSDSDIYQMEKDIAIEQERNARYRPPKIPTTFQEPPPKPSRPKYRPPPQTNLLAPKLQFQVPEGLCASSPTLTSPMEYPSPVNSLHTPPLHRHNVFKRHSMREEDFIRPSSREEAQQLWEAEKIKMKQVLERQQKQMVEDSQWLRREERCLDPMVYMNDKSPLSIQPTANLDRTDDLVYHNVMTLVEAVLELKNKLGQLPPEDYVVVVKNVQLRKLIGSVDDLLPSLPASSRTEIEGTQKLLNKDLAELINKMKLAQQNAVTSLSEDCKRQMLTASHTLAVDAKNLLDAVDQAKVVANLAHPPAE

SEQ ID NO: 506 - DNA, 3899 bp, Mus musculus
ctgtcagcctcttactcagcctctgcaggcagagccgcgcgtcctacctgcggcggctgcgctcacctggcccagcccggagccctggcccgagtccgcgcctcgcccgagggactgcaatgtgccggtcctagctgcagtctgagaggatgtccggggtgtctgagcccttgagccgtgtaaaagtgggcactttacgccggcctgagggccccccagagcccatggtggtggtaccagtggatgtggagaaggaagacgtgcgcatcctcaaggtctgcttctacagcaacagcttcaacccagggaagaacttcaagcttgtcaaatgcacagtgcagacagagatccaggagatcatcacctccatcctcctgagtgggcgaatagggcccaacatccagctggctgaatgctatgggctgaggctgaagcacatgaagtcagacgagatccactggctgcacccacagatgaccgtgggcgaagtgcaggacaagtatgaatgtctacacgtggaagctgagtggaggtatgaccttcaaatccgctacttgccggaagacttcatggagagcctgaaagaagacaggaccacattgctgtacttttatcaacagctccggaatgactacatgcaacgctacgccagcaaggtcagtgaaggcatggctctgcagctgggctgtctggagctcaggagattcttcaaggacatgccccacaatgcactggacaaaaagtccaactttgaactcctggaaaaagaagtcggtctggacctgtttttcccaaagcagatgcaggaaaacttaaagcccaagcagttccggaagatgatccagcagaccttccagcagtatgcatcactccgggaggaagagtgtgtcatgaaattcttcaataccctagcgggctttgccaacattgaccaggagacctaccgctgcgaactcattcaaggatggaacattactgtggacctggtcatcggccctaaaggcatccgtcagctgacaagtcaagatacaaagcccacctgcctggccgagtttaagcagatcaaatccatcaggtgcctcccattggaagagacccaggcagtcctgcagctgggcatcgagggtgccccccagtccttgtctatcaaaacgtcgtccctggcagaggctgagaacatggctgatctcatagatggctactgcaggctgcaaggagaacataagggctctctcatcatgcatgccaagaaagatggtgagaagaggaacagcctgcctcagatccccacactaaacctggaggctcggcggtcgcacctctcagaaagctgcagcatagagtcagacatctatgcggagattcccgatgagaccctgcgaagaccaggaggtccacagtacggtgttgcccgtgaagaagtagttcttaaccgcattctgggtgaaggcttctttggggaggtctatgaaggtgtctacacgaaccacaaaggggaaaaaattaatgtggccgtcaagacctgtaagaaagactgtacccaggacaacaaggagaagttcatgagtgaggcagtgatcatgaagaatcttgaccaccctcacatcgtgaagctgattggcatcattgaagaggaacccacctggattatcatggaactgtatccttatggggagctgggacactacctggaacgaaataaaaactccctgaaggtacccactctggtcctgtacaccctacagatatgcaaagccatggcctatctggagagcatcaactgtgtgcacagggatattgctgtccggaacatcctggtggcctctcctgagtgtgtgaagctgggggactttgggctctcccggtacattgaggacgaagactattacaaagcctctgtgacacgtctacccatcaaatggatgtcccccgagtccatcaacttccgccgcttcacaaccgccagtgatgtctggatgtttgctgtatgcatgtgggagatcctcagctttgggaagcagcctttcttctggctcgaaaataaggatgtcatcggagtgctggagaaaggggacaggctgcccaagcccgaactctgtccgcctgtcctttacacactcatgactcgctgctgggactacgaccccagtgaccggccccgcttcacggagcttgtgtgcagcctcagtgacatttatcagatggagaaggacattgccatagagcaagaaaggaatgctcgctaccgaccccctaaaatattggagcctactacctttcaggaacccccacccaagcccagccggcccaagtacagacctcctccacagaccaacctgctggctcctaagctgcagttccaggtccctgagggtctgtgtgccagctctcctacgcttaccagccctatggagtatccatctccagttaactcgctgcacaccccacctctccaccggcacaatgtcttcaagcgccacagcatgcgggaggaggacttcatccggcccagtagccgagaagaggcccagcagctctgggaggcagagaagatcaagatgaagcaggtcctagaaagacagcagaagcagatggtggaagattcccagtggctgaggcgagaggaaagatgcttggaccctatggtttatatgaatgacaagtccccactgtccattcagcccacagccaacctggacaggaccgatgacctcgtgtaccacaatgtcatgaccctggtggaggctgtgctggaactcaagaacaagcttggccagttgccccctgaggactatgtggtggtggtgaagaacgtggggctgaacctgcggaagctcatcggcagtgtggacgatctcttgccctccttgccggcatcttcgaggacagagattgaagggacccagaaactgctcaacaaagacctggcagagctcatcaacaagatgaagttggctcagcagaacgccgtgacgtccctgagtgaggactgcaagcggcagatgctcacagcgtcccataccctggctgtggatgccaagaacctgctggatgctgtggaccaagccaaggttgtggctaatctggcccacccgcctgcagagtgatcaagagaggggccacctgcctgcatcttctgcccccacctgtcttggcatacctttcctgccttgcctttggttattggtcttccagggaaagctgagaagagtccatcccccttgccactttgcacgacgccccctcttcccccaacccatcccagactgtgctactcaggctgcatctggacagaaaggactctgggcacagacacggggtggggtgacatagttcataggggtactactgccagccactccctcttaccccagcctgggttgctggagcatcattggggtcatgagtgtacccctaacggccaagatggctttctgcatggacatttgagagccagtattcctccttcctcttcagccctcagggacccctgatacagaggggacagagaggggttttatttgtagagaagctggtgagatgagggctggacctggctctcttgtacagtgtacattggaatttatttaatgtgagtttgacctggatggacagccaagggccatagtccaggagcaaaccaatccagtcacaggactctgtgtttttatggaactgagtgccacagggaagaagcagagagtcggaggtcagaatgggactttgtgcccttcctgcgtttctcttctccctctttccttctcccctcttttcttacgtctcctttttctcctcccccttttcacatctgctcccctcctctctcatgtctgtggagaacatttaccttccttctttttgatcggtggttgaattaaaattattaccatttgctttgt

SEQ ID NO: 507 - protein, 980 aa, Mus musculus
LQSMSGVSEPLSRVKVGTLRRPEGPPEPMVVVPVDVEKEDVRILKVCFYSNSFNPGKNFKLVKCTVQTEIQEIITSILLSGRIGPNIQLAECYGLRLKHMKSDEIHWLHPQMTVGEVQDKYECLHVEAEWRYDLQIRYLPEDFMESLKEDRTTLLYFYQQLRNDYMQRYASKVSEGMALQLGCLELRRFFKDMPHNALDKKSNFELLEKEVGLDLFFPKQMQENLKPKQFRKMIQQTFQQYASLREEECVMKFFNTLAGFANIDQEYCELIQGWNITVDLVIGPKGIRQLTSQDTKPTCLAEFKQIKSIRCLPLEETQAVLQLGIEGAPQSLSIKTSSLAEAENMADLIDGYCRLQGEHKGSLIMHAKKDGEKRNSLPQIPTLNLEARRSHLSESCSIESDIYAEIPDETLRRPGGPQYGVAREEVVLNRILGEGFFGEVYEGVYTNHKGEKINVAVKTCKKDCTQDNKEKFMSEAVIMKNLDHPHIVKLIGIIEEEPTWIIMELYPYGELGHYLERNKNSLKVPTLVLYTLQICKAMAYLESINCVHRDIAVRNILVDECVKLGDFGLSRYIEDEDYYKASVTRLPIKWMSPESINFRRFTTASDVWMFAVCMWEILSFGKQPFFWLENKDVIGVLEKGDRLPKPELCPPVLYTLMTRCWDYDPSDRPRFTELVCSLSDIYQMEKDIAIEQERNARYRPPKIPTTFQEPPPKPSRPKYRPPPQTNLLAPKLQFQVPEGLCASSPTLTSPMEYPSPVNSLHTPPLHRHNVFKRHSMREEDFIRPSSREEAQQLWEAEKIKMKQVLERQQKQMVEDSQWLRREERCLDPMVYMNDKSPLSIQPTANLDRTDDLVYHNVMTLVEAVLELKNKLGQLPPEDYVVVVKNVQLRKLIGSVDDLLPSLPASSRTEIEGTQKLLNKDLAELINKMKLAQQNAVTSLSEDCKRQMLTASHTLAVDAKNLLDAVDQAKVVANLAHPPAE

SEQ ID NO: 508 - DNA, 153752 bp, Homo sapiens
  misc_feature (1)...(153752): n = A,T,C or G
agtgaggcccaggaatcttcattttcacttgcatgctaggtgattctgaggtgcaagaaagtttgaaagcaattatcctagatctattcacccaacaagttgttgggtctccagctatggttggttagtggttcaaaaattaaccttagaggcaatatccaaaaaagccacaagatggggctaacaacgctacactccagatagccctctcccctccccccaacgcagagactcttacgtcgtctcattctctttcactgtgttctcttatctctgtgtcccagttgtgttgtgaatcgatatgtgttgctgtctatgtgtttcattctgttcttacctgatcttccttattttgttgggtcttttttttttctcatattctgaatggggccacaaatcaaaaacaagaaggaagagtagaaattgtatcttttaaactacaatacaaaggttaacattaaaccaataaggctcttcaatcattctggaaatccagaaaggacttagttctagtccaagctctaccactacccaggggcaggacctggggcatattatttcacttttctaacttgcttttcctccactataaaagaaaagatggaactaattgctccaagttctgaccaacttagatgctctgaaattgttttattctttgcatatggtgggggggtgggtaagggtgactaagacttagccagagaccaggaaagagaaatcttggtgactagaaccaatctgtcaccaatttatatttctcctttcaatacaaaggaccttattcagaggtccttattgatgttcaagtcctatgtatactagctaatcttctgcaagagcttactcaaaagttctcataatctctaatttcctgcatcccacctcccaaatgccctgccaagcactgccagatttccaaaccccttgccatcaccatgtaaatttgtgtaaggaataactttttaaattgttaagaaaataaattcccaggtgcagagagtaaaggaggaaattgccttgtttttttttttttctgaaacagtgaactagaaagtggctactgcaaataaaggcagagattgttagattatataaaaaggcaagactcaactatatgctggctataaggaacttaactttaaatgtaagcatacagattgaactaacaggatggaagaagatataccacactaatgctaataaaaacaaagctggtttgactatgttaatatcagacaaagcagatttcagataacaaaatattgggataaggacaacagttgctaaataaagtcagccacagggctggcagcagcatcttcggaaacaggcatcctggcactgcagacataatcgaccttgttcatcagagttaccaagtaaatctttgaggaaatcactgtagtccgatgtacctttactgaggcctaaactacagaaacaaggagggtgggagctctcagttgatctgaataatgcagggagaacttctgtgagaaatagtgtttaatccaagtaactagggaaacactgagggtggtaaactgcctgcctctgggtcatatttgactgcaaacatcttttatttgacctatacttttttctgtctgtatcatttatgatcttttaagctacatatagataaaatgcaacataaaatgatttaagccataagggggtgtattatctcacataccaggaaatctggaggcaaaaggcatccactgttggttatgtcagtgactttagattcatcctctctctggtcagcctatggcttccttttggttggaaaatgactgcagcaactccagcatcttatcctgatatgaaccaatgtccagaaatgaaataaggccatttctccctgtatgtctcattttcagagctaagaaacctttcttaaaaccttccagaatactcccttgcatcttattggccagaactgggtcacatgttcacttctaaattcatcactggcaaggggaataagaccatcatgattgatttgagctaatcagaatttacctgaatcatgtgatgaaggtgattacctgagatacattaggggctctgctatttattataaaagggagaaaattttccatttgataggcagtgacctaggcaatattatgtcttccaatccatgaacacaggatgtcttttccatttccttatgccttctattatttcaccaatgttttgtagttctcatcatgcaggacttttgcctccttggttaagcgtatttccaagtatcttatttttgctgtcattgtaaatggaattgttttttcttaacttcctttgcagatagttcactgtctgcctttgcgttttgaaaaaaggaggatctggcttcattaagcttacttttctgcatggcaatagacttttgagctgaatagcagctgctccctgtaggagggacatttgttctcccatttgccacagttcctatccagccagcttccctcacattccctgctcggcccctgtaggcatttcggctttcgacctcttgtttagatcatccacatgaagttacacattgctgcaattcattataaagacactggagtggtacaggaatagacagccaacttggcaactggacacaacacaaagctgattttccatgttcctgaaatttatattgaagcactcaattattttattggaaacattttgaatgggaatatttcagaaatatattttgtggttttttttctctaaagcatgcagaacgtaatataaatcatacctcatgatgcaccaaaatagacaataatactctactgtgctggctaataaagtaataggagttaatgaagtatgcagggttatttgtctctgtcctgtaaatggccacagatgcttggttttgagggctcttgcacatgctaggcatttttttcctgtctagaagttcttcttgttcctaacaatgcatttgcctgcagcaatctgctttcacttcctagttgatgtttcctgcacacggtgggctgggaccagatcaccacgtttgttaaaattatggaattcgacactggcaagcaaggtttgggcagtcactcaatgcttcagagcttatccatgggatgttggggaccagatgagcccactcacaggtgggggttaggggttcagagccaagaagaccaaagtcatagagctgattcagagtcggcagggcatcagggaagtctccttttccaggcagccactctttctaggagcagcctgcaggccagccctgcagcaacctggggagttatggaaatcctgaagcgtgcccaatagctgcggaaaccatgtgtcctctgtggcaaccatgtgtcctctgtggcattgaggctttctctgcatggttttgtttgtttgtttttnnnnnnnnnnnnnnnnnnnnnnnnnnnnnnnnnnnnnnnnnnnnnnnnnnnnnnnnnnnnnnnnnnnnnnnnnnnnnnnnnnnnnnnnnnnnnnnnnnnnnnnnnnnnnnnnnnnnnnnnnnnnnnnnnnnnnnnnnnnnnnnnnnnnnnnnnnnnnnnnnnnnnnnnnnnnnnnnnnnnnnnnnnnnnnnnnnnnnnnnnnnnnnnnnnnnnnnnnnnnnnnnnnnnnnnnnnnnnnnnnnnnnnnnnnnnnnnnnnnnnnnnnnnnnnnnnnnnnnnnnnnnnnnnnnnnnnnnnnnnnnnnnnnnnnnnnnnnnnnnnnnnnnnnnnnnnnnnnnnnnnnnnnnnnnnnnnnnnnnnnnnnnnnnnnnnnnnnnnnnnnnnnnnnnnnnnnnnnnnnnnnnnnnnnnnnnnnnnnnnnnnnnnnnnnnnnnnnnnnnnnnnnnnnnnnnnnnnnnnnnnnnnnnnnnnnnnnnnnnnnnnnnnnnnnnnnnnnnnnnnnnnnnnnnnnnnnnnnnnnnnnnnnnnnnnnnnnnnnnnnnnnnnnnnnnnnnnnnnnnnnnnnnnnnnnnnnnnnnnnnnnnnnnnnnnnnnnnnnnnnnnnnnnnnnnnnnnnnnnnnnnnnnnnnnnnnnnnnnnnnnnnnnnnnnnnnnnnnnnnnnnnnnnnnnnnnnnnnnnnnnnnnnnnnnnnnnnnnnnnnnnnnnnnnnnnnnnnnnnnnnnnnnnnnnnnnnnnnnnnnnnnnnnnnnnnnnnnnnnnnnnnnnnnnnnnnnnnnnnnnnnnnnnnnnnnnnnnnnnnnnnnnnnnnnnnnnnnnnnnnnnnnnnnnnnnnnnnnnnnnnnnnnnnnnnnnnnnnnnnnnnnnnnnnnnnnnnnnnnnnnnnnnnnnnnnnnnnnnnnnnnnnnnnnnnnnnnnnnnnnnnnnnnnnnnnnnnnnnnnnnnnnnnnnnnnnnnnnnnnnnnnnnnnnnnnnnnnnnnnnnnnnnnnnnnnnnnnnnnnnnnnnnnnnnnnnnnnnnnnnnnnnnnnnnnnnnnnnnnnnnnnnnnnnnnnnnnnnnnnnnnnnnnnnnnnnnnnnnnnnnnnnnnnnnnnnnnnnnnnnnnnnnnnnnnnnnnnnnnnnnnnnnnnnnnnnnnnnnnnnnnnnnnnnnnnnnnnnnnnnnnnnnnnnnnnnnnnnnnnnnnnnnnnnnnnnnnnnnnnnnnnnnnnnnnnnnnnnnnnnnnnnnnnnnnnnnnnnnnnnnnnnnnnnnnnnnnnnnnnnnnnnnnnnnnnnnnnnnnnnnnnnnnnnnnnnnnnnnnnnnnnnnnnnnnnnnnnnnnnnnnnnnnnnnnnnnnnnnnnnnnnnnnnnnnnnnnnnnnnnnnnnnnnnnnnnnnnnnnnnnnnnnnnnnnnnnnnnnnnnnnnnnnnnnnnnnnnnnnnnnnnnnnnnnnnnnnnnnnnnnnnnnnnnnnnnnnnnnnnnnnnnnnnnnnnnnnnnnnnnnnnnnnnnnnnnnnnnnnnnnnnnnnnnnnnnnnnnnnnnnnnnnnnnnnnnnnnnnnnnnnnnnnnnnnnnnnnnnnnnnnnnnnnnnnnnnnnnnnnnnnnnnnnnnnnnnnnnnnnnnnnnnnnnnnnnnnnnnnnnnnnnnnnnnnnnnnnnnnnnnnnnnnnnnnnnnnnnnnnnnnnnnnnnnnnnnnnnnnnnnnnnnnnnnnnnnnnnnnnnnnnnnnnnnnnnnnnnnnnnnnnnnnnnnnnnnnnnnnnnnnnnnnnnnnnnnnnnnnnnnnnnnnnnnnnnnnnnnnnnnnnnnnnnnnnnnnnnnnnnnnnnnnnnnnnnnnnnnnnnnnnnnnnnnnnnnnnnnnnnnnnnnnnnnnnnnnnnnnnnnnnnnnnnnnnnnnnnnnnnnnnnnnnnnnnnnnnnnnnnnnnnnnnnnnnnnnnnnnnnnnnnnnnnnnnnnnnnnnnnnnnnnnnnnnnnnnnnnnnnnnnnnnnnnnnnnnnnnnnnnnnnnnnnnnnnnnnnnnnnnnnnnnnnnnnnnnnnnnnnnnnnnnnnnnnnnnnnnnnnnnnnnnnnnnnnnnnnnnnnnnnnnnnnnnnnnnnnnnnnnnnnnnnnnnnnnnnnnnnnnnnnnnnnnnnnnnnnnnnnnnnnnnnnnnnnnnnnnnnnnnnnnnnnnnnnnnnnnnnnnnnnnnnnnnnnnnnnnnnnnnnnnnnnnnnnnnnnnnnnnnnnnnnnnnnnnnnnnnnnnnnnnnnnnnnnnnnnnnnnnnnnnnnnnnnnnnnnnnnnnnnnnnnnnnnnnnnnnnnnnnnnnnnnnnnnnnnnnnnnnnnnnnnnnnnnnnnnnnnnnnnnnnnnnnnnnnnnnnnnnnnnnnnnnnnnnnnnnnnnnnnnnnnnnnnnnnnnnnnnnnnnnnnnnnnnnnnnnnnnnnnnnnnnnnnnnnnnnnnnnnnnnnnnnnnnnnnnnnnnnnnnnnnnnnnnnnnnnnnnnnnnnnnnnnnnnnnnnnnnnnnnnnnnnnnnnnnnnnnnnnnnnnnnnnnnnnnnnnnnnnnnnnnnnnnnnnnnnnnnnnnnnnnnnnnnnnnnnnnnnnnnnnnnnnnnnnnnnnnnnnnnnnnnnnnnnnnnnnnnnnnnnnnnnnnnnnnnnnnnnnnnnnnnnnnnnnnnnnnnnnnnnnnnnnnnnnnnnnnnnnnnnnnnnnnnnnnnnnnnnnnnnnnnnnnnnnnnnnnnnnnnnnnnnnnnnnnnnnnnnnnnnnnnnnnnnnnnnnnnnnnnnnnnnnnnnnnnnnnnnnnnnnnnnnnnnnnnnnnnnnnnnnnnnnnnnnnnnnnnnnnnnnnnnnnnnnnnnnnnnnnnnnnnnnnnnnnnnnnnnnnnnnnnnnnnnnnnnnnnnnnnnnnnnnnnnnnnnnnnnnnnnnnnnnnnnnnnnnnnnnnnnnnnnnnnnnnnnnnnnnnnnnnnnnnnnnnnnnnnnnnnggttaaattagaggtagacatcccttggtgatgaagtacttttttcagtacttgtacccataagtttttctttgtccctttttttttttaaatggactatcactctgtcacccaggctggagtgcagtggcatgattatagctcactgtaacctctgcctcccaggttcaagcgattctcctgcctcagccccaccaaggagctgggactacaggcatacaccactatgcccagctagtttttgtatttatccattttttttgttagaatacttataaccatactgttcttttaaaataaaatttattctacataatagtaaatttacatgatgtaatttaaattccatcatttacaatggagagatgccagttacataatgtcgcagccctgccaatgatgggttttgctctttaccacctgggagcctgtgaataatttatttaccttatccaagcttccttttcctttctgcaaaccaggaataggactagcaacttcatagacggttgtgaagacaagctagacggcagatgaaagttcttggcacagagtgaacacttgataaactatatggcaggtatgtatgtactatctccccataaagcttactttaattgctatcatttctaaaaattatagctatagaatttttcatagcatttgtacacctatcacttaatttgggcttcacaataccctgggaaacaggtagaacagataatacttatttttctacttttctagattaggaaataaaagctcagaaagatggattcgcatgtccaaagtcacaacctcttccctcttgactggatccttcctgtgagcattgaaacctgctctactggctatcatcctaaatgacaaatcagtcctctttcaacccacgaccccctccaatatcccctggtctcaattgcccttggcagtcaagctttccaggactcatcagcgcgtgccgcctctgtgtcttcactttcagtttacttatcagcccaccccacttgacctttggctcttcattcatttgctcctggtaagagcttcacttgaagtcctctgctgtctctgactcttgccttagacaagtttatccattcttgtggtttcaaatgccatcccaaaagttaatcaccagctcaaccacctttgtgatctccagttagtgaaaagataagaaaagagaacctgaaccaggatgggtcaataggacaggaaagaaaacgaggaataggaaaaaagtttgtgggactcccaggacttagagattggagattgcatggctgcagggtaaggagggagagggagagtcaaaggtgacttctcttttgttgacattcacagggagggctggaacggggcttgtttgaagagcaatatgagccagggttatagacctgagtttggggtaagagtggaacatccaaatggaagagtccagcagctgaaaggacatttgttcaaaggcctttttcattacagttttctccttcttctgatccaggtatgcatccccccaacacccccacaattagggcctcccacatggcacttggtcagcttgagatacagaagtagaagggaaatatttttcttctctaactggggtagatcattattgcaacttatgccatatggagagcatcgccatggatagtgtcttttagggatttccatggaatttgagggctcctgaggcatttctgatgggtttttttaaaaggcagtaacaggcagaaatgcatgaccttgtcacctgagttgcttgtacatgacactggacagaacctagggagacctgatggcggagttggccaccccagagagtttctcaatgtctttttcatttaaaaagctatgggtttatgattctgtgaggtagatttgggagattctttttttaaagtgctgaagaattcaacaacctctgaaaactcacctttcccagaattggtcccagcaagataagattgtagttcatttatgtggccacacaggggcagcacacacaaactctccttttcttaaacaggtcttgattgtctttgcttttagttcccactgccacctcctagtacagactctcaacaactcacccaggtatctaacttttgtgccactcagccttcatcacttcatttccaagcgcaagaatacggaggggacacccactgtcagatgccctctgaccatgtccttgccatgtagtcaattacctgcctcctcatccccacaccttccctgctaacttcagtgtacctctgtctgacttgcctctccatccctggccaagttctcccacctgaccaccttctgacctgctgaccgctgtgtagtcaccaagattacctccaaaatgctgagtgctgggaacgtgacaaatctgtgaatagcacaaatgggaaggggtgggggggctccagctgtcaaggctggcagtgcccatcaatgggttgtgagccccatgctgggcaggtgggccctagctgcagagagtctgatcttcatcggacccagagtgacatccagccaatagctatgggtagtccactaattatactttgagaaacattgacttcctagctttgttaacttatctaagtctccagtttcttttcagaaatgggaaggagtcagtgcaatcttggaaactgagtgcttcctcagcacaactccagggggcgccattctcagaaagtacattgtgaatagcatcctctagaattgtgcaacagggcagctctgggaatcagattccaatcctgcacaggacacagaataaagaagcttgggacaggggctctggagaggacattgtaggatgaggatgatgctgcgtacactccacttttttcactttatgccaagtccaggtcacttcctcctcctactcaggagcaagtctggagttttcctagggatagggaagaagtgttgctaagtgcccttgagtgcctgctcacatatcaccggcctgaggaaagaggggaccagcctctgggcggggcccctggaaggggctgtccagcatctctaactattcttgtgctgtcctcagaccctacttagtcacagctcagggacctggtcttctgtgttcagggacctggaccggttctgccaaaatccctagtggtatttatgatttttcatgcctgcaaagggactggggccactttaggacatggagagattaggacacaagtgctcagtaccatgtagatataacatctcccactgcggggggtcttgggagaaccagcctgagaagttggtttcctccgcccgccctgcgcccccacccacctcacacacaccttttggcctccaaaaggctgcaggtggagtggacagaggatggaggggtgttaggaattggggagttaactgctcacaaggggcacataacatccgaggatcccatttgcggccgggggaatggcagagatcgccccccaggtctgcccggcgctcagggaattggtggcagcgtctatttcagagtttatggtaagaggctggagccggcacacacagacaacacaccccaccctttaaggaagtggggaggagagcagcaggggtgtggttaacaactcagaggaggagggagaatctaacctgtcagcccttttactcagccacagcctccggagccgttgcacacctacctgcccggccgacttacctgtacttgccgccgtcccggctcacctggcggtgcccgaggagtagtcgctggagtccgcgcctccctgggtgagtccctcccgcgagccagggctgagcgctgcgcccggcagaagttggaggcttgaccgggtggcaggggttggggacaattccgggatcctgggcacctgagctgggagttcccggagaaacggccagacccaggaaatcggagccgtgggtgctgtgcacatgcccggagctcgccagccttccgcggggaagaggggttctatttttggagtaaatttgacactatagggtgtttctccctctttgtcctctcaacatattcagacaggggaggctgggggaggctaggggtgacggtgtgagggcacagccaggctgctgcctctaaagctcaggttagggagccacggggtttcagctcctgcccccgctccccgctccctcccgggcccttccgcagccccaggggttatagtctcacccccagcccaccctgactctcctgcagccactccttgcacctgagaggtcatcttctgaatcaagccctggctggaggaaagcaagggtgttctggggcacaggggagctcgtgtgtatgtgtgtgtgtgtgtgtgtgtgtgtgtgtgtgtgtagttaacactggccattctggtatcttgagaagccgcctcctgagtgccactcaagggttaagttcagagctgcctctgcctgctgtcaggctgcgcgtgggcaccgctttgggtgggtgagcgtggagcggcatatgggtgatgttctgcaagccctgccacctgccctaagcctcgaccacatgacactggcatctccctataccccaaactgggagcaaaatccaagtccgctcatttaaggagccagcagaaggacaagagcagaaagttgtgcctagaggtggctttagccaggaggaactcggaagctgcgctgtggctgggtctgagcccactggggcagtgcacgtggtgtgatgtggtggtgggtgctgggaggcccctctacgtgggatgctctctgttcaccccaagtgctgttgctgaaggccctgtctttcccaaccactctgggggagggggaggaggacactgatgaaaaagtgactaaagacagaagggaggaaggaagtagtcacactggagagccccagcattggtgggacagtctgcagtcatccattcaggaggcactcactggcttcccacctgcggccaggtgcaaggtgtggggacaaggtgagtgtggcatggcctctgctcaccagggcagtgtgggataccgggtggttgagggagggctgccaggggaaggtgcagggtactatccaaccctgcactagagggctgtggggggagccagtcagcaatggccaggagggcgtcctggcagaagtgactccaaattgagagctgaaggatgactagaaattagcacaagagaagaggggaaagaacagcaagtgcagagactggaggctaaaagcagcaggaggctggaagcagcgggcggcatccaggaaaatgaaagtagctgggcttgttgggaacctagagcgtgcaggggcgaggggaagctgcaggggtgagtggagactgctctagaaggctttggaaggcctgccaggctgccatggcaacttctgttggagcaacacttgggacctggagccaggcaggagacttcccagcaggaagagattgccagatttagccaataaaagcacgggacactcagatttgaatttcagataagcactcaatggttttttttttcactacaaatatgtctcatgaactacatggaacatacttatactcaaacattattcactgtttctctgaaattcacatttaactgggtgtcctgtatttatctggcaaccctactctaggagaagctgaggttggcgcaatgctgtgaagtaaaggctggaaactgcccaggcactctgagaacagtctcaggtctatcttgtaaccattcctcctggattttattatgagctcatttaaaaaacaaaaaatcaattccttggtcagtttattcatctatacaggtgaaggagtatggtacctcagaaaaaacgacattaaatccagacagatctgggttcaaatccatgtagaccggtgagcttctctgaccctcagaatcctcttttctgaaatgagggcaggagtatctgtttgtgcaggtggttgggaggatccctgataatgtatgtaaattgcctagtgagtactaaaggaaacatggtacatattgaattttgcaacaccttcacagggttgagcaaagcaacagccacagagtgcttgggttcatttacttccacaagtgagcacttggaggtctcaggtgaaatacatagtagggttcatgcttccagtgagaactcgtggggttagcccttgggttggggacagagtctgcattatgtttttagctttgctactcccttcccatatgacctgcttcaaggggtggagatataacactcttcttgagggatggtgggtgggcagagagtgactcaaagtagaattaactgaagggaaatgtgaatgaattaaagtagagaatccagataaaatattcagcgcagacaaatgcgccatgaaatttggctgtcatgattcccagttttaggatgagttccttattagaaaagtagcgctaagagatagaggaagtgaaggtgccttatgaactggattttgactttaatgggagcatttgtaacaacaaattagggtcctcctaaaagggaacctagaggaagttaagaattcgttaagagaaagaggaaatggaaagtgtgtttcccttgtgggaacggctaggttaaaaatggtccttctttccagtggctaaatctccccatccccctgtgataaacattttgtccccaggcccttggattgtttgcccaggtggtgttgagagagaccctatggcgtgagatggatagaggtgttccactgatgaaacgttcaaatgagcctgcacttggacatgtgtcttgaatatttgcaagatcaaggttatgataagtcctgcataaaaagacacgtgtcattccctgaggatggctgtagagcccatgcacattctcagggaaacagcattccacattgagtgaaccttgatgtgagggcagtttggggaccaagcaggtcgttcagaaggcatagcccttctcataactctagccaggatggacctaattcattctagactaggcagtgtccaacttagagaagatcttcaaggaaggagcccttgcgtgcaacctttttttttttttgagatggagtctcactctgttgcccaggctggagtgcagtggcgcgatctcagctcactgcaacctctgcctcctgggttcaagtgattctcctgcctcagcctcccgagtagctgggattacaggcacgcaccaccacgtccagctaatttttgtatttttagtagagacggggtttcgccatgttggccaggagggtctcaatttcttgacctcatgatctgcctgcctcagcctcccaaagtgctaggattacaggtgtgagccaccgcgtctggctgtatgcaatctttctagcatcatgcatccttcagagacacaaactcccacctgtatcagcctgagtcttcccattgcagatccggccatgtttcatcgtgcagaggaccctggagaaagtccaagtcccttggcacttagctctccatagtgacgacagtagctccatgtaccccaaatactgctaggacaaaggaaactgatggtgaggctagggaggggagggaggctaccctggggctaccctgcatggtaggtcactcagtctctagtttcccctgcctgggacccatatgtctcaggaccatgtgaccctggcctcccaggtaaatggccacattgggggatggagtagaggtgcagagctgcgacgtgcccggggctgaaagtgtggtgatgaagataagttttgctggcttgaggatgaagagtttccttgtagagtacgggtcagttccagggttaaggagaaagagcagggatagtggtgactctgcaacactgatatgccttatctgtccaagcagtcggatggtcaagagctcaggctcagtcagtctgcctgggttccagcccaggtttggtaccccctgagtgacgttaggtaggtgagttagccctagcttcctatttgcaagatggagacaataacagggctttgggtgagggtggcatgagatagtgtacattagagagatattcaaaatacagctactaaaacctgagtacagatcaaacagaacagacaccaccattactctgagcagcgtcagagaggcccccttccatgccaggctcaccccgtcagtgcatcttgtggagtctgggggtggaagaaacaggcctttggagggctgtagcgtggacatatccaacgaggatggactgtttcgatatttcaacaacccagatgcacccgcttaataatagcatcttatgcacccactgaataataatagcgtcgaagtacaataaaacattcagtcccataattaggcagatgatatgcatccaataagtatgagctctctggtatctttacacatatggccatatctgagctggcggggcagcaccatttatttttccagaggttataggtcctcttctgcgaggcatcaggcagcttcccctgagcactctctcacaagcatacatcaggtattcaatgatgtttgtttctgcctaatcccactctcagttcactgtgttttggcaacagccagccctcattaactctttagacagcgaagagactgtctacgaatgcccagccggcactgaagtctagatggtcatttaaagcgttcagagagctgacaggtaggagaaaatggtggcttcactttctgggcctcctaactctgtgtacaaagctgcgagctgtgcaagggggcggcagagggggaggggatagctttttgagtcactctgctatttctcaaggaataattattactcatggtgacagtttattaagaagagcagacttgaggctgcatgttccgacacacttttcacccagatgcagcgggcaggttggtgtgaatgcagagtttaattttcaggagaccctccaggtaggccacagggggcctgcaggggtggacgctgctctgagtttagtggtcttcgtggcctcttaccttttcccagcactaaggtggttgctgcttttatgaggcagccagttagtgtgactaaaaccaagatcagcaatggccaatacctgcgggaggcaagccttcccgtttcctagcttggctgtgttcgctaacatcttccccctctccagttctctctcttccttttatgttctgaaatccacccacacagaatctggtaagatcactcactagagacaggagggctcaaagaatccacctcgcccagggtttagagctcggtaccaggtttaattcacatctcctgcatttgtcttcctttaaattggaccaattctcccaataattgtgggggcagacccccttttaatgccctttctttcttgagggccttgcacctgattctgtgagaacctgccccccacaagccatagcagtcccactggttcatatgggggtgattgatggggaggggtgtactgggaattctgacctgagtttgggttttgctcttctgggggttcccttctcacctttctcacctgggacggaatggcccctgtggtggttctgaccacttggagcaccatcattttctggtttttttttttcttttctttttttgagacaaagtctcacttgggtgcaggggcatgagccaagactacaggcacatgccaccacacctggcttattttctttctacaacctctacctcctgggttcaagagattctcctgcctcagcttcccgagtagctgagattacaggcacccaccaccatccctggctaattcttttatttttagtagaaacggggtttcaccatattagccaggctggtctcgaactcctgacctcaggtgatccactcccctcagcctcccaaagtgctgggattactggtgtgagccaccacaccctaaattaatgtactgatttagggtttctgatttctaaattaatgtactatgtccatcccactgctctgggaacctcaagtgcttttctatgttctctggcagtatttggagtcaaaacccaacccctctcacccagctccatgtacccagtccccgcccccaggtcccaccccaggtaggttatgagagatctgatgctgctgcactttgcacctctgcagaggctcttggcaacatccggtcacatcccctccgctatttaggcagatgtttggtgctggcagacagcggtgccaaccaagacagctgcaagtggctcactgcaagtttgaatcccagcccctagctcattacaggcagaagctcaggcagtttttcagcccgggcaagaggaaagagagtcagagggcaggaggcctgagctttggtgtagattctctcacctgttaactggggtacattggctaaatctctttcctcttcaagccttccttttctcatttgaagatgaagaattggtactgcctccctaatagggtaatggagagaaatacttgactgtgtgaaaatcccccataaaacatcacaggcattgtcccaggaaaagtgatgaatttgggatcagaacgtggtgggtttgactctcgactctgtcatactctgcctgtctgacatcgccaagtgatagaacctctctgagccttactttgctaatttgtaatttgttctaggcacttgttgaatgtttctccccatcaccccctttactctcagggtatagtttttcttcccccaatttttttttttatctcatttcgagacagaatctcactctgttgctcaggctggagtacagtggtgcgatcacacctcacagcaaccttgacctctcaggctcaagcaatcctccggcctcagcctcctgagtagctggggccacaggcacatgccaccacacccggctaatttttaaaatttttgtagagacgatgtcttgctatgttggccaggctggtgttgaacacctgggctcaagcaattctgcttcggcctcccagagtgttgggatcacaggcatgaaccaccacttcttccccctaatttgaggaattatatctgtcctcacaaagtttatagtatggtaggggaggcaatacatgaagataaagaactgtaagatatttatttaactctaagttacttaaaggtaaataatgtgccataaaagaggcacgaagtgctatgagattgcagggcagagattccttctggctatggactctgggaatgcttcctggaggagacggcatttggcaaagctctgaaaggatagacaggatacactgtgggaacttgagatggtggctgtagtcaaagaagagtataaataacagcagagagatggagaggtgtggtttgagtgactcattttgggtggaaccaagagtggcaaaaggcaatcagagttgggggtggaacggaagataaggcttggacagggaggccaatgtgtttgggagttatcctggaagtcccagacagccatggggctttattctgaaggcagtaggagctgttgaccatgctgacttcggtggaggtgcgagggtcagattctggtgtgtagagtggatgagagtgaagagagcttgaattcgcaagggagcagataagagagtgttgtaatatttcaggcctcacacatctgaataaattgcgtaactcagatactttgcggtcctgtggagcatgcaggcatcccctggaggcttctactttctctgagctgaaattggttctttgatgaatttgagagatatataacttatgagaacatccatgagaaacccaccattcctcttcacctctgtcttccatattcttgattcccagcctggccgcttccccctgggcctcccctctgctaggagtgtgttaaatgccaagcctgtctcaacctctatctggcagcaccttgaagtatcaagtcaggaatatgcacttagatccacaggccccttctccatcatgtctccggtgaccatccagatgtgatgattcccaggaccctccctccctcccttagccctcacttctaagagtctgtaagatattcccacttgaggagcttgtcttcttcaatgctgtatctcagaaattaaactcctccttttctcacgccaaaccatctctcctcctggcttctctcctcttcatggggttgttcatctcccacacactcaggtcagaaaccttgctattgcctcccctctttccacgcccccacttttttctgctcatatcttgcccatcactcaatcctgcagattctttcttcatgcctttcattccttccttcccgtttctatggcccctactctgacccaaatcatattacctaatattgcttcatatttttacccaagagcttcgtcctatctctggttcccttggaagctccccaatgcctgcaggcaaatccagcccccttaaatttaccattcagtgcctcccataatccaaccttgatctgctcttctaactaaactttccccatacccaaatgaagccccagccagcctggtgtgctccccagtctctggcaagcctctgctcaagtcctgtgttctgtttggaatgccagccccatgcacttcaccagtcctacttactcctttaaggctcagtcggtgacccacccttttggaggacatctgagctccccatggcagcttctgggcttctttgcatcctgggatctcccagaatctatttttcaacctgatgctacattcctccacagcagggagatgccttttattttgttcttcttccttataccgtcaaattccaaggatagaaaattgcatttccctgggcctgtgaaaagggatccctccctccctgcacactcatgcctggctcacacggagtgagccagacagcgcttcctcattccccgcagtgggtgtcgcaacagccagttgcaactagaataggggccacatcccgagtctcttgaattcttgccctgtggttaggatgcccttcttgcctgtcctgaaggtggagatttcctacagccgagagagagggagtcagcagtctagggcaggaactccatcatttctttattaaaccactcctaactctctctaatctctgtgagtcttgcctttcccttttctctcctcctcctactgttgagtacaactaggccaggctgaatgagaggagaaagatggggaggaggaaagaagttaggcagccttggcagagggtgcaatgctccgggaaaatgggagagatttacaaggcagagattgacagtttttagtaacttgactttgacctccagtgtacacagacatagccttggctgctggactctgagctttctggccctgggaagctcgagatttgcaaacacttgttcgacaatcacctcgtttatctgcattgtcaccagtgcagcctctgagccctctccctgtctttacttgaccctgtatagaaaaatgctttcagggccaattgcagtgactcatgcctgtaatcccagcactctgggaggccaaggcgggcagatcacctgaagttgggagtttgagaccagcctgaccaacatggagaaaccccatctgtactaaaaataaaaaattagccggatattgtggcgcaggcctgtaatcccagctaccagggaagctgaggcaggagaatggcttgaacccagtaggcggaggttgcagtgagccaagatcatgccattacactccagcctagctgggcaaaagagcaaaacactgtctcaaaaaaaaaaaaaaaaaaagagaaaagaaaaatgctttctgcacccaacactgaagactcagccccagcctgtgttcatgccctgggggtccctggaagagggcacaggagctgccctgagcctaggagccctgggctagtcactgcctccttcatatcccaccacatgctatggggtgagtcccctgggtaagcctgttcaagcctcctgttttttatttgtatgtgcaatcagggggtgtggggactttttagcaaagctttcttcaaagcagatcttaggcaagagcccaatataaaccaggcaaaaatattcctatccagggttgaagtgagaaggcgaggtacctaccaggcccttgagtcccctccatggatctcctggggtgcaggtcatctggaattctttccgggtctcaggctcgtgaggtgctcattgtgtatgtgtcatgggagctggagaatggctgtaggtgcaaatggacttggaaaagaacaatgtcaaagtcgtaagtccagcctggggcatggcaggtttatgtatgtgtgagtggcgggaggggctgtagatttgaactccctgaaagaagatatgtgtaattcttaccaaagagtaaatgcatatgtttatgaaagaaagttcattgctatcatctggctctccaaggcacctgtgaccccaaaagattaagaacatctctcataagatattatcatccgttctacaaacctttcataaaaatgacctcaaacttgagctcctttttaattcagacaaactaggccataagccctgttgaggaaagaaccgtatctgtatggagagtcactgttacatcccaaggacacagcctggtacctgacacacagctggcattgagtacgtacaatgtgtgcctgatataaggcagctctgttctcccaataaggagggctgctaaaaaaaaattaaaaagcttattttcatatgtaaactttgtaggataatgttgaatagattattttagcgatacattttcaatcacatgctaataacaatacattaacttaaatactgctttcccccaactctcccagtttaggaaacattgtaactgttcactcccatctctgacatcagtgtccttcttgtcaccagaaccctttctgcatcagctcttcatgttctgtgggcatcatagtccctgtggtctaaagagagttagctgtttcaaattgatccaaaaggagtttatttacttatttattttttatttttgagacggagtctctctctgtcacccaggctggagtgcagtggcacaatctcggctcactgcaccctctgccttctggattcaagcgattctcctgcctcagccccacgtccccaccacccgtcccccctccccccgccactgccagttttttaataaccgctaattaatacttattgatgaatagtagttttttgagatacaattcacataccgtaaaattcaccttttaaaaatgtgcaattcaatgagttttagtacgttcacagagttgtgcaaccatcaccgctttttttctttttttgacaagagtcttgttctgttgcccaggctggagtgaatggcatggtatcagctcactgcaacctctccctcctgggttcaagtgattctcctgcctcagcctcccaagtagctggaattacaggcacctgccatcatgcctggctagtttttgtattttttagtagagatggggtttcaccatgtcggccaggctagtcttgaactcctagctcaagtgatccacccgcgttggcctcctaaagtactgagattacaggcgtgagctactgcgcctggccctccatcactgctatctaattgcagaatattctcgtcactccaaaaagaaacccccgtaccataagcagtcacaccgtgttctccactcccccgtcccctggcaagactaatctactttctatttttatggatctgccttttctggtcattccatataagtggaattgtacaacactgtggcctttcgcgacggctgctttcacttagcacaatgttttgaaacttcctccatgttgtaacatctattagtacttcgtttcgttttgattgatatttattgatgagtaacattttgttgtgtggatatgccatattttgtttatctcttcattagtaaacatttggattgtttccactttttgaccattgtaagtactgctgctataaacattcacatacaagtttttttgtggacatatgttttcatttctctgagctatagacttaagagtggagttgccgggtcctgtgataactctgtttaacattttgaggaactgttgaatggtttttcacagcagctgcctcattttttattcccatcagcagtacttcttggttctaatacctccacgttctcgccaacacttgttgttgtctgtaatttcgttgttagccatcccagtggggatgaagtagtatcttactgtggttttcagttgcgtttccctgataattaatgatggtgaacatcttttcatgttcttgttggccatttgtatgtcttcttgggaaaaaaaatgtctgttcaaatcctttacaaagtatttattttttatgtcaacaatataaccactcagtacactgctttttagacaatgatcttttaaaggtttgtttacaacatttagcacttgaaattttaaggttatgccctcaaaaaaattgctgagggagctaagctatgaagatgcaaaggcataagaattatacaatggactttgggggaatcgagggaaagggtgggaggggggtgagggataaaagacaaattggatgcaatatatactgctccagtggtgtgagtccatcaaaatctcagaaatgaccactaaagaacttatttatgtaaccaaacaccacctgttccccaaaaacctatggaaagaaagaaagaaaaaattttaaaaagaaaaattgctgaatctatattatagtatggtggttgcttttcataaaaaccaattcttttaagtaacctttgtaagcatcccaaactagccttgattgattggagtgctaatacttttcccaaacagtatattgttgttcaaaataagataattgagaaagcaacccataacatgaaagattctgtaagggcttggatataaactttctcctttctgacagataatttgggaaggtagagagctttacctcctattcaagcaaatgtgatatttaaaaataagtagatggatgaatggacaatggactcatgaatgaatgaacaaaagaagaaatgcaagcaagtaaaccaatcaagcaaccacaccaatctttccctctttatttaggattttctaatccccacttagtaaatcagccttggtctttaatttacattttatggaaccatatataaaattgtttaaaaaacaagtttacagttacagattagaaacaagacactgtattttctgtcgcctggaatatctttatcatcttcctttaaaaatgggaagaaactaaggctgcgcagggtcctggaggcagttgagagactcagacatcaagtgatgtgattgcaggccttggtccagagttgtaagtcaccagagtgggacctttaggcttgtgacatgataacaaggattttcttgggtgggccccccagctcttcattgctctttccatcagcacaaaggcttctgggttgctgatgttttgtgtggtggccctggaggtctctccttctaccttctctggggtgagacagtctgatccatctcagaggccacactcaccacctactgcacagagacacagccccctccccatcctttaccattggtcctttcttaagaaaatgtgtcagctggcaaatggtactctggagtttggggtaagagagagaaagaggaagaatactgggcaagaaggtaagaaaggaagctgtggcctgacatgggcacagagacatgggcgaaagcttgagagatgacctttaaaggctcagaccccggaaagggaagaagttgggacaatggaaagactggcagggtggtaacatagcaggcaggctctggcgtagttgactctggattgtgtatggttggagttggggatcagggggtcagggacagtacacagcaatgtggacatacatggcctggactcctttcctttactgatggtggttggcaggttcagaattaggagttcaggtcagcatctttcagagaagcattcagatcccttctgtagaattttagtccattcctgggcaggattccagtgtttccagtgacagtgacacctagtcctttcttctgtgcctgtcggtcaggacggagtctcacctatcctagcaggtggctgttttcctttcggctttaaacatctgcaaggaatgagtctatgtgcttccttgaagccatgtttcctatttttgagaatgtagaattggtggctttgacatggtgaatctaaagcccagctccacatcacttagcacctgctgtgggccaggtaccatgcaaggcatgagtggtttcagaggtgaacaaggggtactattctcaagatgaaacagtaattcaggcagccacagtgagaccagatgttctgcatgacagtggagcagatgccatggaggcaggaaggccagagctaccaactttaccaagaggtggcccaaaaggtggtgctgggaaggattttgaagaagatatgtgtgtgccaggcaaagggtggttgggtgaggtgctttacaggttgagagcacagcatatgcaaagataagaaggcactgaagaaatggggcctgttttggaagctgggaacatctcagggtgtctggatctagcaggagcacggtggagataaggcgagaatgctatagagacccttgatctgggtggcttagtgttggacatcattctccggtgacaggaagcaataggatagataggataggataggcagttgcaagaatttttaagcagggaagagagtcagatttttgtttgaagaggactttggccccaggccacaggagctcttgcaccaagcatggagaagccttggctgggcatgggcagacaggcatttctggggtgtggccagggctgcaggcagggctgagctggtgcagcaagtgggaggtgccagccctccaggggcatggcccaggctgccaactgctgcttgggcattgaagctgtccatgctggccgctggccagcagggctggtgaaggaagaacccacttcctgcctcttgctgctgtttgcgtatgtgcagtggggaggggggcagacagaacagacagggcttggccaggcgggtaagaaccagccagctgtcagcaagaggtgcagtgggagagacggatgaaggggatacctacctggagagcaagggggtggcctggcagctatttttgccccaacaattgggctcagctattccatcgggatgatgacacacagaggatgttcaggagtagaaggcgctgtggtggagggaagggcatcctcatgttctacctccccgggtgcccctcctcccagagctcttggctgtaccatccatttgtgcctggcacatgttttcttgagataaaattatttttcacaagtacatgcattgctaaatgggatgaaggaaaggcgggcccccgtctcgtgcccctttgtctcccaatcataatctagcaaatgtcaggatacggagctcacactccggaaacatttgttcagatgcggagaagttttagggaaaagattatcaaggaaaaagtgcttgttttgggatggtctctgatacctgtggaaatgaggggcatcagagagattcagataagaacaagatgcacaaaagctcatccactcccaaaagagctgagtgagtggaggactccctggccccaggatgcggccacttcagtggagggtgttctgaggggagatgtgtgtcatgaccaaggcgggcagtccttggactcactgcagcccttcagcatagcatggagtcagtggcatcagaatcacttgcagggctgtgggggggttttgtgtgttttttgtttctgacagggtcttgctctgttgcccagcctccagtacaatagcatagttatacctcaatgcagcttctacctcccaggctaagcaatcccctccacctcagcctccctagtagctgggactacaggcacccaccatcacactcagctaattttaaaatattttttgtagagatggagtcttgctctgttgcccaggctggtcttgaacccctggggtcaagtgatcctcctgtcttatcctcccaaagtgctgggattacacaggtatgatccaccccacctggctgcagggctttcaaactgggctccaactccatagtttctgccacagtgcatctggggagagcaagaattgtacttcccacagggttgcaagtgatgtggacgctgctggcctgggaaccccactttgagaaccactgcagtggaggtcccccacagggatgtaccctcaagcacctttgcaattccattccttaggggtgtgtatcagaaccccctactccacgggtgagattttgagacacttctgtgcctgtctgctgttgtgcccaggcagtcatttcttcttctctttggttttgctttactttgttccttttttttttttcttgagacagggtctcactctcttgcccatgccagagtgcagcagtgtaattatagctcacttcagtctcaacctcccaggcccaaatgatcctctcacctcagcctcccgagaagccactgagcccagcctgctttgttcttaatgcttcaaaaatagttttggtgcccaccctggttgaaacaacgactatgtttcctttcctgcccacagcgccctgacgacttggttggcttccccagttttttgtcttcgttcccggtgttctcgaaggcaagactgcctctcccaggcttcctaaattcccacctctcagattccttcgaaccctccccctgtgtcacctctgccatgtgcttctcccagcacccccagttcatcccgtctgtgctcctctgatcccacagtcttcttcctgactctgttaggactttccttctgccttattttatcattcattggacatgtgccttccccacttacactatagtcctgaggatggagtcctggctcctttatcccccctcagtgggtcacatagaagatgtattccatccatatctgctgaattgcagtgagaagggcctgagaaacaaaccaaagcaaaccgagacctgtttacattggcccttgctggacaccagctctcgaaacgcacctaccaaggcctgggtgatggggaggaggaggcgtttgtgaagccacccctgagctgatgtggccgagtgccagggtccgatgtgctcatcaaccttgaaaataatttgattactgatctgtatcgctcagggatctaccacccccagagctgtattaagaatgttttcctcaggcaacaaatatgcgggctttgacatccaagtcagcctcaggaatttcattttatgattgatccttctttgtttgtttgttgtttgtttgtttattttttgctcgttcttgtacatcttccagatccaccttcttcttctggatctctcagttgacatacagccaagccctcccactgctcccttcccctctcaaatcatttccaaacatggttcctcttcctcaagcctgactcaaggtcttgctcttttactttgttacgaaagtcacaaatgactttgaaatgaagccactggtgttttccaggcagatggggtcccctaacctggggaccccatgtagtccccaaagctctggagtgttccagataactgtctgggaatgactgcccttttatgcttttttatacctgtctaatgacatatcaccccggaggggatgcccagctcacagaatgcaccttcagccagtctcagcccaatgccacagaggtgtgcttgacaaccccattcaacctttaccttattcattcactgttaccatgtcgcctgccttctgacctttctcctttaaaaaaatttctttcgccaggcgtgctggctcatgcctgtaatcccagcacttttggaggctgaggcaggtggatcacgaggtccactctcagattgagagcatcctggttaacgtggtgaaaccctgtctctactaaaaatacaaaaaattagccaggtgtggtggtgggcgcctgtagtcccagctacttgggaggctgaggcaggagaatggtgtgaacccaggaggcggagcttgcagtgagccgagatcatgccactgcactccagcctggatgacagagcgagaatccgtctcaaaaaaataaataaataaaaaataaaaaaataaaaattttttcatcagtgctgtaactaaaggaaaatgcactaagtttggagaaaggactcctagactcagttcctgcctatattttactctttagggaaatggcacacccctcagcccatgtatttgtgcgccctctcccacttctctctccccaagacctcccctccccagcatgaggttggaactgatattattgctcttttaaatttggagcaatatgtctccccgtggagaaggacgaatatctggtttgcacacaattattcacactatatcagcaaggcaggtcccaagggttagaagcgagggcttctcaaggtgtggcccctctacttcccagccatgtgacctcagcaccttctgacccctcccatcctcagctttcctgcatgctgaagggtgacaaccccagtgttttccttaagggatattgcaaagattaaaaggagatcatacacatacgtatataaagcacttagcattcattggtgtgctgcatgtaataagtattcaatccatgtagctgttacttgtattgatggcatatattactagaagacagaaatatagataactaaggtcacccaggatcccacccctcgtccgcttgatggcacttggcaggaacttcagcccctcagcctggggctatcttggtctgtctacaccaggtgtaaactcacttccttgtgcttctgccacctctgtactgttgcgtcttgtttggccactttactccaggacacacaactcagccccttcaccaatgatgccaagaagtctcagaccatacagaacacttacaatttttcttggaggaaggaaggagggaggaagaagagtattagggagagaggccgggcatggtggctcatacctgtaatcccagcactttgggaggccaaggcgggtggatcacttgagatcaggagtttgaggccagcatggcaaaacctcgtctctactaaaaatataaaaattagccagacatggtggtgggcacctgtaatcccagctactcaggaggctgaggcaggagaatcgcttgaacccaggagccaaaggttgcactaagccaagatggcgccactgcactccagcctgggagacagtgagactctgtctcaaaaagggttagggagagggtcagatcatgggggcattcccattccactacttctttggcttcctccttgcttttatttctccctcttttcccagagcaatgaacaaattataccaccccagcttcctcgggcctcatcttctaactgcaatgatttagtgagcacatgtttctaaatagttttcttcttaggaggacttctgttaccatctcctcttcatcttttatacatttaaacacatgccacatccttggggcagagctgcccatgttgacatctgggccacagcgaggacctgcctatccctggggaatggtggggctgctctgagtgaggggcttagcagcctggaggacaacccctcttggagaatccccctgattcccctgtaaaggcaagctgagccaggagtggggtgtggatgattctgtttgtgaatcctgggaagtacttgccttccccagcctgcagatatgacatttggatgatgggacccagtaacctatttgtgcagacttctatgctgactttctgatcaaaggaggagatgagaggtaggcagcttctatgacacatgggtgattccaggcatggaaaacatacgaaacctataacattaatgggaaggcgagtcaggtgaaaatgtgtatatgtgccccagatccagtagctgccatggaggaaaccaggacctcatgatcctggaggccacagtgaggggttggggccatggtgaggaacttagaggagcaggagatgctcacaccactggctacaaagtgactgagcctgtctgagacaccagaccaaaggtgtccaaactccttgctccccaaaaaaagattcatgtctcacccctctgccagaagagctgtttctcctactcagatgttcctcattccctcttgcaattttgaagttaaggagaagctgattcagctacaagtctggttgctcaggactatggcatatgttacaggtagtttgccctctttgagctacagttttccatttgcagacagggaagagctcataaaagaggttatgtggattcatgttttcactctgttttcttaaaagtacttgctttctttgcggggtgctgtggctcatgcctgtaatcctagcacttgggaggctgaggtaggcagatcgtttgaaccaggagttcaagactagcctgggcaacatgacgagaccctgcctccacacaaaaaaaatacaaaatacgaaaattagcctggtgtgggggcacacgcctgtagtcccagctactcagggggctgaagtgggagaatttcttgagccctggaggttgaggctacagtgagccgtgattgtgcagctgcactccagcctgggcaacagagccagacactgtcttgaaagagaaataaaagttgctttctgctcttcatgctgctgtgagtgatggaggaagtgacgagcagtctcctttcatcacagaaaaatggaacatcacaaaggaccagaaatatccccattgaacaacaaattatttgagggaaaagtggggcagaccactaaaagtcatccagcccaaactcctcctcatggagaaaggtatcttttccttgagcacctgttgggaatgtttcgtcccaacacctcattccaattgttggataactcatggctggaaagttctttctttcactgagccaaactgtctgaagctcacgctcctttggtgctgaactgcacttggcaatagcccagaatgatgactgttttgcagtttgacagccctcagtgatagggagctacccaccgcattatcccctgatctaggcttaacatcaagagttacttctcctcttctttgcatgaggtgggttttcagatgtcgtgcctttctggctctccacttctggatcaatgattctgttgccatcttaaaaagtcatggctaggctggacactatggcttatgcctgtaatccaagcactttgggaggccaaaacgggtggatcacttgaggacaggagttcgagaccagcctggccaacatggtgaaaccccatctctactaaaaaaaaaaaaaaaattaaccaagcatggtggcatgcgcctgtaatcccagctacttgggaggctgaggcaggagaatcacttgaatccaggaggcagaggttgcagtgagccgagatccacccacctcggcctcccaaaatgttgggattacaggaatgagccactgtacctggccattcttatgttagtttgctcaactgtcatcagaaagtaccacagactgggcagcttcaacaacggagatttattttctcccggtactggaggctggaagtccaacatcaaggtgtcagcagggctggtttcttctgaggcctctctatttggcttgcaaatgccatctgttgcctgtgtcctcacatggtcatccctctgtgtgtgtctgtgtcttaatctcctcctcttataaaggcaccagccatactggattagggcccaccctaatggtcccattataatcaccactttaaagaccccatctctaaatacagtcccattgtgaagtactgggggttaggacctcaacataggaattttgggggacacaattcagccagaacattctatcttagcatcatctagccaagctgactttacctagtctctgcaatcactatatttctacctctcatgcatttgaccccactacctcttgccttcctcccctgcttctctttcaaagctgctcttccaagaagctctcatgccaagcaggtgtccagtctgtttaaacacccacagagatggggagctccttctctctgaagcagcccattcttctggcttcaacagcatcataccctagcaatgtggacctggagaggcctcacgtttcacaaacccaaggtgcttttcaattcagataaaacaatctccagataagtaaaacgacctccagataaaatgagaactgagtaacatatgggaaaaaaacagaaatatccccaaagttgaaaaccagtgaaactggatgcctgaagtctgtccactctgagatactcttcttggggagcagctttaagccaaatctggcccttttcctgtgttacgaatactcaaatgtttctttgcttgtttccagccgtgcgggagtaccgtggtctctgccctgtttcctctgcatgacaggactctcctaaatttcacttgccaagacccctcggtcaaagtaaaattaacagaaccccctgttcttcccactctgctttccagctcttcccggcgtgcacacacacctcctggaactccagccttgtgcatcatcttgatgccgtcgcctagtaacgatatgcttagcaaccggtaagggaagtgcgatcgcacctcccagcactgtatgtgaagcactgcagacaatacaaacagttccctggttctctttgcagctagaggaaggtaattgtcagaggtggccagcattatgctccagagatagtggctcatcatccgggggcccaaattggttgttgcttggcttctacttggcattgggcaatatctttgtgggggcggctgggtaggtggttcttgaagggccggatctctctgcttgcacttgttgtcaggatgccagtgatgcaggctgggcagcttgcagaatcctctctactcccacgcagccctgccctgtaccaagccacatccccctgcatcccaagccattccccgctgcctcttccatttggaggctgttcttctatgccctggcactgcacaggcctccaccttgcagctgacctgtcctcccagtacccatgcctctgtctttccaacaccccatcaggcatgtttctccctcatcactatctctcacgttcctatgcatcccagcctcagaccactgggtctgatgccaaacagaggggactgaggcccacctcctgttctcttctggtgtccttattagaaattggatcattgtgacttaactaaagtttccaaggtgtcatgttgcactgagaaaacaacagagaaggccagagagtctagagtctaaaagtgtatttccaatcccagatccctttttctgtttgttttttggtcttaactgtatgacttaggtcaagtttctttaacctctttaagtcttaattttctagaggggttggaatatttgcctcacatggctaggatgacaattacataaggtacaaatagaaccccgtaataaaccacatggcatacagtcagagaacccgttaaatatcctcttcctgtccttccatctctgcctctttgttcttcctttcaaacttcaagctaaagccagttttggagttggattctcagaaggcagcacagtgcattggcaggaatgcggggcagggggtgaagacctcagctctgatcctgggccccacccccaacagccccgagattcctttcattcccctgtaaaatggagcgaagagcacctggcatgtctcatgcaaagagctgctataaaactcaaaggaaataatattcatcaatatcctgtacacattttgagatgttttacaaattttagaataattttctcggacaaacctggtctcatttttgcacctgtaaaatgaaatgagattccaacatgcctaaaacccccttaaatcctaatattgtgacaaactgagaggtgatggttgcttgcccttcaagggccaccctagacaggacagactccttcatcacaggcagtctttgtcctaaagttgtcaggatagattgcagcaatacttccactctctgttcacagggtccccttgaccaaggtggctggttatcacccggtcaagacttcagcccagtaacattctgcaggcttctcatcctagcatggaaatgtatataactctgttctttcagtaagcaaaacaaatgagtcagagcatactcaaagcatgataaaggtacggggaagcaatcgctagtgtaggtgtttgaagtttatgtcatggatacttccatggtggctgtgtatttagtagcagcctaaaagacagtggaatttgcaaatggaggatacattaagcaagaaatttaaaaaggcgtaacgtaagtcacagtaagtcaaacagcagagggacaaacaaatagaatttggatgttattgaaaccttgaaggttgggagtctggccatgagccagagacatttgcattctcttctgagagacttccccccaggcaattatagggtctccaaataacagagcatctcagcagataagataggagattcagagctctcaaagctctggatttgtctggaatatctatttcaataacctttggggagaggggtgcaaccccactcagggaccttgctgttatacattctccagtcccgtgacttcagggcaaagatcagtagagcctcccctcctgttaataagtgggggaactcctgcttcgtaataaagttgcaagaggtcggacataacacaagtgcgaactgttaaccccagttgtaactaactttttaaaagtataggtatttggggctgggcaaggtggctgatgcctgtaatcccagcactttgggaggcctaggcaggtcatcacctgaggttaggagttcaagaccactctggccaacatggtgaaaccccatctctactaaaaatacaaaaattagggtgttggtggcacatgcctgtaatcccagccacttgagaggctgaggcaggagaattgcttgaacccgggaggcaaaggttgcagtgagccgagatcacaccagtgcattccagcctgggggacagagaaagtctccgtctcaaaaaaaaaaaaaaaatatatatatatatatatatatatatatatatatatatatatatatatatacgcgcttggagcacgcacagtggtgcacacctgtagtctgtagtcccagctactcaggaggctaaggtgggaggatcacttgagcccagaagttccaggtagcaatgagctataattataccattgcactccagtctgggtgacagagcaagaccctgtctctaaaaatgaaatatatatatatttcacaaggagcagtgggatttaatctatgttcttcctggacccatagaatagaaagtcatggaatcaaagaatattaagccgataggaactgtaataatcacctggtccaatccctttaatcacgggtgagaaaatggtctccaagatgttagaagtgattaatctgggattgtagaaatgttccatttgcctttaaaataaaaatacaaaaataagaaagcataaaagtgacttacctaaggttccacagccacacagacaaagaatttgtctagaccctgaatctgttgacttccatccctctactggtcctaatggattccatctgaggctagaactgagtttccaaaaatatcctttaccaaaaaaaataaattaattaataaataaataaaagtgtactaatgcctccaactagtctttgcaatgtaaaactttccattttcaacatttcacaatctccaggataatttcatcaacattatcttttgaataaaacatagacttatctatggggaaacattacacctaaaatgtcagcagtcagcaaatctctcaaaagacacctggttatgtaggattaaaaccacccgttgaagggcaatgtgaaaatggaacctctgtttgactttcgtaacccacttcccacgtagcccatccactggagggaaagagaaactgctaatgggatggtaaaagcagtttgaatgccatcccccgcagaagctcctgtctacagcttttgttcccatggtctcttcaataaatatgactcaggctgctgtttgggcttcacttcctctgggcagggagctgacagcagcggctctgctgtgcccatcatggttgactcaggggacccacggcgggggggctgcctgtcctctccccagctgaccaaacacccttctgctcttccaagcgctgctgtccctgactcttctagctttcaaagttctcaccaattcataaggctggtggctccccatcaccccattactttttctaaagcagtgctgtgcacgtatcttgataagctgccaaagtgcttttttcacccacctactcacctatagaattcatagtctccagtgtaggcatgacgcatggaaggccaaggaaaggccaacatgtgttcctgcaaaaaacaaaagcaaaagacaggaaaagcctcccaaccatctcacctcttctaaatgcttgttggagcaagaccacaatctacttaacgtcttcaggggtggagggggggcggtcatctgggccagcctacacttgtaaacttctttttgctatagaatcagctatgaaaggagctttcacttatttggatacacattatttgatatggtttggctgtgtccccacccaaatctcatcttgaattctcatgtgttgtgggagggacccggtgggaggtaattgaatcatgtgggtaggtctttccaacactgttctcatgatggtgaatatgtcttgtgagatctgatggttttgaaaaacggaagtctccctgcacaagctctttttgcctgttgccatccatgtaagacgtgacttgctcctccttgccttctgccataattgtgaggcttccctagccatgtggaactgtaagttcaattaaacccctttcttttgtaaattgcccagtctcagttatgtctttatcagcagtgtgaaaatggactaatacattattattctaaactcaaggggatggattctagaacaagaactgtagcattttacataacaagaacagttacaaaggattgaataaagagtatgggggtctccttcacctaagccagcccaggctacagtcacctaaaggatacagagaagtggagaaccacattttcacgggactgctcatctagtcttgggattaaaggggattaattgcaaaaatatttagttagcaatccaaaaatatttagcgtccactacagaagagacccagaagatttacggtataagtttgccataagctacataccagttgggctgttaatgttgggggctgtgtttttctccaatactcaagggcagtagggagtggatggggagataccacatcaggctagtcagtcacccttggctttgggatggcactccttgtccaagaaagtgctgttttttgctaggacatctcagatgcagggtgcattgcttaccaatctgctgtgaaattttctcctccttgtcctttcttcatatgggataggaaaggcccagcttggcctaactatgccctcacacgctgatctgtgagtgtgagtaaacacagctcctaactcattcactcatgcatgctcgctctctctctaacacacacacacattgatcctgtggtcaccatagcacagccctgtatctacctagtaatggcagaccaagacagcacttgaacagatgaggcaactagggtagggctgttcccaggggaggctgttcaggaggcacgatttctactgctcagctgcatgaaggttaatagcctggagtgccaactccgtaaaccttatcagtcacttagacctgactatgggtggctctgtaagatatttcccaagagcaggggaaaaagagcctcagcagaaatgggcctgctattgaagatgaagcagggaaaggcaggtgtcacacccctgtttattgtcccagcactcttttagttgcagatgacagaaacccaaaagagaggattcaccttggctcacatacccaaattaagggaagattcaggaagcagctgaactcaggtgtggtgggaatcaggacctcatcccagaacctcagacatctctgtgtctgcccctctgcctctgcttctgtctctcacatctctggctgtcattacatgttggcttaattctttcagaacaacttgtgccaaaagaaaggaacttggtggctaatggtgtctgagctcccagccatagccctatcacccagagaaaagcccttttccccaagctaaagtaaaaatgccaaagaataactctgattagtttggctaagatcgtgtgtccatttctggactaacccccacagccaaaagggtggggtactgtgtttgcttcctcttgattaatgtgccccatcctgtggtccaggccaggacggggaggaagaggagatggtgttctgtgatgagccgtctccactagcacacaaggctggcctgggaggaggaacagtctcacaaagaaagccagtgaaattctcccaagcagggaaaggagacgttgcagacagatgaaacaattgaggtcacctgcaatctatgtgcaagcagtttttgatttgcggccggcaggtatgttgactgttgggaggactgttaaacttggaaaacaggaaaatagtgacatccgaagtgcttgaaaaatggcagcgtgtaattatagctgggaacaaaataaaactttgcagaaagaacaggtagtgagggtgtgaagtatatgtcaataaatcatttacataccgctgggctgtttgatgattgttattctatgaaggtaaatgagcttgccttccttgtctcattggcctgcttgtaggatctcaccaaccaatttgtgtgtttgctccttgttctgtctctcctgggctggaacccaatgtcaatattagggatggtcttccgacggaatcatccctgattttcaaggatgatatttttattatactgcttatgtctagagctgaaaaaccaccttgctcttcagtcttgagggaatgatgttcttacagtaaacgactctttttgattctgcctcttaactccccagactatactttgttcttattcaaaaggagcattagctctaatactctgctacaggctgtctaataacaacctcccaaagatgtccgcatcctaatcccagaacttgtgcgtgtgctaccttacatgccaaagagactttgcagatgcaattaagttaaggatagtggaatggggagattatcttggattatccggttggacctaatgttatcacaagggtccttttaagagagaggcaggaaggtcagagtaagagaaggcagtgcaacaacagaagcagaagtcagaaagagggagggaagagagagagaagagagacaagagagagattgtaaggcactatgctgctggttttgaagatggaggaaggaaccgcgagccaaataatgtagcctctaggagctggaaaagacaagaagaaggattctcccctagcaccccagaaagaagtcaaccctgctggcaccttggttttaggacttctgaccaccagaatggtaagataaattagtgttgttttaagccactaaattggtggtaatttgttacagcaatagtaggcaaccaatacagctacctttctggagagcaacttggcagcatgtactaagaaatatgagtgtattccttctgactcagtaattctagctctaggcttctctcctagtgaaataatcagatctgtagaaatacacttatatatttagaagtttgaggctacgcatggtggctcatgcctgtaatcccagcactttgggaggccgaggccagtgaatcacaaggtcaggagtttgagaccagcctggccaacatagtgaaaccctgtctctactaaaaatacaaacaattagctgggcatggtggcaggcacctgtaatctcagctacttgggaggctgaggcccgagaattgcttgaacccgggaggcagaggtagcagtgagccaagatcatgccattgtactccagcccaggagacagtgcaagactgtctcaaaaaaaaaaaaaaagttccagtattatctagaatactagaatagtaacaccttggagccgtctgagagccctactggtggctctatctctattataattataacactgttcaagtaagaaaacatggcccccttagtgatgacagtccctctctatgtggcttccagcaatgtgttatgatcgcaggttggggtggcctgtattaggaaaagactgtgatgacagctttgctgttgatctattgattcaacaaatgcttactgaccgtattgggccctgggccagagctgagggcaaagagtaaaggacatctatgggattgtaaggaagctgcaagagtctggccagggagatggttatcaacacagagacttcacagaatacttggtgttttacttaaaacttgaaggattgataagaatgaactgcagctgaaaagccaatgaattcatggaatgcagtatagatcctcactgctcacgaggaattctgaaggctctgatgaactgcagctgaaaagccagtgaattcatggaatgcagtatagatcctcactgctcaccaggaattctgaaggctctgcagcctgaagcaggactagccctcttgtcaaagagctgcagtcaatagcggaaaaacgtaaacaatgcaaatgtcctttaatgggagactagtatattcacaccatgaaatactactcagcaatgaaaatgaacaaactattgacacgggcaacgacctggatggatctcaagggtattatgctgaatgaagaaaatgttcatctcaaaaagtcacatactgtatgattccattgacatcacatcctttaagagatgaaactgtagagatggagagcaaactaggggttgtggagatgggtggtggcacgaatgtgtctaaaaggggtaacccaaagaagtcttttcacggtgatgaaacagttctgtatcttgactgtggtgatggtctcatgagtgtgttcacaggatgaaattgcatggaactacatacataccacacacacccacacatacgaatgaatccatgtaaaaaaaataatgaaaatgggatcaggtctgtagttcagtcacagtattatatgaatgtcagtttcctggttttgatattattattctacaaggtgttcccattaggggaagatgagtcaagggtactcaggactctatgtgctatttgtacaacttcctgtgagtctataattctttcaaaataaaaagtacaaaaaatactgacaaattaaaattcctctgacacttcttctgtctccaagaattttctcaccacttgtatggttccagagccacttcagttggtgtttaaatattaatccctcatggtcctcacatcatttccaggggtcttctcatgatcttgtaggatagggaggtaaccagcaactgacagcagaagagaatgggaaattcattttcttgcaaatctccagtgcagggggccaccccgtgcctgccatctcccttaaccgctatcaggagcatcatttcccaaccaccagctttgaaggaaattgggtctcttgttgtgaaactgggctttcttctctctcctttgtcaactctgaatgagagaggggaaatgggtcaggttagagagaggagatgccttttttgaagaggagatctgagtgagataaagatatagatagccaagagtaagtgagataacagagtaggtgctctggcataatagaaaatgcacaggcttggaattacagctgcattcattcattcatctgatatttatcaagtgcctaatctgtgccaggcatagttttacatgctagggatatggagtgaaaatatggtccctagcctcatggagattatgtcagatgactgcaatttagactctatagctccccagtcatgtgacctctgaaaagtcacttaatatctttgaagctcggtttctactctgtaaattggggttactagtagtaattggggtaaccaagccaacctcattggatttctatggggttgcataagaaggtttacttagttcttagcacaatgtcttaaacatagtagacgttccctttttctcattagttctcttcatcctcactctttgctcccctccttggtagattggttagaaccatctaaattcccccagggcagcacagggctgtggatatagctctgcactgtaggttcagctgagttaagccatcctcagttgagttgactgctacacagttttgtagcactcaggccaaatgaaaccatgaagaagaaaagaagcaatactttttgcatttctgtccatttttgctttatatttttaattgtctgtgttttggtgcatataagcttatgattgtaacttcttggcaaatttttcctttttaacatgattcctcataatcatatttttaatgtttttcttcaaatcttatttgctattttatatatcaatatcaactttcacttagtaactggtttatatttttctgtctctttatttttaacttttgatgtcttaatgtttttaggtttgcttcttgtaaactacagatagctggatttttaaaaaattaagtctaagtgtctttgtcttttaacaggcaatttaagcttctttatttattaagacttctaatatatttagtatatgtatactacattattttgtttgccatgcttcatctttgccttttctcacctcttgcctttcactgtattgattatgtgtttattattttctcctcttgtagcctattggtttagaagttatatattaggtttctattattttaatggaaaaataggttaaaaataaaacctaataataggtttctattattttaattttttaacacatacttgaatttaaggtctaacattaatcaatatcattatcctccttaccaaattggaaggattttatggcactttgactctaatctttctcttctcatgtcccaaactgttgtccactggtattatagtattatcttcttttcaacatctcccctccccattttagccattaggattattatcttggactttgcataccttcttttttttctatttagatattgcaaatatatatatttttgaaacatacatagtcttgctctgtcacccaggctggagtgcagtggcgcgatctcagctcactgaaacctccacctcccaggttcaagtaattctcctgccacagcctcccgagtagctggactacaggcatgcaccacaatgcctggttaattttttgtatttttagtagagaaggggtttcaccatattggccaggctggtctcaaactcctgacctcaagcgatctgcctgcctcagcctcccaaagtgctgggattacaggcgtgagccactgcacctggccttgcaaatatactttttattgtcttaagttattccatttacttcagttcttgattttctaatctataacgtgcatctgctgcccctttctcaaggtgggttgcttggttgtatggatcgtcactgtgaattggggcaggaggagcagggtatttatgtgtttttgcttatggaaatgcactccagagttctgctttttcctctgcttgaatcacttgtcaccatctctggatttgtttttattttaattacttggattagaattcccactgcatgtaagtagaatgacacaggttttgggttttaccttctctctttctttctctctccctatctttctttctttctttcctgggacccagacagaggtcaagcttcttcatgcccagggctggtgaacagtgtttctagtgcccaccttgtagtcaggatggtatttgttgagttaatccctgcctcacaagggtctggagcctgaagacatcaccctgcacaaacgttaaacccccggccccagctcctgggccaacatcctctgatacccaggtggcctccatagctttagtgcccacacactgctttagatttttccggatatttctgacacctgagaatttcttctttaccactcggatgtgattaagatgtctttgttatggtttattcagcatgccatgcatatgaagggggaagggcccagtcgacattaggtctgtctattacaggactgaaaaatcatacatccccatgttctcacattggcaaaagctcactttcatttattcagtcaacaaatgtcactgagtcaactagaatctaggtctagggtgacgcataaagagacacagtcctccctgagctcccagaacttaacacccagaatgggagatgggctggaatcagacagcccaaggaatccatgcgcgatgccggcaagcgccgcagagaaggaaagtcatgctgatgctgatgggagacggctgatgctcagaggaggcctggcctgggcaggggtcagggagggatagagacagggagctgtcacagaggccagaggacagcccaagagcattcagtgtttctggtgcccttcctccttccaggtccctccctccttccagccccgttcctccaccatggaagccaatgtgacttgtgagctagctggctcctgaaccggtggcagaaccccatggcgatgcaatcataaaggggtgggggtgggtgagagggcaggatttcctggggtacgatgccccaatacactgtgaactaccaaatgacacgtatattctgtgaactttcaaaaaaggatgtgaaagacttctgtgcaaacatttcacctgggatcttttcactagcaagatggggagaaaaagccaaaactgcatttctctcgccctctgggtctagatgtggggatttcttctccttccagatgacagccaggaagggcccccaattattctcgaaataaaacgtgtcggtctttcgaaatggtcagtggggtgatgtctgggtcccaggaaagaaagaaacataggatttgtgctttttgttgatatgaagttaaggggtacaagtgagagtgattttgttacatgggatacattgcatagtagtaaagtctgggcttgtagtgcaaccatcacccgaatactgtttattgtacccattaaataatttcctatccctcacccccttcccaccctcctgagtctccaatgtctattattccacactctatgtccatatgtacaaattatttagctccagatttagctttttatttcttttttgtttcctttttgtttgtttatttgatatagggtcttgctctgttgcccaggctggagtgcagtggtgcaatcatagctcactacagcctcgaactcctgggctcaggtgatcctcccatcttagcctcccgagtagctgggaccacaggcatgcaccaccatgcctggctaattttttattttactttttgtacagatgggggtctcactttgttgctccagctgttcttgaactcctggcctcaagcgatgctcccactttagcctcccaaagtgctgggattacaggcatgagccaccgcagccggcctggatttggctctttaaaggaaagagcgagccctggactgggcagggtgggaaaatggccccagctctccctctgacttcagggagggaccttggatagggggcttatgggctccaggcaccttctctgtaaaattaggtcatactaagggagctggagggcccttctctttctggtatcccaggtggtctccccaggggtggtggttgtggctgaggcccactgcctgcttttctggtgctctcaatgaagtacagtcctggggtcctctgtatgtggatggactaggctgtgaagtctatccgcccccctgctccgctccacacccacacactgctcttcactgataaccccgatgatgcagacagcctccctcaggaatttttctcatcctcctagtcatcatttcagtcagccctgccccgtgtgccagacaagcacactctatgtgttcaaaggtgatgcaccgatcgtgccctgtctgatgtttactaaccaacctgactgggtctgtgggtgacaagggcaggccctgtttcccttggatcttccttttatggacacaaatcgctgacctgtctgggcaggcctgctctaatccaggtctggccctgagcctcctgtcattttgctgacccagttcatcatcctggaggcagggcttgagttgaaaagttagagcctcagggcagcaccaggagcctgcactttccggggcctccccttctctctcccctaggctgacctgtcctcccctctccacttcctgggcgtgactcacaggcaggccctatcggcatggcaggtatgtgtcatttccttatgctggtgagacccagagtttcagtgttagcacccccacactgtggctcttctagcccaatggagaagggctaagggtttctaaagtcgttgacctagggatttactgttgggatgaatttctcacctaggggaggtgttctgtttttgctgagagatgactgtggggagcagggttctctgctcctctgacactactcatcctccttcccaacacctgtgggcctttagcaaagcaacaccccacccccaccttcaccctgaccccagcagtgttttctttccccccaccaagacttccttggggccctctggccttgccaaaccccctttgtagcagcctccccttccagcagtgacaggagggacccagcctcgggagcctgtctctgagagacagatgcaggcaaagagccgttaccatgcaaaatctagaactgttcccacgtgaaatctagaacttctcccacacgaaatctagaactgctcccacacgaaatctagaactgctcccatgcgaaatctagaaccactcccatgcgaaatcttgaaccgctgggtggaaatgaggttcagtaggtgcggcagtgtcacctctctggagcatcttcccaagtctttatgacaaacagggataccctcatggccagagtcagctgggaatttttgtggaagcagctccttggatagcatcactcctgttctcgtcatggtggaaaatgactaaaaactcaggatatcccactggccctgggcaaattccctcattggagtagggactaggacaagggccagcccatcctgtcaggccagagcacttctgtggtcttcagcccagttctgagggcccctcttgaaccagcttttgggaagctttgagggagagaggggagccagagaggacgtctcgtgagaagtgtttggaggaactgaggcaggtccagggaaggcctgggagagcagaggagctgttttccactagtgaaaggtcaggaggtggaagtgagatgggttttgttctgtgcatctccatgagcaggcccaggaagttacagaaaagtagatttgggatgaatataaaggaaggttttttaataattagagctccgagcaatgggacaggttgcagaaatgttgagagagtgagtttctcatcactagaagaattcaagcaggaagtgggcaagagggagtgcccgcatggtctgggatgcagggaatggactctgactgctcttgctgctctgagcctcttgattctgatttgggtctacccctgcccttcttgcaagtcctcctttttctcatcatggacctcctccccggagccaggcagaggctcaggggctctcccatgtcctgtctgagtaggctgcatgatgactattgattggctgaagccccagaaatacctgccatgtgctgggctgtgacagtcacttggcgttcctgggacatgttcatgtgaattctcaccggtggcttcacccacccccagtcctgtgggccacgattactctcccacgtgctggagatgaggaagtgaggaaatacccagggcgctgcagggctaagattagactagggcccggccgcctgtcttgacacatgcgcacaagcagctcccccaagttaagagcctgtgtatcagctgagtcccagggcctggggctctccacacactctacatacaaacacctggcaaggagtcctcacaacagcgctgaaacagctgcatcagcgtcccgttttacagagaaagaagccagggttcaggatagttggaaataagtctgtgcatgactagcaagggatagagctgtggcttgtgctcagctttgccctctgtgccactgactgccaccagaggctgtaagctgccttccatgcgatgcacctcaggcagctcagagaatgcacctcaggggcttcagccagggcagttcgtttccatactcctgggtgaatgatggcctcctccaagaattccaggtcctatgctaaatacaactgggaaagaagtgcgtaacgcattatttccagcttaccagaaacctggagccccaaagggtaaacatagcacatttacaataagccagatgtgctgaaaagggaacagcagccgtgaagaaaagcttcctgacggaggtgaaacttgaggtgggctttaccaagaggagtcttagataggcagagatatggaggtgtgaggcggggagacattcgctcagtactgcagggactgaacagaattttgccatgaattcttgagctacagttaagcaagcattattgactttcccactttgtctacctgcatatgagtgatcccagaaccttccagccccaccttctcatcctgacttgatgagtggcctcactgacgtccaattgacgggagaagattgtaggcaatattcgcttttcttctaactggctgtcaattcctgtggattccaccttgggacatcttccttcatctactcctttttcctcattatcgcccccatcttgagtaagacactacttcttgccaaaatcaatgcatttgtcactcgattgctgccccagggtttcttcctgcaaatctgtcctatgcatacctgtgggtagtcacctctgtaaaccttgacacttctgatgacatcttcagcaagcctcaggctttcctgcagttttgctcatatacattctaagtttttctgatagctttcaacccacgtcttcttgtttgcaaacctatccagcctggaaggtccaactcatatcctgcctttcccatgagatgaaattaactttcttcacccatgctgctccccagacataatttcatgtccccttcgcttgcgctaaccacactgtgctgcgtggtattatttgatggcgatatctgtctccccaacttggctgtaagtccctggatcactacttactccttttgtactctctctcgtctgccaacctggtgggtactcaaaggtgtttgttgaattgattgtagtcacaattcccgcagttcatccctagcccgagggaaggcaggagacccatgacaccttaatcttggcctctttctttggaaaaagaaagagtttagcaagacagggacctgcctaagccttggtttctttcctctgcaatatggcaaagtcctgtatgtttctttgagagacagtgtggtgtactggtaaaggaaataggaaacagatctgccatttcctacctctgtggcactgagagagttcctttaatctcctatgcctcagtttccccatatgtaacatggtagaagaatgataataccaacttcgttttgcggattaaatgagttaacatttgtcaccactcattaaaaataccccaaagatatttattattttaaggttattatgagtagtagcctgtgctccctcctagagggcaaaatgcacaaccttaaagctaggagggcctgagatgaccctggtgatggggactgtcccagccagacattgctggtaatttgccttcctttcaagggctgtaaaactgctcctcagttatgaaatgaaccaattaaggacttcggacttagccagtcctgacagaagcatttcaaacagaaccactaatcatacctgatgtttttattgttttctgttgacactgccccagaaacatgaggcttctggcagccagccctggcacacctgcctcatctcttcatgacaccatgtttcaaagaagcttccttgtcaaataggagaaggacccacctgtgctacttcctgtgattgacaggaagttctgaaacccaaagaagcaaatcatggctcttgggtcttggggtggcacaagtcactagaaaatctcactccattgctgatcctagaattagttcaggctccctgaggacagatccaccccagtacctcccaccccttccatctcttcatcccccagggggaggctgtctacttcttttggggctttggactaatccccccagttcccatcttctgaggttttgtgctaatcttgtttgtctcctatgtgtacaaagcaatcacccaggcgacatccagcttctagatttgggtgcccagggttcatgtggtgccatgttggcctttgcctaattaattttaggaagtctttccaccagccagatcatggtcttccaaaaatcctatggagtcagttctaggcagaagctgagcaggcatctgggcatggcaacaacttctagcctcttcctcttaccacttggcgtctagctcccaggcaggtatttcctgagccagggttcctgtgcaggtcagtctttacaatatgcaaatttcttgtgacccagcccatttccccccgagggaggcaggaagtcccttttgaaatttctgagcacacacaacagaggctaggagaggaccagctctgagactcccactcaagcatgtcaaggggtgtttgtggctgtgtggctgtgtgtggagagcagagggcaatgctgggctggggcaggggagggtgcagaggagagggtgtgggggagggaggagctgcagcctcagacacagaattggactgagaaaacaggatgcagcagaggaggaggctgagtgtggtggctcggctggcactggaatgctcaatgtgaggaggtagaaggtgcctgagaccagggtctctggagttctagaaaagcctgggcctcttccatgtttggagtctctctggattaagaaagaagaagaagagacagaaatagccaaataggacagcaaacattatgatgttgtttaaatgtttactttcaccaattaatagttttaaacacacacgcacacatgccacacacacactgactacatgaatggactcatttggaaataatgtcaagggctctttgtcctgtgaggcctgggcccagtggccatcctggttttgggagcagctctgcctgagagaccctcctgtgggcatggtggcagctggagggtgttctgggctgttgaacaaaaagtccagaaagtccatctggactggtcctgctggggatggtgagggactgaacagcccaggtgcggggtgtctgggcttgcccacctgtccatgtttagccaagtgtccatttcaacaaggaggaaggtgacaggcccccaggacgatggcctctctcctcagtcaccccaggtcagtccccagcaaatgcagtggggccttgatggggaaagtcctttcagggtttgtatcaatttctttgcattgttgtagcagaatatcagaggctgggtaattcataaagaaaagaggcttaattggctcatggttctgcaggctgtgcaagcatggcaccaacatcagcttggcttctggtgaggcctcaggaagcttccaatcatggcagaagggaagaggagctggcatctcaaatggcaagatagaagcaggggaggtgccagcctcctttttaaacaatcagatctcacatgaactcattaaactcattacatggggaaggcaccatgccattcataaaggatccaccacatgacccaaacacctcccaccaggccccacctcccacactgggaatcacatttcaacataaaattggagggaacaaacatctaaaccgtatcagggtctctgattccacaagagccaggggacaaagcaggccccacggaatagggtgctgtggagtcaggcccaggctggcctgctttggggatgggatgggcctctgtgggcccaaacccatgctgcccttgttagcagacgccagatggcctaggaccgtcctttctctctgccatggagtgagtgcgggacggacgggtggctcctgttagagctgatgcttacatgggtgagggaggggaacggctatgtccccaaatatcctgctctctttgctttccttccactgacaaggactccctccttgaccgaaccttaggcaggctcctctgagccctctttttggctcccccaccctgctccttggcctgctaagctccagaaagtccagcaagaactaccccctcaccccctaccccgccaccatcactacctcaccaaattccccttggtattcatccctccactgactccctcaccttgcccactggctgtgaatccccagctgttccccttgtggtaggaattgagttcaatctccctcccctattggaatagtcttggccctattgcaataaactggaaacaaggcttcctgcctgattaacttcacctggtgtgattttgctcctgcttacatgtgcaatcacacacaagctcttaacacagacacttagcaaaccctctggttccatcccattatctcattgtctcttctgctcccagcaacattgcttgaaaagggtattcaggtccagggagaaggaagccacctgtcccacttggccatggagcttctgtccaggaacactgaccactcttgctggggcctggagtgacggcagggccacactctgctctgtcatgtgcctgccctgggccccggagaccctggaaagaagaactagggctgccttgggctaggaaggaggaagcaggggtgggcagggcggaagtggaaagagatccaggagtgtctcccctctcaggacctctctcactccagcccttgtgaagggctgttctaaccttgttccctcagcagcagtctctgtcatcagaggcatttctcagcatctctattttggagctgcagctggttgcttctcagaataaacagagctgtgatattatgttgaaagcagaatggaataacatctcttccttatgccctccctcttccccatgttttccaacctccacttccctcttcttaaaggccttgccctaagacctcttcctccacaccccctgccctacagcttaccttctaccctcttataatcacaggatcccttcactggcatgtagggggacctgagatgaccaggccctgtgctgggcctgggggatccaggggtttctatctgcaaagaacccaatgccaagtgacacaggagttcatgtattaagaacttaaggcttagtgtggtgactcacgcctataattccagcactttgggaggccgaggagggtggatcacctgagatcaggagttcgagaccagcctggccaacatggtaaaaccccatctctactaaaaatacaaaaattagccaggcgtggtggtgggtgccttttgtcccagctactggggaggctgaggcaggagaactgcttgaatccaagaggcagaggctgcagtgagccgagatcgtgccactgtacttcagcctgggtgacagagtgagactccatctcaaaaacaaaagaacttaagtcaaggctgagtgtggtagctcatgcccgtaatcccagcactttgagaggccaaggcaggtggatcacctgagggcaggagtttgagaccagcctggccaacatggcaaaaccccctctctactaaaaatatagaaaaactagcaaagcatggtggcatgtgcctgtaatcccagctactcggaaggctgaggcaggagaatagcttgagctcaggaggcggaggttgcagtgagctgagatcacaccactgcactccagcctgggtgacagagtgagactccatctcaaaaaagaaagaaagaacttaagtcagagattatcagagctggtccagcattctgcttcaatgaggcaactgaggtctccattgaagatgtgttgggctcagggtctcagagctcttgggagttcaggtaggagccataacactctgtgcagttttcctcgtacctggctatatcattatcagaacagctgtgttgtattgaaatcagtgaaagggagctcgatgctgcaagagacagagaaatcagaccattgtttgtcttggacaaagcagatgtgcactacccagtggatttatggactgagatggcttctaggaagaacagggcaatcagagatgctttccggataccagagggtgggaaggtttaatcattaaggagcaaatgaagagacatgtatatgtggccacattcaagaccacgttattagcttactcttttgtaaaccagtaagtctgacagtgtgtgaaggcccaggcatatcactcacctcctctgtggtctatccagagcccttccgttacggccttcatcctttccctctcttgtcccttacctgtggttggtatgatttcccttttgtaaaatatgcctaactccactcaccacccatcctctatctgctgatctgctgtgtagcttcatccacatgagactcaagagcaatgcagaatgcaaggacagggagttcctggaaactgggtatgttgcctcacgaccttctacccaggcccaagtgtggtcagcctcatcttgctccgtggtctcacttctcagcctgtgcatcagacctttttccccctgttacctgaaagcaactctatgatgaaaagaggatgatctgagacttcagtgggtttcctctcttggttttctcttatttttaaagagaaaactgtggtgagactctcaagttagtctttttagtttatttttatttttttttgaggcagagttgcccaggctggagagcagtggtgcagtctcggcttactgcagcctctgcctcctgggttcaaatgatccttccacctcagcctcccaagaagatggggctacaggtgctcgccaccacacctagctaatttttatatttttagtagagaccaggttttgctatgttggccagttggtctcaaactcctggcctcaagtgatacacccgcctcagcctcccaaacgctgggattacaggcatgagccaacacatctggccccaagttagtctttataagccccagtggaatgtccaggagtaaagctgtcagcctgggggtagcttgggcttgctgagcattgagggagctacacagagggcattcttgccggctgagagagttgtgttgtgaatgccaaggtcggcggctggaggtgggcctggttcttccatgcacactgggaatgggcatagcgtgaagaatgtgagttttgaactcaagggacttggaggtatgtctcagctctaccatttcttagctctgttaccttgggctggttatttattgttcttgagattccattttctcatctgtaatatgggaatataaacagaatctatttttattatttatatatatatatatattttgagacagagtctcactctgtcatccaggctggagtgcagtggcacagtcttggctcactgcaacctccgccctctgagttcaagcaattctcctgcctcggcatcccaagtagctggtattacaggcatgcaccaccatgccctgctaatttttgtatttttagtagagataggatttcaccatgttggccaggctggtctcgaactcctgacctcaggtggtctgcctaccttggcccttcaaagtgctgagatttcaggcattagccaccatgcctggccaacagaatctattttaaagaagagttcacttcctgatttcaggagtaatctactgagcacctcgtgtgtgccaggcaccgatccaggcagaggcgcatggcctgggaagtaccaatatgacgcttgagctagggacactcatatgttctgcaaggggaacagggtgttatgtggattgcataagaaagcatatatgcattgcttaaccccatgcctgatacatacaaagcacttgataaacagtagttgctattgtgactatattcaacactagaaatatgatataaatgtggtcagtgagccagaagaggagtttcatttgataaaatcttcagtttcttcctcaaaggcgtaactgtcttttaattaaagggagtgtattagtccaagttccccagagaaacagaacagacaagatgtagagatgtctataaagagatttattataaggaattggcacacaggagtatggagactggctagtcccaagatctgcagtcggcaggctcaagacccaggaagagttaatgtttcagtttgattctgaaggcaagaagaagctggtgtcccagttggagggtcctcaggcaggaggaattccttcttactcagcaggggggtcagccttttgttctatttaggcctttaactgattgtatgaggcccattctcgttagggaggtcgatccactttactcagtctaccaactcaaaagctaatctcatgcaaaagcaccctgacagactcacccagaataatgttcaaccaaatatctgggtactccatagcccagtcaagttgatacagaaaattaaccatgacagggagcaatggccagaggacatcatagttgagatagcctagaggagagctgaggacacctgggctgtgctggcaaccaccctgttctggagggaagggtaaccctagctgaggttgggacagaggatgcaaactagtggtcctggaacttgatccagtccaaagatgtgtttttgttagcttatactgttttgcaaatctgcactagcatttaaagattagagagttcatatacaaagtctaaatttccacatagacatttccaaagtctatgtggccacttcaagtcttctcttgaaagactagaagtggccacatagaggtcaagcatccattctcataaggcaagcatcagctgaacccaagccacagctgcccccttagcccagatacccactggcctatcggcttaggctccaccagccatgcctgatgggcttcactcatgcaagttaccactgctgctgcttttggagaaaagacacccaggcctaaacatcagggtcctgcccctgccacagtggggagcccatggcagcagcatgctgtgttctctctgtgggagcacagcagggaggcagcatgagtctgtgttcaaagcacacatcagacatcttactccctagtccccacacagacttctccaacaagctgctgtctaaagtgttctccctgaccagagtcttcacatagttctttgcctggggaggggacttgggtagtggtgggaaaactcttccccctccaactagaaagtagctaaacaactggagagaattggccttgggcaagcagctaggagaggacccgttgctcctccctgcctctatattgtgtaagtttatcccgacatttaaaacttagagctgggtgtggtggcacacacctatagttctagctgcttggggggctgaggcaggagaatcacttgaggccagaagttggaggttacaatgagctatgatcacactactgcactctagcctgggtgacacagcaagactctgtttctaaaataaattttttttaaaaaaaattggagatttcacattaaaactctcatgaaaaaccagcagtggtcatatggaggtcaggcatcttttcagggcagggtgtcttctccttctggtttaaagcaggagaggccctgagagaagagccttgggatgggatcttctagagccacagaatagtgaaaaatacgcctcttgaacaggaggtgtttggtgggagaagaaaagcctctagggaacccagagctgctgcttgtaaaaagctgaagagacattgcaaggaggagggatcgaaccaaccctgcatgtccccagagggcagaagtccaagcagagaccaaagcagtgagaaagcaggcttgcagtgagtataatgtaggctttaccaccaaggagagctccttggaagtgggaacgctgatacataggtggtaaatcctgaggctgaggggcagcaggggctgcacattggggcttctaagtctttttcatgtgcagtgcacatagacaatagaagtatttgcagggcacacaaagtagactggcagggatttgaaaccccaaaggggactgcatttaagcctaaaggttcaaaccatgagtggcctgttttgaggatacttgggatctgttttaatccagtatggtaggacatgcagatgcagagatgactgtcatgaaggaagaagttcgcattcacagacccctcacaacaggagtcccagcacaccacatagggccccgtggggcagcacaggtgggtcaggaggcagagagagtaagaaaaaatgtaagcaggagcatttattgtgatttctgtgggaaggaacatgaaacagcatagcaggtttaggattggctcacgtgaataatttcagcaggctctgggctctcacataggcactgtccccagttacctggtacctactctggggtgattaggacagttggatagtggcctccagtgtgagtgtgacaggaggcagttgcgagtgtgggctctggatgggttggtttgcatatatgaaaggcagctgtcagaaactggctggctctgggagaagcagtccctccagggtcagtggggccccatgtcaaagcatcaaatgtagaaaccagaaaacgtggttattacaaagcctggcccacatgcccttgagagctgaggggatcagtttgcccaagtgcaccagatgcaaagcactgcactatgtgatgtctgcaattcctttcagccttgagatgctgtaaatctaatagcatagtgagctggaaatgacttgggagttcagccttatcttctctttgaacagaagggacctgagtccaaagagctgaaccaacttgattagtctcatgatggattataaagtggggactggaactcaaggctttcccaccatcctgtgaggctggaaggggctgatgggagtggcatgacatcttcatccatgtgatctcacaatcatgaggaggacatgggctcaggagtgccaaggctgcagcatagggagtttctggggcagaaggaagatgtgggcagtagcacagtccctgccagaccagtgaggccctcctgagtccccttaccctgtccttgacatgtagggaactcagagcctaaggtcttagggccaggatgtagcctgggatgaggagacctcaatctggtctcagctttgccctgaaccaagtgtctgacttgggcagttgagttttcctctctggtatcacccttcccagtggtcatccagtcatttccaaagcatgccatcatcatttctgttcaaataaagatccctttgccccacccactagttctgacctgtagatccagggcagaacatatgtgtttccctcgaggaacatccaggtcctagaatccaccagacccttccagtgttaaatcctacagtgctctcattgactgcctcctggtcataagctactaggtagtgaagggctgagaaccagaccccacgtctcctgcctccgggggccgtgttctttccctgtcccatgtgcctctccccgagtgggcacctccctcctccccagttatgcacgggtgcccccagctatatagaagcgtgccatgtccacttatgtctggtttagtattctgcctgtacgacctgtttgttctcagaagagccgtgggctgcactggtgagcagggtaccctgtgttctggagccttcattcccctcaccaggcacacggccatgcaattaggcacttgacacatgatgccaatgttgacagccgagaatagaacccaagagtgggaggttagtctgctcagccgtgctgtgggatgaagaggtttgtggttgccacctcagcttgaggctgagcagagaccagagctcagagtggacgaagcatcagacaggagccccaggtgtgggctgtaaagccatgggagagagtccaggggtgcttgaccttcaaagcccattcaggtctaaagtcctcagaacccaagacctagacccagacaacagggagctgtagagtgggttcaggccaggccaatctgggcaggaccaataggcttggctgcccccaccccaactagtgccattggccgttctgggagggagcagtctttggagacttctggtgatcatcactggtgtcagcagatcttgtccaaattgattcctgtgggcttcttgaggttgggactaaaatgtgtctgagcagcaggtgggcctggactggaatgatcttgaaccacacaaaccctcatgtttctttttgtcagaggcatgtgaaccagagcaactccatcttaaacaggagctaggtaaaatgaggctgagacctattgtgttgcattcccagatgatgaaggcattctaagtcacagggtgagataggaagtcagcacaagatacaggtcataaagaccttgctgataaaacaggttacagtaaagaagccggccaaaacctaccaaaatcaagatggcgatgagagtgtcctctggtcatcctcactgctacactcccaccagtgccacgacagtttacaaatgccatagaaatgtcaggaaattaccctgatctaaaatttctggtctaaaaaggggaggcatgaataatccaccctttgtttagcatgtcatcaagaaataactataaaaatgggcaaacagcagccttcaagactgctgtgtctatggagtagccattctcttattcctttactttcttaataaacttgctttcactttatggactcaccctcaattctttcttgtgtgagattcaagaaacttctcttggggtctggatcgggacccctttcctataacattttcactcctgcgtttagaaccagagactcgctgtgcaaagtgggagtgaggagggtgcaacttgtgtctcacagctccagaggcagagctgccccctgcgggtaaaaggtgtagaaaaactcctttaacatatcctaggaaagacctctttggtactgaaaaccaaccagaaatggaatagataggttgtttttgccaaaaggggcgcctgtcattgaaatatgcagatgcttgaaggaaccagaggaacttgggtgatctgtgatcacggccaacactcagtgttgggtatgtgtagtttaccacgtacatgatggatattatttttactcatgttcacaacagttctgggaaagatagtgctaacatgcccaattttatgggcacgtacactgagattcagggaggtaacaggatttgtcccagatgattagactgggccatgacagagctccagaaatgtgcttgtttcatgccagtgtgataagaactttgcacacctggcatccttctttggctgccatggggaggtcttagttctagtcctgattctgtctccagctgagtgtggtcttaaccctttctgagccagtgtctccttcctgtaaaggggccagggccacctccggaggcaggagagaagacaaagagctagtacactgtgagctctctgtcacatgcactgcctgtgtcacgggagggtatttttactgaagggcgccattacattaaaatggagactccatttctaaacaggtgggcacattatctctagctggaaggagcctcccccaagagcacagttcacaggtaaagattaggaggtgttgagtgcaggtggagaaggttctggaaaatgtaaacctcctcccctacttaacactattcctggcatcacctgcatagtcagtcctcaagggattacttgaaagctagcacaccccagggcatttactttggggaagggaacatccctacctttggttccctcacttgtaaaaacgagggaagtaaaaacaaattatctgacattccctttagctttggttcctgccattggtgagtttacaatcttagttgttacttttctcttttatcaatatctccttctatctttttctttctttctgcttttctctccctcaccttttcttccctccactgtctcatatctccctcaacaaccaaggtctctccttgtagctaacgagtttagctcccagaattatagaccaagacaatgatcctggaagcatcaaatctagtccaggggctttagcccagaccttaaggaatcttgggctatggtgagggattcaggggggttctgcaaatatggaagtattttcagccaaacaatgaagaaataaaccacttcaggagctgaacgatcactttaaacagtatgaaatattcatatgcaagactgttggaagaacgtccctctcacctaatcccctcacctaatcccctcactttttagatgagaaaagctgaggtcagatagataaggtgatgtctccaagttatccgagtgttgctctggggtttaagttgcacatgattcaagagtataaaatcttacagcttatctgtgtgtgtgtgtgtgtgtgtgtgtgtgtgtgtgtgtgtgtgtgtgtgtacacaaggcaatcagaatattctgtcaatagaagcagaaaagtagaacttggttccttctggggctcctgaaaactggggtgtagacataacccccacactctactcccacctgcttcatcttatcccccaccccaagtggagctaggggagagcagcacacagttcccctcctcactggctgtctcctccctgctgcctcttgtctgtggtgaggctgtggagaagtgggttgctgttcttttttctgacttcctgtgtgcttcagaaacctcaatgaacaaagagctaaaggaagaaagggccccggcaccgttatgccaaacatagactcacatccgacacgggggagctggatgcccgatttttatagagatgaaacccaggattcaggattctgactgccctgttcccaacgtggctgcatggggaatgtcagtgcttgggagctggaagtaggtcgcaggcttctcattcttttcaggcttaggtctaatgtatttaaagaggtagccgaagtgagtctttagatgtatcatggaaatcaaaccaacattaaaagggaacatttaatttcctctctgcaaccactgttttttgtttgcttttggagacagggtctcattctgtcgcccaggctggagtgcaatggcacagtcatagctcactgagctttgaactcctaggccacctcacccacctgggtagctgggactacaggcacatgccaccatgccggggtctttttaaaaattttttgtagagataggagtcttgcctgtggcccaggctggtctcaaacttctgggctcaagtgatctacctacctcggcctcccaaagtgctaggattacaggcgtgagccaccacacccagcctaccacagctgttttaatttctctgttttccttcagtgtacaactcagctgtaaccataggagcacatttccatagataatttgcatataatctctggaatcttcatattcccttaattgaatatgcctaagtagtctcctcattacttaccttttagcacatgcaagttaatttacgagtgagtctctccatccaggtgagaacagcatcgcagggaaaaatctgtgcattttatttttgagatggtatctaaaaaaactggactgcaatggcgtgatcttggctcactgcaacctctgcctcctgggctcaagcgattctcccacctcagcctcttgagtaactgggattataggctcccgtcaccatgcccagctaatttttttgtattttagtagagacggggtttcaccatgttgcccagggtggtttcgaactcctgagttcaggcaatctgcccgccttggcatcccaaagtgctgggattacaggcatgagccactgcacctggccctgtgcttttttgatgttgtttttgttattgttgtttattattgtttggacgacacattgctgagctttctgtccataagctcctattctcagggacttgctactcacatcatgatccacaggagactctcggggtcacgtctttctctgcccagccctggcttcctggtgctgtgttcatgtctgattttggatccctgagacctttttctcctacctttcttctgaaaggatagcagtcattttgtgaccttgctcaggaaattttcagctgggttttccctttgtattttatttgatgtttttcaccagggaggaaaactcctgctaccatgtgagttgtgccaggggagacttgccagagaagagctgcctgcagggggatttctcgctaccacatgcagggtttccctactttggaagcctcgtggctggaattttaaaggccaaagttcccccaaattttctgaacgctgaatgattgaaaacacctattttttttttctctttttacccaagcgccttttttcccaataaagggcttgggtaacgacaagaaactaaaactgaaaccacaactctgctctaaaataagagactcagagacacccaggaagggcctgcctttgagacttgtcactccctgagatccatcgtggcaccaaatgtttgccgagctccgccctgggagggaggcctgcagcctgggaactgggagacctgggtcccagtggagaggcctcaccatgtagtaagtctctctcgattcagttctcacagtgagttgagggccaagccagccattcttcagcctcaccgggtgggtaccagaatcacctgagatgttaggaaggtggggaaagagggaggtgttggtcaaaggggacaaagttatttacgtagaatgagtaagtcccagagatctaatgcacagcatggtgactgtacctaagtatgctgtattagatacttcagattggctaagagagttgatttttttaattttagtaattttttaaatttatgcataataactgtacatatttatggggtacagaatgatatttgaatacatgtatactctgtgtaataatcaaatcagagtaattaccatattcatcatggaaagcatttatcatttctttgtgttgggaatatccagaatcctctcttctatttaaaaatatacaataaattattgactctagtcaccctacagagctacagaacattagcacttagtcctcctatctagctttaatttggtatccattaaccaacctctctccatccaccttccaccctgcccttcccagcctattataaccacgattctgtctacttctgtgagctcaacttttttagctcccacctatgggtgagaaaatatagtatttctctttctgtgcctgacttatttcacttaacataacatcctccaggctcatccatgttgttgtgaatgacaagattttattctttttcatggctaaatagcactccatctgttgatgggcacttcggttgatttcctgttttggctattgtgagtagtgctgcaatcaatgtggacgtgcagatatctctttgacataatgatttaatttcctctggaaaaaatccctagtagtgggattgctagatcatatggtagttctagttctatttgtagtttttttgaggaatctccatacggttccccgtaatggttatactaatttacattcccaccaatagcgtttaggagttctcttttctcaacatcctcaccagcatttgttattttttgtctttttgataatagccattctaactgggtgagatgctatctcattgtagttttgattcatatttcccttatgattagtgatatcgagcatattttcatttatctgttggccatttctatgtcttctttgtttttctgagacggagtctcactctgttgcccaggctggaatgcagtggcatgatctcggctcactgcaacctttgcctcctgggttccaatgattctcgtgcctcggccattggagtagctaggattacaggtgcaccaccatgcccagctaatttttgaatttttaatagagaggggctttccccatgttggccaggctggtcttgaactcctgtcctcaagtcatccatccaccttggccttccaaagtgctgggattataggtgtgagccaccacacctggttatatgtcttcttttgagaaatgtcctttcagatactttgctcattaaaaaaaaattattattatttaccattgagttgtttgagttcctcatgtatcctggatatcagtcccttgttggatgaacggttttcacatattttctcccattctacaggttgcctggtccactctgtcagttgtttcctttgctgtgcagaagcttgtagcttgatacaatcccatttgtcattgggaggtcaagacaggaggattgcttgaagccaggagttcaagataagcctgggcaacatagtgagatgctgtctctgtttttttttttaatcccatgtgcctatttttgcttctgttacctgtgtttttgaagtcttacctgcaaaatatttgcccagaccaatgtcccgaaggatttaccctgctttcttctagtagttttatagttttgaatctcacattttagtccttattctgagttgatttcatgtatagtgagagatagggatctagtttcattcttctgcatatggttattcagatttttcagcaccatttattgaaaacactgtctttttcccaatgtatgttcttggcatctttgttgaaaatcagttagctataaatatgtggatgtatttctgggttctctattctgtttcatttgtctgtgtgtctgtttttatatcagtaccatgctattttggttactttagctttgtagtatttttgaaatcaggtagtgtgatgcctccagctttgctctttttgctcagaattgctttggctatttggggtattttttgattctacatgaactttaagattgtcttttctatcatatttctgtgaagaatatcattggtcttttgatgggggttgcatggaattcgtagagcgctttaggtagtatggtcattttaacaatattaattattccaatccatgaacatggaacatttttccattttgtgtgtgtgtcctcttctaattcttcccacccccccactctcccaacacacgccgagatggagtcttgttctgtcacccaagctggagtgctgtggtgcaatcgtggctcactgcaacttctgcctcctggttcaagcaattctcctgtctcagcctcccaagtatctgggattacaggcacgtgccaccaggcctggataatttttgtatttttagtagagacggggtgtcaccacgttggccaggctggtctcgaaatggctggtctcgagctcctgacctcgtgatctgcccaccttgacctcccaaagtgctgggattacaggtgtgagccaccgcgcctggcctcctctgtttctttcatcagtgttttatagtttccatcataaaggtctttcttggttaaaaaatatcctctcttattaaaattattcccagttattttattatgatttttgtagttatcataaatgagattgtttagttttgttttagataaggtctcactctgttgcccaggctggagtacattggcaccatcatagctcactgcattcttgacctcctgggctcaactgatcctcccacctcaaccttctgagtagctggggccacaggtgtgcaccaccacacctggctaatttttttttttttgagacagagtttcactcctgttgcccaggctggagtgcaatggtgtgatctcggctcaccacaaccttcgcctcccaggttcaagcgattctcctgcctcagcctcccgagtagctgggattacaggcatgagccaccatgcccagctaattttttgtatttttagtagagacagggtttctccatgttggtcaggctgatctcgaactcccgacctcaggtgatcctcctgcctcggcctcccaaagtgctgggattacaggcatgagccaccatgaccggcccaacacctggcaaatttttaaatgttttgtagaaacatggtctccctatttgtgcaggctggtctcaaactcctggactcaagcaatcctcctgcctcagccttgcaaaatgttgggatgacaggcatgagccactgtgcccagccaagattactttttctatttattttttagctagttggttataagtatacagaactggtttttatatgttgattttatatcctgcaactttatcaaatttgtttatcaactctaaacaatttttggtggagtctttaggtgtttctttatataaaatcatgtcatctgcaaagaggaacaatttgacttcctcttttccaacttgaatgcctttcatttctttctcttgcctaattgcactgattagggcttcctagagaatagatcttaagtgttttcactacaaacacaagaaaaggtaactgtgtggagatgaatatgctaattagcttgactataataatcaacttgctatacagctcaaatatatacaatttcagtttaaaatattttataaagaatcacctgagatgttatggagaaatacagatggctaggccccaacccccatggtctccatgcactaggtcaggttaaggcttagagatatttacactatatattccagcgatgccaacatgcatgtaaacagggtgaagaacccagggaccaagcgctgtctgaggttgtttctcatctaacagcaacgttttaccattagaacccagagccccagaggaccttactctgggggtgtctatggaatgaggcctccttcttaggtaggtctgtactctgaattatagccagaatcttcatcactgcagggcatagcggtaaagagcccacacctgtagccccttctgactccactcaaatcacagttctgctctcgacttgctgtgtggcctttgggaagttactctgctcatcctcggagacctcatccatgggacagggggtaatggtacctagcttttgggtttttcttaggatggactgggctcattgtgcatggaaagtgctagcccagggttgggctacggaagcactctgttacctgctgctgtttctcagaagtgagccctttggcatggagagctggaggaagaggacgaatgctcaaggtctcagggctggagaggaaatcatgatcatggggtggcaaaggacctcaaggcactgccagacactctgggctcttggagaactgttcagagttggcgataactttctgtaatcctaggcatctcttctcttgtcacatttcattgagatatctgtctatcctatttaacccaagcctgattttggataggatccagaaatctaggtgaatttcaggggcctggttgcttcctcatctagcttggtggtaagaagctcagcccctctctgtgggccatgtggagagtacagaaaataaaactgtatcagggccgggcgcgatggcccatgcctgtaatcccagcactttgagaggctgaggtgggctgatcacttgaggccaggagttcaagaccagcctggccaacatggtgaaacctcctctctactaaaaatacaaaaaatagctgggtatgggggcgggcacctataatcccagctactcgggaggctgaggcatgagaatcacttgaacccgggaggcagagtttgcagtgagccaagatcatgtcactgcactccagcctgggtgacaaagtgagattccgtctcaaaaaaaaaaaaaaaaaaagacagtatccgaggaggagatagagattgatgcataggagagaggtccagtttttatccttgtgcaatagactttacacatttctaaaatatatttaaccaaaataacaatattataactgatgtaacttaagatctttaactgcatgcagttctaaatgtggattgtgtttttatgtagttctaatcagtatgtaaatttcattctctgtcacttaacatttttatataaatcttttcatgcactactcatatttttatcatagtttttcattattgctagtgctccgacttccccctgagcattttgttttgattctcattatttcactactataaatagtacagctaggaacatctttgtgcaaatgcttcacacccctcgccttggatagatgcggtatgtttcccaacgttgggtagcaagatcaacacatgtgagttattttgtatttaacttccttgcttcagaaagccagttctgagtaattggcaattgtactagttcatttcaagtccatgaacataagtttttcttttttttccctaggtaacttggcttgtttaataggtttatggtggttccttaaagttgtttttattagcattttcaactgctgagggcttttctgtctatttttaattttctcaagtcttttcacacacaggtggcatcctgtttgcttgaaggggcattaaaattgctgttttatccaatttgcattaaaatgaaaactaaatacatctacagattggggctcggtcatgttgaatggttttgaggtctgtttacataaagcaaatgtttggcgtatactaggtttgcaaagagtggcagactagggggttggcaggtgaagcttgttcaagacaatggttttgttggttttaaggtgttgagagatggtgggctacatctgtacagttagacttgggtttatactttctagttaaaaaaagtacctgaggtttttttttttttaatcacctacttttttttctgtttattacatgtatcataaaatataccttaatcaagtcctacatatccatgactatatacatattaacatgtcaaaagtctgcattcctttccatacatgtatgaggaatttgtgtttgagcagaattctgggggctacatcagaaaagcaggttcatctgggctgtactctttggcacagaaataagcttgatgtgtggagaccaagctcagatcaggggtggagggaaggttgggggtcactcactgctgggatgtaggctgtggactgtgtttgttggggtacagtggaaaatctgagctctggtcttatctctgccactgaagaaaggggaccccaggcaagctgctcagtcagtcgcttttcctcatcctcaaaatgggagagcagcctgccttgggagatatcagtgaggtagcaagggtgcaaatgctatgaagggagattcagcatgtgatatgcaaatgtgaagctcctcttcctctagctgttacatttcttcttaacgttgatttggatgaaggagtcagatccatctttcacgggacagtcctacaaccgttcaaaaccagcaatccatcctgcgttcccatgactcactctctctttggttttaggggtctgcaccatgtgatagggccttgttgaatgcccttgccctagaagacggcctctcaaaccccaggccctcagctttcactgctgaggtgggatcgtgtgtgcagagcccagagggaaatcaccatagtttcttaggggttttctggtaatcccaacactacattaactttttttggcagccacatcatagtgactaacagtgaatttacagttagcctaaatcctattttttaatccatccactgctaaaccacatctttctcatcctagactggggaaggctttttttttttttttaaatctacatgaagaatggctcatttatcccacttcacaagttgcgttttgttaaacttggcatgacttaccagcctgtgaggatttcaagaactttttttgatcctctgttaaagccataatctctcccaatcctgtgctcaacttgatgcttcttgtttaataaccacaagctccttcatacccaattaaaaggcgtgaacaggaacaattaaaacaacagtctgccatccaggttaatgcagacatttgattagcagtctttagaagaaaccatttgaccaactaggaattcacctgctatcatctgacctccttgttaaactctcaagaaaatggggaagaactcagacaaattgaagcattgattcatcatggtaccaaatttctccgctcagcaaccaactttgtgacccactcagagggggacatgagatttgcaggagttggaggttgagagggaaggaaaaagctgagatcatgatttgaagaggagaagttggaggataacttggtttggggttaaagatgacaaagagtgtggttttgaaaataacaactttcagaggactggagagtaagagaaaagaagctcttgggaggaaggggcacatggtaagatgctatgcccccatgcaccttgtacattgttgtcttgaagtactgggtggtgccaccactacaggcaacaagtgggacatcaactgtcagaggtggcttgaggccagggaccctgagatctgccctttttgcccagtctgtcgctgttcagacagtggtgtgctggaaccaactctcacaagccaatggtgtccatttctccccaactcccctttcagtgccatcatgctggtggcttggaatcagccacaatgaaagtatttacaccagagaaattggcaagtgctacaaatcaaggcatccttctctcagattgccagtggccacacacacaccaggcacttattctcgctgcccctgtggccttccagctcacacctgtgctgtatccttgtgccagatttatatttttaaaatgaaaatctgcttttccatggatgatgttcaaaaatttcttagcagattgccaccttctggtctcatttcccaatgacccctcacccaccctcttcaccagccctacaggcagcatgtcatggggtttcctgatctttctgggtcactttttcctaagatcctgaggcccagtaggcaggttctcttctgtgatcatctggtcccatgcttagagttctattagagaccgtagcaggctgtggctgtttttgtgtgttttgttccgttttatcttttttctttttactggattatgatctaatagatggggaccttcttccctcttctgtttatcttcatagctccaggtctgctatggttcctgaaacataggaaggcagagagaggagggaaggaaggaaagaagaaaggagggagggagggaaggaaggaaagaaggaaggaagacaggagggaagacaggaagacactccagccaaaaggcattcatgacctggcaagtaaggagcacaatgagtataatttttgaagaactaagagaagaatggagcccagaagtcaaataggagataagaaaaatctggctagctgcagggatcaaaggctttgaggggaggagaggttcctttagcaagaaagcccagggtaatgcatccctgttgctcccctcctgccccgcaagacccccccaagccagctggcctctgagctggcaggagctggcaacagggggactcccagtgggtaatgggtgcgggggtggggagctgaaaacgtggtaaagtctcaacaaatgcgttttgtattacattcaattatagctggcaataatcacaacctttctggttctttcctccgcaaggtaatggggagaaagccttggagaggagggaggtgatttagcaaatgctggactggagggccctggagcaggcagaatgctggccctgcgggaactgagggctgagagggctctggttggggagggggcactgtgaggagccagcagggcacagccttgcccagaaacctaggaccagctccctgagactgcagggtcattgccaattagttaagtggctgcactcagcaggcctttgggataggaaagggctgcgttctccatcttgttgatgtggaaacagcaaggggaagtgattcagaggcggagtggaaataaagtgtgtgtctcgtgacattgtgacttctgctagatccaaagggctgcacttgactgtctcctgggaagcttccttccatggacaggcgcctgtggtgctttcgagacaggcaatggggctgtgcaggagcagaggagagggaggcatgatctgtggaggtggggcaggtgcatggaggaaggcagggctgggtgaaaaggcagcctcagtgcacggagcactggaggtagaaggggctgccacagccacctgatcctgcacttaggaggtcagtttagattttttaaaagtcaggtttaaaggccaggcatggtggctcatacctgtaatcccagcactttgggaggttgaggaggaaggatcacttgaggccgggagttcaagaccagcctgggcaacatagagaaaccctatctctatacaaaataaaaataaaaaattgaactaggcatggtggcatgtacctgtagtcccagctacttgggaggccaaggcaagaggatcacctgagtccaggagtttgaggctgtagtaagatatgatcacatccctgaactccagcctgaacaacagagcaagcccctatctctaaaaattaataataattaaaattaaatttcagaattaaaaagtgggtcttagtattatgtttctaattctctcttcttccaagtcacagacacttaaaaaatgtatgtgccaaggagtttgcagaagtaatggaagtaacctctgatactccagaaaattctgcaggataagtaatagtgacctcatgccccaatggaggaaactgaggcctacagagattatcttgtccagatcacacaacgggtccatggcagagactcaaggctgccatgttgtcacactcacgtaatggcccagttgtatggcttaccagccctgaagaaagtggtttaaatccaggtttgaatgagttaaatgtacgcgccttctccctgacatcatacggcctttctgactaatgggcccctttccactctctctcaaatcaggaacagaacctttttttttttttcttgaggtgaagtttcgctcttttcccccagtctggagtgcaatggtgcaatctcggctcggtgcaatctcggctcactgcaagctccgtctcccgggttcaagggattcttttgtctcagcctcccgagtagctgggattacaggcacgtgccaccacacccaactaatttttgtatttttagtagagaaggggtttcaccatgttgatcaggctgatctcaaactcctgatttcaagtgatctgcccacctcagcctcccaaaatgctaggattacagtcgtgagccactgcacccagccaggaacagaactttcagtcctcaagaccatgcattttatgtttgggactctcagcatcccctctggtgtctgcctccccaagaggctaagctgtttactgaacacaacatgtgtaacattaccctacaatgtcttcaaaggcaagagttaagttttcctgtgatatttattcctgtaaccctagcatctcccctgtgccaggggcacagtactaggtgcagttacaacctggtgcatctggaggggacgtaaatgctgcttcagttccccctcctgcaggcaggtcaatgtcttgccattcaggaagagcataatttattttcttcctgaagatcttaagaactcagagattgtccatcctcctgtagtaccctttgcagattttggccaagaagttcttacagacaatcagaagttttcctgttttaatttgagcccatttcttgtgtttgttattctttgactttgattgtggcagatttgggggccaggaggcaaaccgaagcccaggatggctcagagccagggttttcactggtgccacaggatgtagtctcctctgactctgctccgacggtctggggcagaccaggaagcagggaggacagaatgccagggcttggagagccaggaaggtctggagaaaggggcagagtttttggctcatgagttgagcatcagaggattttgtgatcattaaaggccagagataggctattgacgagtagttcaaataatcagacaatatttagaggcgtgaacaagttctatcatcaagaagaagagctggagtcagcagattgttctcatctcttcccaactcagcattcagtggtgatgtgcattggtacctgaaggtcagtcatggtgggaatttttacactacggaaattggcaagttctacaaagcgagcttttttttttttttttctggagcactactgacaggaggagcaagatacagggaatacaggtcatcagacaagattttggaaaaaaggcaagtgaaaatagtcatgatgatagagcctttcactggtgtcccactttattgcttacgaggaactctcacttatgttttctcacttcatcttcaccacccttctatgaggaaaacagggtaggcagcattaccctactttataggggaggaaaatgaggctgggataggtaaagttacttgcacaagattttagagccagtcagaaaatgagctgggagcagaacacaggcagggtgagcgcaagggaagatggcatggaattgagagctatgttctctcaagaacctgaagaggggtggcagatgccttcctttcatggaaccgttcatttactttgcttcaaagagttctgagtgttcattacagatctgtgtctacagctcagagttttgggtgcacttgaggaagttgccatgtgtcaatagagacatgggcaccaccttcctgggcctgaggcttttgatcaaacctatattctagtgttgagtccgtctaggacctctcaagacaaagtcctggcacaagaagggtgattatctctaagccaggagaggttctggattcttcactgactgggaatattcgatgctaattgtcatctttatctttcgtggagtttgtgccgcccttaggggatttcaccttcttccaaggcagctggggaagtgggagaaactgtgggttttgattaaaacctggtttgggatctaagtttgctacttagcaggcatgaatccttgaccaaatggcttagacctttttgagtgtgtcaccatctgtaaaatggccatcttcactcctgcccacctcccaggattgggcagcagattgttgtgcaaagaacttgtgtttctgtatagatttttaaattgtaattacttttggaatgagcatccacagcagatgtttctgctgcaaagggctaaagggagaactgaggaacttgcatcaggctgaaggtagaggtagattctgggtgacagaaatgactgctgaaatatttctccttgagctatgttggtgactgcagttagtggctcttgaatcaggggccaagggagagtgaggaagataagacaccagagtcctccaagcacgctgatgatgtgtctgggtgggctgcattgggtctgatgtacagtgtgaatctttctctttggtcaggaccgatatgggagttggctcctgagtgggctagaccctgcccagccaggctgcggaatgggaggacaactatcagggtgtggtttctcattgctacatttttttcttaatagactatttttagagaagtttttgtttcacagcaaaattgagccgaaagtgcagagtgttcccacatgcaccctgccctgacacaagcaccgcttcccccactatcaacatccctcaccccccagagtggcgcatttgtcacagtccatgaacctgcgtggacacatcatgatcgccaaagatgtccaggggcctcagggccataggctcactagatacagtatatcctgaagctgggacctgctgtatgtgtgttgcctccatagctgcatatacagtcacctgtcacttaagggtaaggctgcattctcagaaatgcatcattaggcagttgtgtgaacatcagagtacttagagaaacccagatgctacagtctactacacacctggactattgctcctacagacctgtacagcagattactgtactgaatactgcaggtaattataacacaattgagggtataaataccctagatccctcactctctgggttgggtacattctgtcctggttcctagagtttccagcaggattaaatggcagttgcccaagtgatcacttacttgatcactctttttgactgttttcccttccctatcatcatttctctggtttacttacacaaacctagatggtacagcctagactatatggtatagcacatggctcctacaaccctatacagcaagttactgtactgaatgctgtaggcaattgtaacacaatggtaggtatttgtgtatctaaacataggaaaggtacagtaaaaatacagtgtaaaagataaaaaatggtgcaccggtctagggcacttacagtgaatggagcttgcagaaccgaaagttgctctcggaatctgcgagtgagtgtgagtgaatgtgatggcacaggacattactatgcactactgtagactttataaacacggtgtacttaggctacactaaatttattttttaaaactgtatttctttagtaatagattaaccttagcttactgtaatgtttttactttataaactttttttaaagcttgttgatgcttttgtataatacttagcttaaaacacatgtgcattgtacaactgtacaaaaatattttctttctttatacccttattctataagctttccatttctaaagatttttattttttattttttttactttttaaacgtttttattaaaaacaaagacacaaacacacacattagcataaccctacacaagatcaggaccatcagtatcactgtcttccgcctccacatctcgtcccactggaagctcttcaggggcagtaacagacatggagctgtcatcgcgtatgagagtaatgtcttcttctggataccccctgaaggacctggctgaggctgttttacagttaacttttttttttataagtagaaggagtatactctaaaataatgataaaaattatagtagaggaagtacataaaccagtcacataatctttattatcattatcaagtgttatgtaccacccgtaattgtatgtgctagacttctctattcctggcagtgtggcgggtttgtttataccagtgtcaccacgaacacatgagtcatgcgttgtgctctgaccttgccactgttatgatgtcactaggtgagaggaatttttcagctccattccactctttggggaccaccatcttatatgcggtccaccattgcctgaaacatgattaaatatgccatattgtgctgtgtgagtatatttgcctgttgtctctctgactagagtgtgtgctctttagggaaaggcatgcttttctcatcttcataccctgtagcagggctgccactgttccctcctgtgtcccctgggccctgccatttcagtacaatcctctcttctacccacctgctgccagctctgcacctctgtgcctgaggactttctcagctctcccttgtgcagaactggctggatatgctggaacaatgactgtaagagtggtgtataaataccccagatccctccctctctgggtggggtccattctttcctggctcctagagttcccagtaggattaaactgtggttgtgcaagcgataactcacttgatcactcttattagctgttttcccctccctgtcatcatttctctgatgtttcctggggttacctctcaaacgacttccccctggattccttgttgaaggtcaggggatccgggttacatcttcactacatagcagagtattgacacacaggacatgtccagcagatgtttgttggaaaatggtatggatacctctagaatagacagatacttccagaatatatatatatcttttagataagaatatatatatcttaaagcagattgcatattcttctctccataggtcttatgccacattttgctgcccttgtggactctgagcttggtgctgcctgttgtctgcctgcccctgacctgaaggacatgcccagctccttctctcatccttgcctctcttttgcatcttcgtaatacatattcactttttaaaaaaggaatggctctttgaagctaatggctatctaaatctttcttttctattgtccagcacagtgtgaataaatacatacaggctatgattccacttttcaaatgtgtgactccatgttcgtgttttaacattgtcaactccatcattttgcccccaactcctggtcaaggaatttccctccctctaaaatcacagtctcttcttagaaaggggatatttttctttaagaaggggtttcaggataagagctaagctcgttctagaacagtggtttccaacccaggccaaacgttagaaaagtcctgggaaacgaatatgtcaatgctcagcccagaccaatttgacagcagtgtctgaggttagggcttggtttagggtttctgaaagcttccctagtgattatgtggagctaaggccgatgccatccatctagagctagaatatccacttcttcctttgggcattccctgctttagatcagtgggagataaaccctactctactgagttgtattggacctagaggccaggaccaatgttgctgattcaaggtgaactacagattcctaggattcttatcatctacatctgtgtcaacccaggctgtctgcagaactgggctgggttttctagagtcccagctcagctccttcccatgtgcagcatgcccttccctgcggggctgctgggcagagcgctgttcctcttgaatcctcctgcatgtgatcagtgatgtctatgtgatgagctcctgtcagacggaagcctcccaccctgaaagtttttgttggcagctgaggatgggggtggacagcatcagttgacagcctggccctccacctgggccctttcctgccttctccattcccattccctcggggccacttcttctccaatctgtttcttctcagattttccgccttgtccctgttcctctcctgctattttctactgtctcactctttgctttttctgctcagctgtgccttggaaccaagctgtgaccgccttctctcacagctgcctttgctaagggtgggccccttgcctgggtgccagggtggagggaggaatgggtcagagagaggggcttccaggagacagagctcatacccctgggagccccaagtctgggtttcatacctggatgcttctgcaacttgcccctttctgctgcatctttcccagtcaagagagccaggtgccttgcaggggagcttttgggaatgggagaatatatagcatttgtgtctgtcttggagctcggtgggtgctgtccctggggccatgaggtatgtgggcctgtgtggggctctttcagggctgaccctctgctgtctctgcaggactgcaatgtgccgatcttagctgctgcctgagaggatgtctggggtgtccgagcccctgagtcgagtaaagttgggcacgttacgccggcctgaaggccctgcagagcccatggtggtggtaccagtagatgtggaaaaggaggacgtgcgtatcctcaaggtctgcttctatagcaacagcttcaatcctgggaaaaacttcaaactggtcaaatgcactgtccagacggagatccgggtaagtgtgaagtgtctgccctgtccatctgtctgtccctctgtcttcttcctgggcagctgagcagctctcctgcagcctcgcagctctcccatatccacccctgggtggaagaggtgaggtggcatcagagagatgtgctcagcctgcatcaccaggcctgctctccagatgttcccatactacttctctaggagcctgggaaacacatgttgtagcctttgcttgaaccccagataatttgtttggcctctgattcaattcatttcaacttattaagtatttatgatacttgaagctctgcaagggacttaaaagctgctgtcctcaaagagtttacactctgatgaaataggaattagagatacacaagtgattgcattaaaaatagaacaaaactggtataagccttgtgtgctgagcatgtacaggaaggcactggtggggcacttagaggatgacaatgaagtagaggtgctttgagccaggtggagggttaacaggtgccctgcctggcaacacgtccttttgctcactcctacccagaatcacaacatctgttttgcaggtccaggtacccaccttcatcagggcacctggacaccaggatgccagttcaccttaaccaaatgtatatgagattgtcatcataagcagagctccaacatgctgaactaatttcagtcatctacatttattgaacaattactgtgtggagcctgggccaatccctctacacacattattccattaaatcttcccagcatccccatgagtagatacactgaggacatacctttcctctgcccagagcacccctttctgatgatgggagggaaatccagattggttctcaggttgcttagtgggtaatttgaacaaaggaagcaggaacttttgggaaagctaatcaggtctgaggacatgggatgagccatctccagctcatagccaacctttcccatgtcctgaaagccagtgtccctaaactccatgaatgtttcctttcgttagtactgctgtgccctggccacatcatcctggctgccttccgtctgctatagcacacgctgtgcttccacacaccagagcagagtgtaattgattatgtcactgtcatggccagttatcaccattgattacagtttgattggctctctctgtttcctgtaactgatttgattagggccttgtttgctcatctttctgatataaaggcacaattgtgtcctgagagtaagccctggtcatcttcctccaggaggatgttttcctctctctttatccacttcatgagtcttcctttgggtatatcatttttgcaaagagctgatgccatccactgtgaattttactagtttaattttcagaagttaacctgatttccaagtttagggaggagcacctcattgttcttttgtgctgaaaaacagagagcagcaggttagttcatattaggacatgttccatagagtcagcagtgaaaagggtcctgaaaaagaggtaggatttaaagcagtgacactggggacaggaagaggctttccaagagtggggaacagcatgtcaaaaggcagggaggcctctgaacagtaagtagttcagtttgactggagtatggattatatttagaaaagtatctaaaatcaagatcaaaaaggaaagttgacagcagagaatgaagggcctagaatatcaggcagagaaatttggaaatggacaggcactagggaacaacacatatttttaagcaggggcaagatattcctggagttgtatgatataccctgctgggtgtttaagggatgaaagtaacacaacaggcctatggagaaggcaatgagacccaggcttaagaagaatggctttgaggcattatctggggtcggtggggaacagaggtggagaacagaagtgactgacttccaggaatatgtccaagccttctgatttttcctgcttccaatgtctcctgcaggcaaaatgccacctgcttattgcaaatagctgagggtttaaagccacttagacttctagccaagtcctgctccatccttactggttgtgtggcctgggacctaatgattaactgatctgggcttcagtctcttcacccggggatcatgctgtaaggattggagatggtggaggagaagcacaaagcacacagcagtgcccataactggaggctattgactgtgtgggtattaggttattacccagctcaggaatctccaagggcctctaattgcccagagaataaagtgcaaattgtcttcttttggtgtctatccaggtatctgtcttattttcaaataaagaagtaatatgatcagatttgtgttctaaaacaacaacatggtgttctgcaagatgttaagaagtgtgccctcgggaagggaatgtgtggtcaaaaagattgggaaatgtttggttaaacaattctgaacagattcttttgcaataagacttctcagaaccttaaataggctgatatgcctggtaaatcactaagaagggccacagaggtgatattttcttaaataaacaatttcttatttgcctaaaaaaccctccttttaaaccactagatctctggccaatcatttagggaactttttcccctaaactctgacagcagagaaaaaaggattgaattaaaaaaaaaaaaaaaaacctggccaatgggagatgggttaggaggctgtggtcatactgcaaaaggaaaatgatgaggacctggactaagagaatggtgttgggaatagagataaatcaacgtaattgagtacatctaaggagacagagtcaatagaatttgatgattaactagatatagggagggaaagaaaggaaggagaaaaggatgactcaagcttttgcttgggcgactaaatgggtgttggtactattcattgagatccagacagagaaagggagggcattctgagatttcagctttacatgtgttgtgtttaaagtgtttatgaaacacccccacggaggagcgtgggtctggagctcaggagggagaaagaatctagagacaagattcgggtgtcattatgcaatggatgccatgcaaatgggtaggcttacccacaaggaatgagtagaacagaagaaaaacagatccagcacgaggtcaggcgttcgagaccagcctggccaacatagtgaaaccccatctctaccaaaaaattagctgggtatggtggtgtgcacctgtaatcccagctactcaggaggctgaggcaagacaatcacttgaacctggaaggtggaggttgcagtgagccgagatcgtgccattgcactccagcccaggtgacagtgtgagactccatctcaaaaaacaaagagatccaagtgggaaacctggggaaatcgacttctaaaaggctgatacagaaagagcagccaatgaaggaaaaacaagaatcagtcaagagaaccaggagaacaagagcaagagaaccaggagaaccaggagaacagaatctgaggagcccaaggcagagggggctttaaggaaatagtggctggtagtgtcagatgctcagaaaggatcccagataaggttagaaataagtgcatggctttagcagcaggtgccaggaatcatctttgtttgggcaattttagtggcaagatgggggcagaacacattgtgcaatgaattatagtggagacagtgagtataagtaacatttaagagaggttttgaccaagaaggaaaagaaagaagggaaagctaaaggaacagtgttcactgcggagggaacagcatgtgtaaaagtcctgaagtgggaaggcacatagcgggtttgagactaagaattgctaaagtttggctatttaaaccatgttaaccattttggttttcattccatctcttatgggaagccactgatataatttaaaactatgagtgacatgagattgtgctttttaaagatcacttgggttacataatggaaaatgcattggaggaaggcaggaatggatgtggggaaatgttatgtggctattacattgaatcaaatgagagatgacagtagcttaaattaagattatagccatggggatagtgatggtgatggtgatgatgatggtgatgatgacagtagtggtgatggtagtgatgatgatggcagtagtggtgattgcagctagcactttggaaagcaataatatgcatcatcatattgacttctcaaaagaacccaataaagcacaaactattattatttccacttcatatataaggaaactaagcacagagaatttaagcaaattgccagtaaggggggaagcctatttttaaacctaggcaatgcccttccaaagcctgcactcttaaccaccgtgatcaatggagagaagtgattataatccatagaattgaggagatgaaaggcttttgtaatgacaggagattcacgaatgaggaagagggaggtgtgaagaatggcagccctggtctgggtggtcagggtcccattgcctaagatgagaaacactggaggagaaatccactgcagagtggggagttcacatgcccagttttggacctgtggagtacaattgagacacattaacatcttcacatggaaatgctgagtagatccttggatacataattctggaggagggagccaggttggtcgtagacacttgagtgaggtcagtccaaccatctggtggttgaagcatggctgtgaatgagatcatttgggaaagggttctgaattactccatcatccactccacaaatgtttgttggatccttccatgtgcctggcatcatggtagcatggcctagggtattagcatatcccaaaacacaggtgtactccctgctttcgtagggcttcctggccaagagtgagactgacatggactcacactaatgaatgaaccttctcaatctgaagcatatgctcctacaggaaaacataggtcttgtgagaacaggtcaccatcatcatctccatggctacaaccttcatttaagctactgtcatcactcatttgattcactgtaatagccacataacatcttcccacatccgttcttgcctttctccaaagtattttccattgtgtatcccaagttatctctaaaaagcacaaccttatgtcactcctaggttgtgagagcaagactgggtttacatgcagaggagcagctttgctgtgtagtgcctgtgtggggatgcagtgtccagttgggagtctaagcccaacttccttgtctgggaccctcttggagcagcccttcttctctctgcttcctgacttctttttgcagtctcctttcctagcttggctttatcctttgatggagttttctacttccatctttgtatcttcctttcctcattttcccagtactcagaatgctgccagccctttcaaatttgccaagcacatgtccttccccaagaacacttctgagatcctgacacccccacataggagtgtctgatcaaatggaagcagtcgcgaatcgccctgaacagtccacatggcaacacatttccaaaacatagttactccatgcatatttgctgatttcatgttttggtctttattctctgcttttttttctgcagacgtagtagcttcattgtgatttctccatgttgtaaaaagctttgtgaataagcgctggcccctgtgcctaggacctaaaagaaattaggcaggtgttgcagagaacaatgagaaattgattttgctcttctggattttctatttcctttttgtttgatattcataggaaattgtgtttgtttaggagctctgaatttctggggcaagcagaggctcatatcattatatttttctctacagtgctaatttgcttgtctgggaaaaggggtaagatgacactctgaaaacaactggcagagtggcacccagacgtgcccacacagggcggctctctttggctcttgctgctgctgctgctgctgctcctcctcctcctcctcttcttctttctttgttcttctttcttctgtcttctttcttttttcttctttcttctctcttctttcttttttcttcttctttctcccttctttcttccttttcttctcttcctcctcctcctcttctttctccttctccttctctgcctcctcttcctcctacttctcctcctcctctctctgtctatctctccttcctttccctctcctttctcttcttctcaagccatatgtcctgatttgtctcatccccagtttctatacattgcccagggatgactatccacagtgcccctgtcctgccagtctcaaatgtatcatgatatgggtgacaatgacacaataatgacatggtcaccttcgtctaaggccctgctctctcctctccctgcctggcacactgaccggctgactcatggtgttttctccctccagcttcctccagttgacccactcttttcatgtgctcatctctgcctatcacaagaccatcttttctcacccaggaagacattgagcagaagcagagatattcatctggggtatggtgttgttcagaggtgccgatggagtcctctctctcagccagtttctaccaagctggaaacctaggttcaagattcatccttgttttgtcctgaagcatcaccccactcagaattcacattcacatcctcaggaggggcagaggctgcagccatcctgtgccctccccacccagtctggatgcatccctcccacccgcagcagggactccaggttgcaggggtggccttgggcattgcttgcctggtgcatgaggaaggctgtccagttccaaatgcagcctggtccacacacacctgtcctcaccaccacccgtgtgcattcagtgatcatacaatcccttccagaaatccccagaggcagactgcagatgtcagaacccattgactttccccttcgctccttaaacccatcacacactcatcccagttagctttgagtttaatctattgttactcaaccagacacaaggtgcacagggtgttatggactggatatttatgtcccctcacccccaattccatatgctgatgccctaacacccagtgtaatggtgtttgaaggtaggggtattgaaaggtaattgggcttaggtgaggtcatgagagtgggggccctataatgggattagtgtccttataaaagaggaagaggctagattcctctccctctccccctccctcccttcctctctttctcttcctctctctctctctctctctctctctctctctcttagccatgtgaggacagaaggagaaggtgtacttctgtaaatgaggaagctcacaccaggagccaaatctgctgtaccttgatcttagactcccagctctagagctgtttagaaataaatgcttcttgtttaaggcgcccagtcagggtgatttgttagagcagctcaagatgaccgggacacaggccagcagttccctgtgcctggaagagcagtctcaggcacacaggccattggctcaggttctctgtatctggaacaatctctgtcaccctccttcagatgctgctagagtagggcccaaggtcacagtgcaagaggtagggaggaggaggttacttgtcctggtaagttgccatttttgaaagaaaagttaccctagagagaataaaatggaagcacacaaggctggtctcccatgcatgaaaatagtccctgaaaaagaggaaagggttcatccaggaaaccacaacccagtgccgcagtatttaaaaaggtatattcacaaggaccttctgcaccccctccctgtttcctgtgtgtgctctgcaggccagcccgcccccacacagacacctacagaggccagcacaaggtagacacgcaggttccgggcctttgtggatctccacgcccacattcattgcatccacaaattggcagtcaggtgcctgggctttcatttctatttttaatctggtagttgcattgctgaatgtccttgttagagacttttatcacgtcaaaatgaatgctttcagggtgttaagttatgctcacttgtattattttgttcttcaatcacttattttagaatgatcccttacatgtgttgcaaactcagaaggtatataaccagtgtatcagttttctatggctgccactgcaaattatcacaaacctggtggcttacaatagaaatgattctctcacatttctggaggccagaagtcctaaatcaaggtgtcagcagggactcagttctcctgaaggctctaggggaggatctctccttgcctgtcccagcttctggtagctctaggcattcgcagcttatggatacttcactccaacttctgcttccatcttcacgtggacttctcctctctctgtgtctcttttctgtatcttttacaaggatgcttatcattggatttggggccactcagtccagagtgatctcatcttgagatccttaacttaattacatttgcaaagccccccatttttttttccaaatgaggtcacattcacagattctggggttaggacatggacatatcttttgggggccaccattcaacccattatgaccttcaattcagatcatagtatctgtcactggtacctccattcaggcacacacagaccagtgtacccagatgtacagcagtgagtgggccttttgtccatttaaaagctttaattatgtcattttggggtatgtgcagaagaaaatagagactcaccgaatgtgtgagtcagctcttctccccaggagccgttccacacctcctggaagttggcagcgggaaatgtgtaggggccctttatagttggcacattgtcatggttctcacgatgattggggctggggcttggcatttggtgggtgggctgttgccatgggtgaacagtcccatacaacaaagaatcctcctgccccaagtgccagtggtaccctgttgagattcactgatgtgaattaggaagcattatggtaccatgaatgctctgaacccagtccccatgtgaaaaataaaactttacctgtcatgttgaagcgacacctgcccctcctgctctgaggcaggcactgcatgtcaccggaaagaatggtatagtaactgctttaaaagatattttagtagggggactttggggggaaaaatctgtgaaggccacctggtactctcccaactgatctttattgttcttcatccctcctcaatctcagcgtggcatcaagaacgcttcatacggtttatgggtaaatcagaatttttgacagaatggtctcatttttaacagaacatttttatttttcagagacacttatattctgctcaatatagtgagcggaaagaaagggccttctaaagaaaaggccttttgttaaccttttcagccttttttctgccttctcagaactctacttcccgtcttcacacacagcagaaggtgcaagggaagagcctgctatccaggccctgggaacataaaacccttcatgattctcttgctccaaacaggaggaagtcatttttctttgccctgggaacataaaacccttcatgattctcttgcttgaagcagaaggaagtcatttttctttgcattgttcatcccagtcactggcatggccggatcagccgtggtcatgacctgatcatcctatgaggctccttgactgcacttcacccacctgctgctggtgctggctccagctcacaaagggcctcagatccctttcttcagggattgcttccttcaaccacctgtacccctctatagggctcagcctttggaagaatttagagccactactggacaggtgctcccgggaggtgggtctccccaggtgccagttcccacccagtcaggggagtcagaggaacctctggcccaaggaccccgaactccatttccagctcacatcttcatgtcttaattctagacttcttgggttaatcaactcctcaggttgacttgacccttgagccatgttcatccttccccccttacccatcacaatgctagctaccattttttgagcacctgctctgcacctaccattgtgctaagctcttacgtgtctgtaacccacataaagccagtcagttgttctgaccttgaagccagtctcagtacagcatcacattccaacatatattagtctgccatctaaaaataactggaaatccatttaaatctttactgtaatctctttgagggagagaactgttggggctcagaaaacaatatccccaaatgaaggcctcagcagcagcctcagaagcaaaagtttttctctgactttctcctgccccctgtctctcagccccactctcccccgaggtgccatagaaactaggattgtcttccccaaggtgggtcatagaaaccagaacctcttttcccccacagaaatccggccataaaacctaaaagtattccatgtaaaaacaggccataaagaaattatctgacctacattgttggactataggtcataaggccttgattccagagagggcctgccctgcacccagcaggaaggaacactgctcagagaggcccagaagaatctagacagacaggcctgtctgggtttccccactcagcctgtcaacattagatcagacccttctcctccaatcatatttctacatgactgtccattgtttgctaaacctaagcataaaaatggacaatttctcctctatttttgggtcttcattctgaaggtacctgtgtatgcatattaagtaaatttgtatgccttttctcctttaatcaatctgcctcatttcagtgatttttttcagtgaacctttaggaagccaaaagccttggcccccacaggggatatcactgggggatcgctgtccagataggtagtaaaatttattaaaattctcataaccgtataccaattaaaagtaaaacaactgtctgtgtctgtctaacccaaggtcagacatggagcattgttttagctctaactggtcaatgtctgtattagtctcctaggtctgctttaacaaagcaccacaaacagagtgatgtgaaacaacagaaaggtattgtatcacagttctggaggctagaaattaaagatcaaggtgtcagcagggccctgctccctctgaagtccataggggaacccgtcctttcctctccctggctggtgattcgccaatggtctttgacactccttggcctgcagctgcatcactcaaatcttgcaccatctccccgtgtgcatgtctctctctgcattcacacttcccccttttttaaggacaccagtcattttagatgacagcccacccgaatgacctcattttaactcgattagtctgtaaacactctataaagtcctgcgctaaggcactagaggttaagatttcaacatatccttttggggaaccacaattcaacccatatggtatcttactagatagatgtataaagttttttggaatccaggggaagaaacaaaaaccttatcacagggagtcagggaaggcttcccaggggccctcatagtgctctctgggccttaaagcataacagggagctcaccaggaggaaaggacaagggggagaggggagccaggggtcccccaggcaggaagaattaaatgtgttcagcacagaggaaagcaagagcatgctgtgttgggggcgaagaaagagagcaactttggagaccaggcacagagcacattgtgggtacagaggggatgggactggaaagaacatgtgggaaaaaaacccaaagggagatttacgccttgtgttcattagtttgggtcttatctgattgtacagaaaatgaggaaccaatgagagattttccaccaaaatcacctgcattgattttgtcctcaacctcagagtgacaccttcttaaataaaatgtaagcaagacttatttttatttttgagacagttttactcttgtggcccaggctgaagtgcaatggtgcgatatcagctcactgcaacctctgcctccgggttcaagtgattggccttcctcagcctcccaagtagctgggttttataggcatgcaccaccatgccaggctaatttttgtatttttagtagaggcagggtttcaccatgttggccaggctagtctcgaactcctgacctcaggtgatcctcctgcctcggcctcccaaagggctgggattacaagtgtgagccaccatgcctggcctaagactttttttcaacaaaagcttaagtgtagtttatttattaaaatgttaagtatagtcatcttactaaaacaaacaaacaaaaaagaatactttgaaaagagtaaggagggtgaattgaattaagcctgggaagcagtttgcaagccactgtcccaggtggggttcctgggaagcagacctgggtgggaggcttgcattggaggaagcgtgttgatgggagctcccaaggcacacagctagtgggagggaagaaagcaggatggggcagaggaaaaagttgggctgcgatgcagccacagcaaaggcctcagcccattccactggagccttagagccagaagagctgtcccaaatcaggatgaaaggacataggtattatgtgtgttcaccagtcactcaatatggatggcccctaggaaaggtgtgaccttaggcaagggccactctttgagtgagagcaatcctggtggaggacagtgggggactcagctgtcatgttgttttcaaaaacccagccactaacatcaaacatgtttaataagcttattaagaaaaaagccaaaaagattaggtattttattagaaataggtgagcctgagaaaatagtgagacaatagagatcactgaagaaagttataaatggatgagcactgacaaaagagaaggaaagtgagctgagtaattaattcattcaaccaccttttcctttttggaagtagattatccagagcacagagacaagccatccggtcctgttgcttctttgtttctgacctataggaagaaaggccagagaatagggagagaggcaaaggtagtttgaagtctttacgctatttgataaagcaactaaatcagtgttagccaagcaggaggaaaagctatagacattttaatgtttgcaagaaagcattcaaaggttcttaataaccaggctgtgagccatgggcagtcggagagcctggaagccctcctgtgggaagaagcaaaggtcttcctgtagcaaaaaacagtcctgggcttacccaaatagcaactgataaaattaagacagtttttaaaaatcatggcacatatggcaatctagtgaatagataatcattatatactgtcattttttaaaagtgatttattaatagagaaagaaatattgactcagtggtagcggtcagggagctctgggtggagtgctgatcttgctgcccctactgtttgcttgagaagctgtttacatattagaatgataaagaagaggattcaggctgaggaaggcagggctcgtgcaagagccaatgcaggtgagagcatgtcaaatctcagcacttacctttctgttaccccaatctggccacccccctgaattcacaccatacctttcctcctacctatgaaatgtaaggagctccttgaggcaagggcctatgtgtgtgcacgagagcccctatctctgttttgcatagtgagtatgtcatagacagttgctgatggtttgaatgaagaagccattctgcagcttaacatgatgaggctggagggctgcagagaggggactgtggctcagggagcttgtcatcctattggaagtacatgtcaaaattgggttctcaccctcgtttgtatgactccaaagttagagctctatctgtgtcactcatggtcaaaaaccttgtttcccccaccttctgtgtgcctaaaggattggcacactttgcaaggcagtcctgtcacagtgcacttctagagttagctcagacttcacaggctgagggtgcatcctccacaagactccctccccttacaccccaattgcaagctccaggattcctaggccattcacacttctgaccaattggctacaagtttgggggtttctgctatcccagcaggttcaacagtttcctaaaacaactcacagaatgcaggaaagtgctatccttacagttttatcatataaatgagagccagccaaatgaagaaacatagaggacaggtctgagggaccccaaacaggaaggtttcatatcctcacaaggctttgccctccagacacaccaacaagatgtgcatcaccaaccaggaagttcacctgagctttggtgcccaggaatttattaggccttattatacaggcatcgttgattgattgattgattgatggaatcactggccacataattggactcaatctccagctccccttccctccctggaggtcaggctgataccatgtggctcaaagcttcaactctctgattacccggttggtctttccagcattgcagcccccatcctgaggctagcagggacccaccatgaatcacctcattagtatagattcaggtgtagtctgaggaacccacagtgaaggacaaaggccatcctaactcttgggaaattccaagggtttaaacaccccctctgcagaaccaaggacaaaaactcatcaaattctttatgatacaccatcagtaaccagcagtggtgacattggtggcaggtgctccctgtcccccaagaacttcaggtttgccccccaggaaagaatgcaccactggtaagaatctgcccagcaccaggcacctcccaaatagcacatttcatgcttagaaagctcccaaggtcttccttacctgaagctgaaatctatcttcctatgaagatatgttgggtgaagagtctcttaatgaatttcaaccccaaggacctcgagttaaattttcctccaccatgtctacaacagaaattggttgcttcttagaaggaaatctgaaaaaaaaattttgtgcaagcagagtcctggagagtttcaccaactagaatcattagctggatttagtctgacccctctcagagactatgggtaggggagaaggtgcacggccgtgtctggcctgatacaaatcttattcaaccccttgatatggtgcctttacttctcaagtggctgggaatctccctcaccagagtctcttctttttattttgaaattatttcatactttttaaaaagttggaaaaaaaaaaaacaaggctaaggactcccatatagctttctcccagatcctcaatggtttaaatttattgttttctgtattgccagctcagtctcttcataagcaggcatacatgcatacacatacacaaatatgcccattatcgttattcttttttctgaactatttgagagcaagttgtagtattgctgccccatcaccggaatgctccagggtttatctccccaaacagggacattctcctacagaagatgtgctgcatgcatctaaatcaggaagtcagcgttgctataacactaccttccacaccatagacgccatccagattttaccaactgtcccagcagtgtctgtttttcctgtctgatccaggagcacacattgcacttagctgtcatatccctttagtctcctccaatctgggagagttcctaaatccaaaagagtacaggccttttgttctataggtccctgaggaggctcttcatcctgggtctctggtctcatgactagatcaggccacagactcatggcaggaagatctcagcaaccttgctgctctcttcttggtgcatcgagacaggaagcccgctgtgcttacctgctgcaccactagggacgtaaaccatgatgatcggttgtttgtgtctgccagatttttttgtgcatttgtttagtacattctgaggctgaatgccctgagaccatgtcaatatcctattcatcatcaaacctccaccctctagcttcatcacccattgatgaatcctgcctgaatcaaccaacactgagtttgttgccaaatggtgactttctatttccatcctttcttctacatttatttcttggcattctacacaaggaagagtattttcttcttccccaattatttatctgtcttagattctattttatttggcaggatgtaactcattcctatcatatattttaatacttaagtaatcctagatgtggccgatgtgagttccttcaggctaatcctgatttgtggttatgtgtccccaatgttctctcaacactttgtttttatatggcacaaaataacgttccaggcacatcttgtacttttccccctagccctggaatcagccatttctgcaaggagctttggattctttaagtggagaaggatatttgaaaactgcaacttggtgctggggtgtgcaatcactatcggctgtcactgcttcttctttttttttttgagacagtctcactctgttgcccaggctggagttcagtggcgcaatctctgctcactgcaagctccacctcctgggttcacaccattctcctgcctcagcctcccaagtagctgggactacaggcatccaccaccacacccggctaatttttttgtattttttagtagagacggggtttcaccatgttaatcaggatggtcttgatcttctgacctcgtgatccgcccgcctcagcctcccaaagtgttgggattacaggcatgagccaccgcgcctggccgggctgtcactgcttctaagtcctttccataaatgaagctcagtttctctctctctctctctgtgtgtgtgtgtgtatctctttctatctataaaaccatgagtcacacctgcacttccaattccaatccttcacctccaaagatttcaaaaatgatgagataggttggctagactctctaggctccccatctccataagagtttcccattatcctcaatacatttacttctttgctcactcccccctttggttacttctttgctcactccccctgtttggttctttgctcactccctgtttggttacaatctcctaatcactccaaccatctctcttggcccaactcctttgacccctgaccttgccaccacctccaaaggaaggaaaaagaaaagaagatagaaaggtagagaaagagaaaaatagaatgaattttgctttgttttcccagtctggtttacagagcaccagtctgcgaaggagattgctgtgtcaaaataaggctaatattttgttgtttggggggctgtttttttgtttgtttgttttttagtatttaccttgggccaagcaccgttctatggagttttatctaatttaatcctcataaaagcattccaaattggtactattattttgtccatattctagatgagaaaaccaaatccagagaagtttagtatgtacccaagcatatccagctgggtggtggtggtgggtggatggggcactgctgcagcctggcaccagggcttgtactcctggctattgctagtctgcatttcagttatccatgacttaaaaggtattctctgctccccaaccctctcccatttgcagagaacacagatttgttaataaaatagcacaaatatttcaaaaatgatgggatagcttggctagactaatctttctccagataacaatgataaaatctggacaaaatataaaagggaactctctgcaagcactggtgagtgcccatagcaagcacaaactaaaaggaaacctgctcttgagagctaaactgtgatgaatgagatctgcaagtttgtggctttttgcctgagagaactttccagtctggaatgggctccaggggcaaaaatctgcagccttactagcttaaagtgtcagaggatacaatatgagattggcagagcagcaagaagattagcagaaaatcatggagagagtaagccccaaaataaaacattaatttttaaaaataatttatagaagcaaatttataaactacttagaaataaatttaacaaaagacctatacaatatatatgttgaaaatgataaaacattactaaaagaaaataaagaagacctaaataaatagagagatatgccatgttcatgtattacaggcatcaatgctgttaagatgccaattctggccaggtgcagtggttcatgcctataatcccaacactttgcaaagccaaggtaggaggatcacttgaggcccaagagttcaagtccagcctggtcaacatagcatgacccaaactctataaaaatttaaacattaaaaaaaaatgccagttctctccaattaagctatagatttaacacagtcccactcataatgcagcagactttttaaaaagaaagtggccagctgattctaacatttatgtggacatgcaaagacctagcccaataatctaggggatggggaacagcggaagacttaaccctatttgacttcaagatctcatgtaaagctacagtaatgcagacagtgtggttgacattggtacagtatagacaaagatcaatagaaaagaaatgagagttcagaaataaacctagatggccaaatgatttttgacaaagaaaagcaattcatttgggaagggaaagtcaacaaccaatgctgaacaaccgtagatctatatttttgaaaatgaataccatatacaaaaattaattcacaatagatcacaaaactaaaaattaaaactgtgaagtttataaaagaaaacatagaatatcttcatgacctggaggcaggcaaagatttcttaggatacagaaaacgctaaccatgaaagaaaatgttgacaagttagactctgtcagaagacattgattaggcaatgcagaatgggcacactacagacctggagaaaatattcataaaatacatcatacaaaatacttttacctagaatgtataaaagcctcctacaactctcctgcaaatgaaaacacaacagaaaaaatggggaaaagattcaaacaaccactttacagaggaaggtatatgaatggcctataaacacatgaaaacatgttcaatatcattagtcatcagagagatgcaaattacaagcacaatgagacactacgcacccactgagatggctaatattaaaaagactgacaacaccaaatgttagtgaagatgtggtgtaacaaaagtctcatgtcacaggagaaatataaaatggaataatcctgacagttgctcataaagtcagacatacatctatctttgatccagtaattcctcttctcagcatttatccacaggaaatcacaatgtatagtcacaaaaatacttgcacattgatgttcatagtagttcaattcacaatagccaaaaattagaaatagtccaggtgttcggaagcagaagaccaaatcaacatattgtgattcatttacaaagcagaacattaccgattgataagtaggaatgaatttctgatatatgcaacaacatgatggatctcagacattatgctgagtgaaaaaagacaccaaaaaagtgtatgctaaatgattccatttatacgaagttctagaacaggcaaaaccaattgaaagtggtgggggtagggtaaggttgactggagaggcgggaggtagtggggccatgagggtggactgagaagggatatgggggagttttctggggatctggaaagttctataccttaattggtatgtgggttacacagttgtattcatgtgtcaaaattgtatagcttcaatttatgcattttaatgtatagaaattttacatttaaagaagaactgtaaaaaaataatagttgagtcacagctggggagtgggtggtgatattgatgaagcaagaaggcagaaggttggtaattgttgaggctgggtgatgcgtacatgggggtttattatactcttctgtttactttgtatatgtttgagatttttgataatcaacagcacaggagttctagccctgaggaaattagatattagccaagtaggtttcagctggagcaggagaggactgtaagttcaaaagcaccagtggtgggggctccaggagggacttgggagtgacgtgggggctctgagtaatgcattattccggatgacagtggacagagcagggcagaaggtcagggacaggagaaatgggtagagaggatgacaaaatggttaacttcacgggcttgcactcctcccccaaccagatgtccctctcactgtaggagtgccactgatcccagtcttcatcccctccagggcctcagttctgattcctgcactggttgttacaactgctcacaagtgcattctgtgcctctgtttccccatctatctcacagagcagtcgtcaccctctgtgacgggcattttctttcctaatggggaagggatttttcaggctgagggtcttctagtttcacaactccctggagtccagaagggctagcaagaggcagttagcccgagacagatgggtgcccaggcaagcaaataactgggcattccttcaaaccaggattatctaaatattagcatgacattttcctagtggagagagaaagaaatttatttacttctgagaaaaataatatgcctccttcttttcattccaattaaggaactgattacagttgattgactaaattagaaactgtcttgggaggcatgttaagaaaatgtaaaatctaaataatcaaatgcccctcctctttttggtttgacagcaacctattatgcattatttggtctttaggctgatgtaggcttgatggcacgcacattgcagacatatccaacagagatacgtcggtgccttcgggtttttaaatttatatcccagaggacactctgctctgtcaggagtgagctcaattcaccaacaatatgtggaactacatgagaaacctaagttaaaatggcaccaaagtccgggcgcggtggctcacgcctgtaatcccagcactttgggaggccgaggcaggcagatcacttgaggtcaggagtttgagaccagcctggccaacatgataaaaccccatctctactaaaaatacaaaaattatccaggcgtggtggtgcctacctgtagtcccagctactcaggaggatgaggcaggagaatggcttgaacctgggaggcggaggttgcagtgagccgagatcacatcactgcactccagcctgggtgacagagcgagactccatctcaagaaaaaaaaaatggcaccaaagtgatttcagaactaggcagggccttacagatggacttctaggcagctgcccggttggcccacctgttaatccatctctggctctaggccaggaagctgtggcatcaggctgggagacaggcagtctattaacctccggttaacaagaaagcaggaacaagagggcacgtggtttcttgccagcactcatttcttgtgtccttgctcatgtggggattgtggcacttaatccttccaagtgaatcttgtccttatcttttccagccccaccactccatgaatcagcttggcctagtagaaatcctcagtctagtgtcccaagattccaaatcccagttccattccgtgggttgtgggacatatattagtttctccatcagccacacgggatggtaacacctgcttccctgtgttgtgtggattcaatgaaatcatgtctgcaaagggcctagcagtgcctggtgcaggagctcagtgatgctggctaaattgcaaaccactcagaaggtctgctgttcacatagtggatgttccgtaattattaattggttagattgtaatgaggtgcagaagcaaatttttgttattctctgcctctttgcattttctccttcacttctgctctctcagttcctctgtctctgcctcatttcacccatttgtcaatttatcagatagagcccattgtgtacaaatcttcccctaaatgctagagaatcagagacaaatcgaacatgaagacagaatcccaccctagagaatcccacttttcaggtctgtgtgagaattatgggagcccaaaggtgggcacccctgagtcatgcctctctcttctcctctgcaggagatcatcacctccatcctgctgagcgggcggatcgggcccaacatccggttggctgagtgctatgggctgaggctgaagcacatgaagtccgatgagatccactggctgcacccacagatgacggtgggtgaggtgcaggacaagtatgagtgtctgcacgtggaagccgagtggaggtaggagtggattcctgggctctggaagtgggaaggagaggaatttagggtggggaggccctgggagtttctcccttagagcactcccctgcctcagaaacttctagcaaacctgagtggcattctaggcttagtcttcctccagtatccaatgcatgtattttccaggacctaacctgggcttcatagactatccccatcccagagccaacacctaaaggtaaccctaaacgggatgctgacagtgctaggggaaaagagagacagaagggtggggaggatggaaagcccaggtccagggctagcctgtgaacctaagagaaacagctgccatgagggagaaaggtggagagtcagggatagctcagaccaccacctgccagccacctccctgttgatggtctccagcccaaccgcagaggagggaaagagaaaaaccagccctgaatgagtggccacgagactcatgggcagcccttccctttgcactaggggatgggcttgcttctgcccttggggtcctactcctttcttcaggcaccagcttctctgtgtcaaccagagcctgaatgtcttgttgcaggtatgaccttcaaatccgctacttgccagaagacttcatggagagcctgaaggaggacaggaccacgctgctctatttttaccaacaggtaaaaagtactttatcttcttgccccgaggctcccattacacctcaaatgccaagcatgaaccgttctctcctagggagatggaaagacaaagcccagattatggagggcccaggctaggaagcttctcttgaagaaggtccttggtctatggtccgcggctccaaccctgcttttctctcagtatttaagcactggctaaactgccccatgtgctcccagctcctcttggacttttctggtggcccaggagacctggctagtgaaacagcaagagcaggtccaagatgaatcctgcagtgcttactacacagctctgcagactgttgtccactaatctagctctgccattcactaatctgatagcctgggggacctcatttacttgcatgaagctgtttcctctgctgtaaaattattatgggaatcataataataatacctactttatagggttgttgtagggaccagatgatatcattggctgctaaattgactctccaaagaaaaattcccttacacgtagcacttacctatttatttatttatttatttatttatttatttatttatttatttcaatgggttttttgggggaacaggtggtgttggttacatgaataatttctttaatggtgatttctgagatgttggtgcacccatcacccaagcagtgtgcactgtacccaatgtgtagtcttttatcactcaccccttcccactctttccccagagtctccaaagtcattcttatgcctttgcatcatcatggttagctcccccttatgagtgagaacatacaatgttggttttccattctggagttaattcacttagaataatggtctccaactccatccaggttgctgtaaatgccattatttcattcatttttatggcccttgccaatttctatggtgtaaataccacccccctcctcagcctatttcaagctactaataggatacctacttggcttacaaaacttctgaaaacttaataaccagctctcagcagctattttgagcatctcaaacttcctggacagaatgcgtatggagtgccaagcccagcaccaggtgcagagcaaagcgcagcatcagcaggagtggccattgctgttttctgtctgatattagttccttccaagatctccctcctggtttgccagagactgagctagacttttcttggcctgtgaatgacatttatcactacttaccaacagagctttggataaattactgacttcttgcaaaatctcagttttcttctatccaaaatggggggcaggggaggggaatctgaacttcctgcctgtggagcagggagagaatgcctgtaaaagcacctcgaaaacctcacaggctcggcctgtggaggcacaagcaccctttcccctcgtgctctccatccctgctccatgcttgtttgtggtggggtgggtggctgtcactcagggaggcagaatgaggcccttaatcttctgaggcctctgtgcagggaagtgggaggtgagggtgcaagcctgatgcttgacctttctccccaccagctccggaacgactacatgcagcgctacgccagcaaggtcagcgagggcatggccctgcagctgggctgcctggagctcaggtatgtggccctgaggcctctgctgggagggcgctgtgctgagctctgggcaggcccgacctttccccatgtccaagatgggaagcaggaatgagtgtgtgggagccaggaaggggagaggtggtgaccggcagcaggtgaggctctgaggggctgggtgttgggtcttcaggatggcaggggtagatgggccagccccctccctagtctcactctcctggcttccattgctgccactgctcttgcctgcaggctgctggcttcttccatctgtcaaccacctttgctgctgttcaagcgattcatcagatgtttcttgagcaccagactagaatctgggggacattcgagcctagagatgtctatctgtgttgcccattgctgtatccccatctccagtaggcacttgatcaatatgtgtgatattagtacatcatccagagaggccctcacacttccatgttggggaggtgacagatgtgtatacaattaatcataatacgaggcagaatgaggatggcaccaacttccatgtaggagccattcatcctgcctgagagcatcagcaagagggtatctgaattgccactggaaggaggagaaagatttcaatcagcagagaacaggggtcaggggagatacactccaggctcagggatcagtggaaggaaaagcatagactggagaatcgtgagcttggagggataagttggggctgatggtggaagacaccattgagacaatggcagtccaatgatatcattagaatgacattgttagaatgacataattagaatgacagtctaaaaaaataggccttattcttagctgccagggggtcattgccattcaggactgaggagggtgatatggctgacctgtgttctagccctgtcttgaccagggcagcaccattgagtttcaccatcccctgccttttcaccctctccttcccttctctctaccccttctctgtcttagagcagtggttttaacatctgcttgcaaatcataatcacctgggagcttaataaactggagacgtcctggccctacccttgggagatttgatttggcaggcctgggtgggaccttatcctaggcgtttttgaccagccccccaggtgacttgaatgccattagatatatgggttgatgggatgactttcaggatgactgccaaggaaatcgttggccaaggattacttcctgttttctagaactgcatttccggagccttatctgtgacctcatggttaatagagagtagaactctgctgctgcttctacggagccagctgaggggcactggggaattctggccccattgtgattctcagtcagagagaatgctggggagtcctccggtggggccagtaggatgggaaagggagagtcccactttgatttcagcatctgaggcttttggtattagcgacagaataggtcaagggcagcttcgagggcttcacatttcgtgactttgtctcaagaagcaagggagcattcgagtcctctgtacagaggaggcctgtggtccctgcagctgcttagaaggcagcccagctcactgccattagtaataatcatgatagctcagtgctggcagaccaggggcagtctgcaaagtttattttattatctgtgcctttcatcccttctcagactgctcggctcctatgacttgcattacatcctgtactgtctcatcttcccctctaaaattagacaagtcgaaaaagcttatctttacctttttatttatggatctcatacctgggatgctagcatcactttgagacacctatcacttgtcacctgtcaagcagtcatcacttagttgtaaaacagcaccacaaagacccattaacattctattttattttattatatcctccaatcatccccaaactattactggtggtggcctaagctccaggcactgcactaatgtattggaggacagggcaaggcatccgacatgactcctgtaggtagtcttgtcaagagtgtaactgctgatatctgctataaccaatgcaggatgatattctaaaagccacacttgttttgtgcaagagatgtattgtttcacatctcctgagtgtgaggaacagagtcagagagatgttcctattcttactggttgaccactgaaatgccgggtgtatgatatcagggagaggatatggaaaacacctattttgtaaaccaaatagaagatttgcaggtctaataatttttaaagttgaatgcagttatttgttatgatgagccattttaaagtcaagttacaactatttctcacccaaagagaattggacacacttcggaaaattaggccataaggcagaattttctagggctgtggctcttgcctaaaaatgtcccagagtgtggggctacctacaaatcatgggcaataaccccttgtcctattaacatcattgattaggtcacctgcctatagatatacaacatctccaggaaaaaaaaaaattgtatcatttcctagcttaaaaaagaggtatgatgtatgcctgagatatgagattagtgaaatgaatcctccatggagtcatgtgtttcctgtgttactctgggcaagtcgattacccgctctctgcccagattccttcatctgtaaaataggaatgataatagtaacattatagtcacgttgtgttactataaaacacgttatgtttctatataacatttgttatactatataacatatatctgttagtatataacatatatatgctactatataacatatgctactatataacatatatatgctagtatataatatgtatgttatgttactattgtatagtattgcatagtatactatagtatactattgtatagtattatatggtattgcatgctatacaatagtaacgtaacaaaccttgcagggttgttacaaagaataaatgagttaatatatttaaagtacttagagcaacgacagggaccaaagtattcaataattatttattatattttacttacttttttctctttacccttcttttgtttgtttattttgaatagactttattttttagagaagttttagattctcagcaaaattgagcagaaggtacagagttcctatatacccccttccccacacatgcacagcctcccccactatcaacattctccaccagaattccccaccaaagtggtgcatttgttacaattgatgagcctacattgacacatcattattacctaaaacctgtagtttacattagggttcactcttggtattgtatgttctatgggtttggctaaatgaataatgacctatatctaccattatagcattacgcagagtagtttcactgccctaaaatttgtccatactccacctatccatccctccttccctctaaccctggcaaccattgatcactttattgttgccatagttttgccttttccagaatctcatatagttggaatgatacctagttaattttattcatttattggaggtgctttataaatgccaaatgtttgatctaaataatgcctctaaatgaaagtttgaaattcagggcctctatgctagaaatcagtacctgcccagtttgaggaaccaaataacttctcccccttgatctgagacacctaggaccattgtccacccccagcagagccctaaaacaacagcaacaacaactacaacaaaacagagaatacgtaaccccagattagctaagtaactgttaataaataaagattagagaaacgacacacagcttgctttgcttcaaaaggcatcttggtttgtagttaatttctattgatgtttagaagaaaaaagtaaccaactggatttggtttagttatttccttattttctgctgtccttacctgggtatcagtcataggcttgtatctgattatagactccaccgctgtccacctggtgttagctactcaaaattgcaggcttgagctggaaggaccagtcaggcactagagggcactccaggtaggcacagcctcactcagtgttggcggtccaggcatatttgggagacgtgggtgcccctggagagcagctgagatgggactcaacacagaaaattgggaagctaccttactggggagagcagcgtctcccttgagtgatggttactagttctcccagacattcccaagatgttcagttgctccaagacattcccaagatgttcagttgctccaaatgttagaaacacccagattgtggcacatctgagtgattggacagttttgtcaatggtgactatataaatgatcttcgatgcctgagagaagggccatttgggacacagggagtggcctaagcaagctggattcaggagattggggtgaccttgatgtgctagctgagcttcctttaccctaataaaacatttttccattcactaccaccttgatcatgctaaaatgctcttattttttatgtgacttaattgttcagtgttaatttcaaaatgtgtttaccctttcatttagctaaccctgttttaaaaaatttaatatttaaatatcccagtcttccaaattctttcttcacaagtctcgaagttcatttattcattcaacaacagatcataagcctggagtggctttaggagaccactctccgtcgtggctgggaagcagatctcaccccgtgggtgggtgatgcatcctcctgcttggcacagtcttctcatttcccttttcagcgtagtaaactcttctatcttctggcacctttagaaaacatactgagcccgtgttacctgcttgtcctctacatacataggaaacctcagcgtgagcctatgaggtgtcaattacaagcagtgtgaccatctgctcttcccatcaagccagcctaagggtctcttcatcttgaagccttttctgccccatcctgaatccctccagccccctttgcaaaaccactgtacttgcacacagctctgtgaggcaaggacatgtccccgtgcaccagattgtgaaaatctgtcaaatccttagagtcagaatgggtgctgcctttgcctggcacatcagagctcaatacacagttgaataaatggataactgaaagaactgaaatcttcttcctcagtggacctttgccaacatttattctgttagaattaaatagttgtgtacagcaagccaatgtgttcagttacctaggagtatattttatggctcactcaacccaggggaactgtagatgaccaagctgcctataatcacccagaggtgtcttattaatgtggaggctgagcaggtaacactggcttgacatgttttctgaagctgccgtggtcagtcgcatggaattttgggatcttaactgcaggcactcttcaggtgggaggaggaagaggaggaggagcttccatccaggggagaatcctgggtaggcttctcatgtcctatacctcagaggcccccaaccttttgggcaccagggaccagtttcgtggaagacaatttttccatgcaccctggttggggtgggggatggtttcaggatgattcaagcacattacatttattgtgtactttatttctattattattacattataatatataataaaataaatatacaactcaccataatgtagaatcagtggaagccctaagcttgttttcctgcaactagacagtccatctggatgtgataggagacagtgactgatcatcaagcattagattctcataaggagcgtgaaacctagatccctcacatacatggttcacactcctatgagaatctaatgtcaccactgatctgacaggagatggagctcaggcaatatagcaagtgatgggagacagctgtaaatacagatgaaacttcagtcactcacccactgctcacatcctgctctgtggccagcttcctaacaggccaggaccggtccatggtccaggggttggggacctttgctacacctgaatatcattcctatctgccagtcttctggtttccaataccgcacatctgcccttagcaagaacatcccatctcaggcaccattgcttacctccctctgtcagacactcagtacagagaagtaagggtagggaagaacccatcttcttagtgttctaagttctcttcttggatcaaattcccagggttttctagcctcactactgctgacatttggggctggatacttctttgttagggaggattgggggtggacttcctgtgcattgaaggatgtttagcagtatccctggtctctacccacttgatgctggtagcaccaccaaccccctactccaactagctgtgataaccaaaactatctccagacattgcccagtgtttcaggctggggcacagagtgcaaaattgggaccatatttcttaagaggtaattacttattttgcttgacagtatattcaaagataccatttattaaaaattattaaggatatagcgttttacattttatatttttattagatatttcctctatgatttcatgccttgagtgtcttctttttaattcttttgagacggagtttcactcttgtcacccatgctggagtgcaatggtgcaatctcggctcactgcaacctccgcctcctgggttcaagtgattctcctgcctcagcctcccgagtagtacgtgccaccatgcctggctaatttttgtgtttttagtagagacaaggtttcaccatgttggccaggatggtctcaatctcttgacgttgtgatttgcccacctcggcctccctaagtgctgggattacagtcatgagccaacacattcggcctaaccttcctattttctaaagacaatgaactgtctaaaagtcattgcttttgaatcataagttacttccctcactctgcttatattattagttgcacaaaacttttaccagatatttataaggatgcccgaattaaaggaacactgaatgactttaatataagatcaggagtaggataatgtctgcaacagtcaatgaaattactagtcacagtggcccagacagggaagggaggctggcacatgtgagaacattagctatttggtctcagcttaagccacaattgcataaaagtatttatcaaggcatacatttttaggggaaatgagacttaaataatatgagtaaaatattaatagctgcctcctctggtaagactatgaataattttattttcttctgtaagtcctaaagtttgtatatgtacagtggtacctttaacaagtgtctaaatgaacacacaaacatacacacatataatatctcagagatagcaaataagtgaaaaggaaatcacaagagccccccaggacctgcaggtgaaggtcagtgttcctaggctgatcattcaagcattggctgccttgggcctttgttcttagaggccacagatggagccaccatcttcctcctcagcccagtatctgcccattcctaaagtgagtttcctaggatgcaaggctggagtcttttcttggaatgacatttgtggggtttccttttcctcacaggtcaaaatactaaattttatgactctcctaacttcctttctcctgatgattcccacgtatggcaggggaagggggcttctggtggcatgaggtgccctgggtctgactgcctcattctccagccttcagcctccctctccaccacctatttctccaggcggttcttcaaggatatgccccacaatgcacttgacaagaagtccaacttcgagctcctagagtaagttctgggatcacccatctcccctcccttcctgtccttccatgtgtacttttcctcctcaccctctcctccacccctccccagaccagagccacatagggccgtctctaggtcccaaagccctctcacctcttcctgattggcccgcagtcctgtggtgggggtgagggggagtcacatgctgcctttttcttccttcttgcagaaaggaagtggggctggacttgtttttcccaaagcagatgcaggagaacttaaaggtgaggaaaccaatgggcgaggacctcttcgtgctgattcccgagactagagtgtaagggatgaggctggggctggggatactcagagaagccagggtatctgcgcggcctcgggcatttggacacaggaccactaaatgtacccaggggtcctctctggggctggggatccaactgttacatgcctgggctccggctccgtatcgaggccgtatcagctctgcggccccagtactgggaagctacccctcgccccctcaacctccttcgtagggttacggggagtctcccttgagacaatgggtatgggttttaggtcatagatcacagctgcttttggggcaaaggccctggggatcattttcgagcagtgggcagtctctcagcgagaccctaagggaaggagtgagacctgggaggagcaggcattgctcacacggcccatcccctcccccagcccaaacagttccggaagatgatccagcagaccttccagcagtacgcctcgctcagggaggaggagtgcgtcatgaagttcttcaacactctcgccggcttcgccaacatcgaccaggagacctaccgctgtgaactcattgtaatggcgggctctcttgatcctctccctgacctggattccaggcctctcggaaaagggggccaggagggggcagggagaggctgcaatcgctgcagattctcactcaggcagcaggacctcgctgacctgccgtcggtggaagtcaaaagcatccccttgcctgaagcaggcactgaaatgttggcctccagctctgggaggtgggcaggacaggcaaggtgtcaggaggggaagatccatatggccagggtttcggtgagaaggagctggagacccaggaaacagtggcttgtgtctagcttagggagcttttcttcaagtttctgaagaatggggaggacagctctggaacaacagtccactctccttttattccagcaaggatggaacattactgtggacctggtcattggccctaaagggatccgccagctgactagtcaggacgcaaaggtagagagacccggggcagccccacccagccccaggcggggaggtcgtcccctctctgctgcctcccgccctgtctgccccttcagttcttcttgcccctgttgctgaaagcagagttcttctaaggccatgccctggcgtgagcagcagtggagagcatttagagatggcagcatgggacagatggccctttacatccctgtgactgtcatctgcacagaggtggtgggagggggagacaaggcctcaatgattactcgcagagctcagcagtgttgctctttcagtgacaatataaggcatgattcccttggaagtcaggggacctgggtccagtcctggctccactgccagcttggcacatgatgttgagcaagtcctggctttctctagacctcattttctccttggcatagggaggggcttggtctagatcaagcctgtggtcccaggatggctttgaatgcagcccaccacaaattcgtaaactttcttaaaacatgttgagatttttttgtgcgatttttttttttaccttcatcaagtagtgttagtgtattttatgtgtggtccaagacaattcttcttccaatgtggcccagggaagccaaaagattggacacccctgaactagaggatccttctagccttaatagtgtttgattctctcttcatctcccagagaaactcccagttcctcctcaccccggctcccccatactgaccaatctgcatggcctagtcctggtagtgggatggtctgaagctcccccttcttttcccacagcccacctgcctggccgagttcaagcagatcaggtccatcaggtgcctcccgctggaggagggccaggcagtacttcagctgggcattgaaggtgccccccaggtgagtgtctctgggcactgggcacctggcagctctgcagggggtataatggcagattgggagctcttgctcagaccaaaagtctgtgacacacaggaagccaggagcttcctggctttggggatcgtgttaagaaaactgcaccaagttcttagacaaaaggtaccaggatgatgataaattgtaggaaaattcgggaaacaatttttttaatgtcaggagaagaaattgggaaggttttcaggtagtggaatgttcaaggtgaccagaaatcaggtataaatcacaggcctaagttataccaagagaacaaggatgcggacatcaagacctcaaaaacatgggtttttttgtttgtttgtttgtttgttttttacagtaaaacacccagagagacctcaggctgcatctctctctcctttcacccatctgtgccctgccccattgcctccccttcctctttctttctttctttcttttttttagacaaagtctcactctgtcacccaggctacagtgcagtggtgcaatctcagctcactgtaacctccacctccacagttcaagagattctcctgcctcagcctcctgagtagctgggactacaggtgcatgccacaaggcccaactaatttttgtacttttagtagacacagggtttcaccatgttggccaggctggtctcaaactcctgacctcaggtgatctgcctgcctcggcctcctaaagtgctgggattataggcatgagccactgtgcccagccccctcttccattttctcagtttctgcttctatttattgagcacctactaggtaccaggcatcgtgctatgtgctcagaggccaaaataagtgaggcctgggactggcctttggagagcatgggcgtacaggtgaaaggggtgacagagtgcagtctggactccagggcagggccccaggagaggtgcagacagcattggcatccaggcaagggttgtggcaggggtcctgccatctcttctccagccctgggggtggtctctagccaaggctctggggtctcacccttggctggtctctgctccgcaggccttgtccatcaaaacctcatccctagcagaggctgagaacatggctgacctcatagacggctactgccggctgcagggtgagcaccaaggctctctcatcatccatcctaggaaaggtgggttccatttaaaggtaaagtggctggaccacgggtggcagcacacccgagtccccagaggcggagtggcagaagctaagccactgatggataagtgaatgaggattcttcccccacagcccagcgggaagcttccagtgggcccatcttaggctttaagccctggccggtccacctacccacagccctgctaatcaaggtccacatagaggcagcttctggaggagaggcgttttagccccagcaagctcaaagccattgctagtagaaggctggtcccgcctgtgtgtgtctccatcttgggtcagattcaggaagcaggggtcacagctggagcacgtgaaatctggcctgaggcagcctccaaggaggattccacttctggcccaaggcctcactagctcccaggctaggagagaatggaattaggggctgggatgggaggagagtcccttgtaggaatagtgaggaggtcagtcacccatccaggtccctgtgtccccagctccaacctcctccttcctcctctcttcctagatggtgagaagcggaacagcctgccccagatccccatgctgtgagtacaatggggtgcagaggacagggccctgagctcagcctgtgctgctgagaggaataagaataaactgggagtccccacctccatagtttctggctttcaggcccaggagaaccctgaaaaaagatgatctttccctcccaataaatacctgcaggaatattcctatgccttcatgccacctggtgttatcctggggggttgctgctgtcccccaactccagcccccagcagcctgggctgtgctcccaggtcattgctaatttggacagactacttctccacagggggcaggaggagagggcgggccgaggctgcccaggggaacattaccggcctctgagctcacctggcttctgctctctcacctcctacagaaacctggaggcccggcggtcccacctctcagagagctgcagcataggtgagctgcccgctgcatcctccacctgctccagttgcctcccgtctgcttgctccccactgcttgctctcgtgacattgccgagggtttcctccaagtgacagaaaaatgatcctctcccataacttctcagtgatggctttaaaatatcgtgaattatggctgggtgcagtggctcatgcctgtaatcccagcactttgggaggccaaagtggatggatcatgaggtcaagaaatcaagaccatcctgaccaacatggtgacaccccatttctactaaaaatacaaaaattggatgggcatggtggcatgtgcctgtagtcccagctacttgggaggctgaggcaggaaaatagcttgaacctggaaggcggaggttgcagtgagctgagatggcaccactgcactccagcctgtcaacccagcaagactccatctcaaaaaaaaaaaatcatgagtagtaatcgctagtgtgtattgagtacttagtacatggcttaagcagcttgggctgccataacaaaatactatagactgggtggcttaaaaccagatactttattgctcacagttctagaggctggaagtccaagatcaaggtgctggctgagtctgcatctggtgagggctttcatcctcatttgcagatagctatcctttcactgtgggctcacgtgatgaacagagagttctggcctctcttcttctgtgtacatgagcacagatcccattatgggggctccacgctcaggactgcaccacctcccaaaggccccacctcctaatcccatcgcattgggaattagggcttcaacaaaggaatttgggaggtacacaaacatccagtccttaatggtattaaacatgcaacaggtattatttgattcaatctttatagcatcccccaatactcatttcataaaagggaaaactgagattaagggagattaaccaacttgccctaaataatgcaaatcgggaagcagagagcagggagttcagccaaggtgccctgggctctgtggccactctaaaacctgggctgggagcccgggacatgcctggcttctcctcctacccccttgggctccactggcctccagcagggagccccacacctgattcctggcggtgcccaccaagggcatcttgtccacggctgagcctcttcctgttgttccagagtcagacatctacgcagagattcccgacgaaaccctgcgaaggcccggaggtaggttctcgaccccgccacagcgaccgtagtcaaggccctgtgaaatgacatggcaaggactctggtgacaccacagggaacattcttttcctcctttatcctcccttcgtgctagacttagacagtggcaaacctgagatgccttggatttgaaagctgagatttttttttctctccctatactgattgaccttttgtgtgcccatggagctgtgcggggattctagtaacgtggacctgggacctagccttcagagggagcagggtgatggctcttccctgggtctgagacagtggaacattctagacccccatttccccagcccagtccctggatcttggctgaggtgttatagatctggtgacgcctggctttagagcctgcagacactcaggttccctaggggataccaccgatctctgtgatctgcgactgttttctctgtctgtgcaggtccacagtatggcattgcccgtgaagatgtggtcctgaatcgtattcttggggaaggcttttttggggaggtctatgaaggtgtctacacaaatcacgtgagttctaggatcttcccttacactcctcttccacatgtctgtagggtgagacagagctcgaatctgagcaggttggagttggcacagccttcatccacttggggccccttgtccctaagggcctcttgtccactgggcatggtggtatttattaaatactcaaagagtggtggagacaagagtcatttccaagaagggtagcaaaataccaggggtggagatataggcagaacctggagaagggtcagtattcttggtgggagaatacaaagggggaggcgggataaagacagttctgagaaaaggtgaggcaggatctggagttagtgtcaaggccagtgatggggcagggtaaggctgaccgctgtggtaacgcttctagcaggcccaggggaagaaagaaagaggcagtaagaatgaaaaatccaatgatagagaaaggcccagcccccaggcatgataatggcttgcaggtgcctctggctttgggcaggtcacacggcccctcagtctcagtgtcctcatctggatggccaggggcttgactcatttgaccactacagcccttttcagttctaacagaccctgatcaagaagaaggggagtggagaaggagaagagaggaagacaaaggggagaagaagagagacataggagaaagggccctttcctggcagcaaaatctgcaggaggccatggggaggccaggagggaacattctgctgagcactgggctggaccaaggggtcctgaacacactcttgttacagaaaggggagaaaatcaatgtagctgtcaagacctgcaagaaagactgcactctggacaacaaggagaagttcatgagcgaggcaggtagggacccctgagaccaaccaggcctccaagatgggaggggcttcagcctgggaagagaggggtgaacagtgcagggacccatgttggaggaggggttcccgtcctcccagctagaagagcaaaggccttttctgaattggacctttgagccgctccacctgtccctcttgccccaccacactgcagtgatcatgaagaacctcgaccacccgcacatcgtgaagctgatcggcatcattgaagaggagcccacctggatcatcatggaattgtatccctatggggaggtgagctggaggaccctgcgatgacaactgggctgcagcatggggggcattcagagcacagcccattcctcccagcttcctgacttctgtgttccactgaaataagccagaggccctgtttgtcaaggaaattgctggaacattttgccagctttgggtttgtctcccaccgcccccagggaagggtcaggggttgccagcaccctggtcccctggctccatactgggaccaaccaggggtcttgatggcacctccccattcctgcagctgggccactacctggagcggaacaagaactccctgaaggtgctcaccctcgtgctgtactcactgcagatatgcaaagccatggcctacctggagagcatcaactgcgtgcacaggtaggggtggagggagtggccagcggtatggaagccaggccttcaccagatcctcaaggcctctgggtagaagcagggcttgtgggtgacacagagcagtgttggaatcccagcaattggcccagcagctttgagcacttgagcaacctctctgaccctgtgtcctcatctgtaaagttgcaggcactgtatgtacctcatggggttgttacgagtaactctgaagtccgaggtgtctgtctatatatcaagaccttctagcccctcccctgtgagtgccaggaaatcgcccccaaccttgctcagagcttgctcacctccagctccctggcttggtggcacatggcccaggaagaagggactgggctggagcagggccaagaagatcctggggtcctagcccagacatcaccctggttgccgacacccctgggctgccaaatccaagtctccctgtggctgtggagttggcccctgctttacctggctttgttcccattccctgccatgagaacctgacccccaagggagtcagtggttgggcattacccaccattgacattggctctgtggccttgtgcctgattctatggaaagccacatcaggggataaaaccctgcattcattcattcattcattcatccaacaaataccatggaacacctctcagtgccaggcagtgacctaggctctgggacaaagtcgtgacgaaaacaagcaaaactccttttcctcgtgaagcttactttctagcatgagagtcaaactggagacatcaattgtcaggacaaaggtggtgggaggatagatttgtttcttttgtttgtttatttgaagtggccatgcttttaagtcatcatttcaactataaaaacaaacactagagagtggagcctgcctgtgagaagcaagcaggcaaactagtttggggttgggagtgatggcaagaacacagggtaaactgagtcagcggtgtgtctcctgggaggaatgagagctcagctctggagtagcctacctgtgcgacacccttttccactggtgagctgctgggcaagttccttcagctctctgggtccggtctcctcccctgcaccaggggggtctgagggtctctatgtcatgactcagggtgtgtgaagctctcgtgcgatcctggtatcctaagtgccccatcagagttagctgtgctgccgctgccactcctgctataccaaagacctaaccagtcctgtggaaatgcagatgagagagaatacctgtgttcagggaagtggttggagtttatccttgaagaatcaccaggtgacagcctccctggcatgggggacagtgtaggcaacagcacagaagtggagtgtagcagatgccaggaatctgagccaggcttcaagctggagatggatgaaggggtgatgggagacagagcccaacagcaagagggaaggagatggcaaagcacctgtgcatgttggggtgcagaggggccagctgggctcccacctgaggtgtgctgtggcaagaccactcgatgggggcagtgacccacagaagctgcccgattctgctctggagtccgagtccctggcttagattcttggtctctttttccatctgtctgtccatctctctgttcctgctcccatgggggtgggcagtgcctcatcctggtcttgatgcccttcttccagggacattgctgtccggaacatcctggtggcctcccctgagtgtgtgaagctgggggactttggtctttcccggtacattgaggacgaggactattacaaaggtgagggggcttcccagcctctgcattggccttggaggggtcgctgaagccaaaaattccagaagaaggaagtctacagttggacagcccaggctaagggtcttcagaaagtaggatgtatttctggataattctgatctttcttccctaaaaatcaacctctttgcccacccaaagcctctgtgactcgtctccccatcaaatggatgtccccagagtccattaacttccgacgcttcacgacagccagtgacgtctggatgttcggtgagtgctgatttgggagggcatgaaaaggtgttcagattctcacttctgaaccaggctaagggggtgggtgcagggagcaggggtctgacctccaccctccgttcccagggttctattttgctgtggccactgagaagtctcagaggtggggaggccagtaggggtaggaaggggagtgacccaggctaaggactggcctgggctgtgcaggctcatcttcctggaagaggctcttgtgacatgtgtgctccacctaccagccccagaaactaagacgaaactctgtgacttattctgagagaggtacaggaaggagagagagcaaaggcaggtgtagagagacagccccttacggaacacctcctgcaaaccatctcacttagtgctcccacagccaaccctgtagaacattattattactctcattttcctgttacgaaaactgaggctcagatgagtcaggagcctgcccgcaatcacacaggcaccaagtgttggtgcgaggcttccatttccagctttactaaggagtggctcccctccctcctaagagaagacacttgtggtcccaatagcatgccatgactgccacctcttgatcctgcagcaccctgacaggggtctagcgagcaaggccttaggtcacttactgcagaggtaggtcacttgtccctcgggcagaccaccatggtaggcaggaccccagggtgctggaggaggaggagggaccgcaggagctgctcctggtggagactgagtgctaatggcgatggtgcttctgggtgggagggactggtctcccccacccagggcctgacgctcccttacaccccagccgtgtgcatgtgggagatcctgagctttgggaagcagcccttcttctggctggagaacaaggatgtcatcggggtgctggagaaaggagaccggctgcccaagcctgatctctgtccaccggtcctttataccctcatgacccgctgctgggactacgaccccagtgaccggccccgcttcaccgagctggtgtgcagcctcaggtgagcatggagtgtgggctgtgggctgggggcccacccggctgcaccagggagcaagaccagcacacagagaggtttgcaccacatctccctaaagaagacgggccagggtcaaggacaggaggctgaagccaggttcactgtcagatatgagctcagagataaggcagccgtggggaagcctgactcatctgggcatctgtcaacacagagcacagagccttgttcaaaggatgtgctcagaaaatattttctaggttagactcaaaagcctgagccagactctcatcgaagtgcctgtgctctttgtgatgttgaggcatcctacctgctttcctctcgccttgtctctcgactttgatctttcctcccagatagcaaggaagggagtgatctttgacctgttttcaagactatgacccaggggccacctctcccttctgaatgggggataagggacctgagggcccgtcggtgcccaggagccatgattccctaggtctggggaggtcactggggaagaaggtcatctgtttcagaggttcagggtcccccagttttcttggtggcaagcctgccattagccctcctgtgggagatctgacttcttttggtttcctctggggtgggagtcagtaagcattttctataaagggccaaatagtaaatatttggggctttgctgtttatgcaagtctctgccaaaactgctaactctcttagctcaaaaacagccacagacaatacatcgatgaatgggtgtagctgggctccagtgaaacaccattttggatgctgaaatatgaatttcaaataagtttcatgtgtcatgaaatattttttgtcttttaatttttttcagtcattgaaacaatgtgaaaaccattcttcatttgggtccatacaaaaatagatgaaaggccagattttccctctgggcgcttatttgctgaaccctactttagggagtctggaacttaattgacttgaaaaatatttttaatactgtactttaatactgattttaaatactgtagtcaacatgttgccttgtttgattttagggcaagtaaacagtccctgaaaactgcctggtggggaggcaccccaggggatgccagcaatgcccaggccaggggcactgagggtgaccctgcatgttttctgtggggcagggccttcaacatcatctgtaaaacctctggcttaaaaggcatctctgttcctctctatcccttcagtgagcctcccagttaattctagactcctgtgttggtcccttgtatgggaggtttgagaagtcaaaaggctgcaggataaaagtatttgaaggatgtaatttgggaggttaaaagccctggggggatggagctgggagtcctgattcactctgaggccttgagagccacagggagctgtgcaggtgtctctcctgggctgagaggtgttcccatcatctcctgggctgagaggtgttcccatcagaggcatcgaccaggcctctgccacaagtggaggtgggagcaggtttctggtgtgatctggaaaacactgaaagactcagaagaccccaggttgcttcctcagaccaccacctgactcttcctccttagagttcagaagggatttgatcagtgtttcctaaccgttccagggaggaaaggcccttctaatgtcaaattttgagtgtctctgtgtaacaatagttatattttaaaaatcttttgctgaacaaaatgtagtgggctatataatgcatttttattatacataataaaatatatacacacttgaaaatatagtatcaagtgtcacatattcagtagtatataatacttgctacccatatgaacatgtggattcatgggcagtaataattccagagtcctctggggtctgtgattccaggttaggagcactggattgggtaagaaaggtgagaggcgcgcacatggctagcctgggagtgaacccacatgcctcattagcacataccggggatgcgttgggggatgtttcatgagaaataggagatgtagattctaggccagggccatgaagttggctgggactttggaaatctacataggggtttggtgccaatcacaagcccaggagggcaaaaggcctgaggagtggggctgcagtcaggctcctgctgcatgtttgggctgggactggctcaccaaggacgcttttccaccttggatccattcctgtgatcctcccaacctcagtgtggcctcagggcccatatccaagcctgtctcagggggctctccccaggacactctgcagtgaagatcgaaacggaaatgggacctagcaaccttgcccaggcctctctgggcctccacgaagtacaaagaggagccccaaggagcgtctcactttgacctagtttctctccttatctgacgtgactccctgcagtgacgtttatcagatggagaaggacattgccatggagcaagagaggaatgctcgctaccgaacccccaaaatcttggagcccacagccttccaggaacccccacccaaggtaagccaagccatggcctcataagtcctgtgagtcaaagcaaagccaggtccctgtctgatccatgtcccccttactgcacaggcaggatgccccctacagccctttctcagtccttcacccagcatccaccatcactgtcagcgtgtcacatcagtgccctggcaggtggacttggagatagcagccaccttgtgggatagctgggtcaagaatcattcctcaaaagtgtcccctgaggggctgggcttctcttctaggtgttttcttaggaacaaatgagatccccctgaggacacatgggtgggaagtatcctgggtcttttaggtccagtccctacatctataccccgcatggccaccctgagctcaggagccagggccctgctgccattaggtgggtgggtctgagaggccgtgcctgtcttagtcaactggagctgctgcaacaaaagaccacagaccaagtggcttaaacagcagatgtttatctctcacagttctggaggctgggaagtccaagatcaaggtgttggtgtcttgtgagggctctctgcctggcttacagacaaccaccttctcactgtgtttttacctggcagacacagagtggtctttctttctcttcttataagggctccatcctcataacctcatctaaccctaattacctccaaaaacctgcacttccttaatgctatcacattgggggttcaggcttcaacatgcaaattgaaaagggggacaaatattcagtccataacaatgtctgatcccatctaaggccttttctcacttgtccctcttgcctggcatgtcccacccctccccgcgggcctggctcagcgttcatctcctccatgcagcttctgtgaatgcccaagcccctggtgagctcctacctctgcatgcctgtggctctggagctctgacttggtgggtgctcccacgtatagggaagcaacacatgcaccaatcattaaccctccaattagccatagccccgggagggcagtgaggtggcttctttgtaccttccaccactcagtagataatcagtgctcaataaatggatgcaaaatgagtttcatgacagctttgtccctcaactttccttcctttggaacaagcctgaggtgtctttgacctgatgttccccttggtgagttgtgttcactcaaggagagggacagagactgacccatctgtgttctctctccagcccagccgacctaagtacagaccccctccgcaaaccaacctcctggctccaaagctgcagttccaggtaaagatagaaccagaggacgggaacttcaggtctacctctcatccaggtcctgaaactccattcttgtgccttagaggagcagcagtcacccacttgggtgatggagatggcctaggttgactcttctttggcacccagaacagaatgcagactcagatcacaagaattaaaatgcagttctcccaggctgtgctcagctaagacctgccttaagccccatccctctgtctacatcatctgctgctttgtgtgcctgcctgctgctctctccccacatctaaggcctccctggcctccttaccagaaggaatcccagggaatatttcccaacaaatggagtagctccatgggactccccaaagaggccccatccagaacctgggtggccattgaagagacagcagggttttacctgagctttctcccagctccattatccccaaccatgactctttcccaggctgtgcgtccctgaccctgaatgtctctgttctgtgtctctcttgcctctaggagagagggagtccagtctcctcttatttcttctcttgcatcccccagctcagagccactgctcaaaaattgatcccctcaaccaccagaaataatgtccatttagttggtgccctttatagaaaggtggtgtcccatggtcctatatttgttctcaaggaaatgcctgagtgccaaaacaagaccatctaaggactaatagataaatcctcttcacgtgaagagaaagcctgattcagaagatggaaaaatcgttctgaaaaaaaagagatatacccatgtgcaatatttaaaacagggagttaggtagggtggaacacacctgtagtcccagctactaaggagggtgagatgggaggattcattgagctcaggagtttgagaccagcctgggcaatatagtgagaccccatctctaaaaacaaatagtaatacaataaaattgtgatatacttattttttaattaaaaaaaattcaaggcaggcatggtggcatgcatccgtagtcccagctatgtgggaggctgaggcaagaggattacttgaggccaagagtttaaggctgcagtgagctgtgatcataccactgcatcccagcctgggcaacagagcaagagcctatctgaatttttaaaaaacaattcatacatatctgtataaattggtgtgttaaccacatcagtcagtctgtaatgcaactgaaacaactattttttgaagagtcctgaaggaagagccctggtctcagtgggtccgtaaccagcatggaccccactgtgtgcagagcatcttgggggaatgttggatgaatgagaggctgcactgctccaccatctctctcggagcaatggaaggcccacgttttgttctttattaactcctggagagcaagccccattccctgtggtgctcatgcatagtttctttgtgctcgtgtttgtagcagctaattgtctaccttctcgctttgtcccgtgccttgtgcttctttgcttttcctgaataggttcctgagggtctgtgtgccagctctcctacgctcaccagccctatggagtatccatctcccgttaactcactgcacaccccacctctccaccggcacaatgtcttcaaacgccacagcatgcgggtaagagggctctgcatgctggtccctgcccggactgaggaggctgctggagggaggtggccggggacactggaaaccccacgtcctcagctcaggagggcccttcctgttcccatgcaccagtcaggccactgaggtggcactctgtgacttccttccctttgcaaacacatcagaggctggcagccacaccaggccctgctctggaggacaccagctggacctaacctgcccttggccatgctggtgctatggctagagatgtacaaatctccccctctcctgagccccaggggtagggggatctgtggcagcttggaggctcctaggcagggcacagcacagcttagtggtgctggagagtatccttcctaaatgatggctttgggtgtgaaatctctcctcagtcaaaggaaaggctttcttgtggctgctcccctttctgcttttgttcaggctgctgctgggtgagaaggagtttagggctagtgggaatacagcctcattaactggctagagcagggacctaagccacttcccttgtcagctctttgtcacggggggttgttaactgctggtgaagcccggagtgcttcatggctggcttctgattgtcaggtcttgtgtgaaaaagacacttttgcttataaccagatgcccactggtcaccaaccaccttcttccatacaaatggcccctagtggtcagttgccacgaacacttgatctattttactaaaccaactaaaacacttattttagctctaactctgcatgcatgcacaatatttcaggctcactaaacatgactaaaatattttttgaaaaaaattagatgtttatcataatatatttggaagatgtaggcaagtatgctgatattactttcatgccattatgcttaatttagtagaattttgaaatgagcatgataacttagaattccagacactaagattttttgtgaaatcaattttcctctgacctacctcgtttttctcttttatattaatttaaccaatttctgtctttgcgtgtgcttaacaataataaactacatttttaggcatgtgctataatttaggctgtgttcggtttctccaccctcctgcctttgactctctattcataaatgattgttttagtaagttttgctttaaattgtgttattttagaaagaagctattttgcacatttgaggggtagcattgccttcgtccaatttcctgcttctccacaaggaccttgttcagttccataaagagattgtgcagtaggaaaaaagaccttttgtatcagggctttagaagtaattgacataaggaaaatctgcctaaaagaacataatgagcatgtctttaaataaacaaacccaaaaaagttaaaaatataagctccattttatgacacagatcagaaacactgagaaagtctcttccaggtagaatgctgagaaggtataataggctcctcacaaagcatttggaagcatttaacaaaaatacagaggtggtgttcccagaaaaacagtttttctactgagtggctctatagcctgactcatcagggagtctgtgggatgccataccagcattgggatggcagcagtctctctcctgaagacctcacaattgagctttaaaaataatacaattcaaggccaggcgtggtggctcacgcctgtaatcccagcattttgggaggccaaggtgggtggatcacttgatgtcaggagtctgagaccagcctggccatcatggcaaaaccccatctgtactaaaaatacaaaaaattagtcaggcatggtagtgtgcacctgtaatcccagctactcaggaggctgaggcaggagatcacttgaacctgggaggcagaggttgcagtgagctgagatcacgccactgcactccaacctgggcaacagagcaaaaccctgtctcaaaaataaaaataaataaaataaaaataatacaattcaataaacagtagggcttgctgtgattgctggacgctgtcctcggtgctgaaggggggaggcgctgctttcaaagcgcttacagtcgaccagaaggatcagaccaggtgcacacttacctgtaatgcaagccagaaggtcgtgggtaccacaaagtgggagttcagagaggaggacaaccctttccagcttctatttaaaagttgggccttgaaagatgggaaagatgtggacaggaggaaactgagattcagggaatggaagaggcaggggcttcagtaggaggcaagactgagtggtgggaaaccacaggacaagtgcaagaactgttggactacagcaggaagggtacttgtggatgtggaaataaagccaacagatgggtcatagccagattatggaaggtgtcacaacttacgagagtcattttaaaacaccatgagtacccaattccttttaagaatagaatgtaatgagcaatgtaagtatccattacctaataagaatattggaggcgcatttcagcaaaaccaacctcaaagagattccatttttttgagtgttcatttttctccttgagttttattatgaaattggaaggcatcaggatgtctcctaatctgtgtttgttagaatatgtggtacgatcaggcctgaggcatgctaggcattttagtggtggaatcttctgtcaacacttataaacttacaaatacttacaaatacttgtagaattttcttgattctagtagctcatccaactggtacttaccatactcttccttaacccatacatttttctcacatccagaaatccctaactctatatttagaacttttgacacttagttcctgtttgtcactatttgtcaacagcctggggcagccatgccattgtgtctgcaggtgttgacatttaactggggatttttatggccttaaaatgtcctcatttttgagtatcagcctctgatcaacaaaacctattttatttttatcaattccatgattataaaatactcttatatgctggaatttgttttcctaaaataaggtctagctcagtggttctcagctaagttattttccctctgagaggacatttgacaatgtctggcagcatttttgttacaactggggtggtgctataggcatatattgtggggaggccagagatgctgctaagcatcgtacaatgcacaggaaattgccctggaaataaggacttgtctggctccaaatgtcagtagtgctgaggttgaggagccttggtctgactagtatttacttaaccccacgagaataagaacatcgtatagtttaacatcactgtcctcccagcacccagccctgccacatagtagttgcttaataaataattgttgaatagattaatgaataaatatttcagcaagaaacctaactcatggggaaacgtgtgattagaaattgaggttagtaattgaagctcagtgtgcactaagtaaaacatcccaatataaccacttttagaccatattgtaatattcaagtgtgttttgtagggcttagtgaggaaactcttttaagaggcttggtaggaattattgcttgctaaaagtagatagagataattgttagcatcttctgcaagtgacctgtatgcaaatggccacttcaaaggcaaggaactgagggacctgccagcttagatgtcacagaagaatcctgccctagcaaaggcaactcctgggctttgtgcaatcaagaggatgccaataatattcctcctccatctgtccaggaggccagggtccccatgtgcagcacaacaagagcaaaatagtttagagacactgagcagatatttatacaaatgaaccgtgggggaagactgaatgaaaataggaagacatgcaatactttctgtttaggaactagcagctaaaattatgaataggtccaaagccccagaggtaagttaaagcaagagttagattactagatctagggagaggaagcatttatcttctctctatcaaactatatttctttgaattttgtttttcattttatctattagttcatgaatttcttctaatcattggttaaataactcaagctatgattgcatttatcttatctctatagagctgtatttcatgaaattttgttccttattttatctcttagctcatgcatttctcctaacatttagttaaataacccaagctattatcttaataaagaatgtgtcttaataggaaggcatggttggtgggtgcatgctgttgcttgttctctcaggctctgctcattcatggacacacgtgggactgcacaccgtgaggctagaggcagcacccctgtctctcgaagcttccagacctgccaccttggtccttaggtggagatagcatcagaagggtgtgatgctctccaactaagcaaagccagccccttggaaaccctttggatgcttttagtagattttaaaatagattttaatagactttaatagcttttctttttaaaatatattaaatgacaacaaccatcacaaacactgagataatagtagggcagtcacttggtaaaatatcatgagcagatcgtgtaatcatttgaatacagcgcacgttgagcagtgggttcttgggtttggtatcacattgcaacgcagatacatgctcggggctgatactggatagctgtctgcacatatagctctgggtttaagaacaaacttatgagaaaaaagcagctggccaggccaaggcttgcagctgccatgaggttcttcagaggactgtccctccctgagtctgagagcagggctcattgcatcctctcccttctctctgccgtcctcccaggaggaggacttcatccaacccagcagccgagaagaggcccagcagctgtgggaggctgaaaaggtcaaaatgcggcaaatcctggacaaacagcagaagcagatggtggaggactaccagtggctcaggcaggaggagaagtccctggtgagcaccccaggaaggatgtcggtgccctgcacccatctgtgtcctcttccacctccccaggtggctggggcaagggtcccctgcattcttggtgctttcagctccagaattcttagtccttcgctcttgtttcttcctctgcaggaccccatggtttatatgaatgataagtccccattggtgagttgccaggagaggccgcctcctccatgccaaggcctgggaaggcctcgcccaccataggaccccccgcccaacttgctcctacccccaggcctgcccagctcctcctcaatggctttccatgttgggagggtgtcttttccttttctgccaatccctacatggcccttttcctgaactctcctgtgatcgtgcccttagtgctgtctgtggccctccccagggcccctcggcctcccagaaaggtcacattgggtcacgagctgctcccagaagcacccccgaccccatggctgtaatctctaaacacacagtggagggactggggaatgggtaaccagggagggggttgtctccacagccgcatgagtgacgttcctgttctctttcctccttcctccagacgccagagaaggaggtcggctaccgtgagtgttcccgcccttcttcggggggtttcctcttggcaccttgtgcagagccaccatccttgcccaccgcccagggcagggagcagcggagtctgtctgcattccctgcagcatcggccatgatttaattcagagcatgtggggcaggccagcttcccctccgctccctccaccccattcctctccctgcctagcaccctgcccttctctctctcagtggccacatccttaggcccctcctcagatcatccccctcctgcattagtttggaggagctggaaattctctcttcctcatttcctgctctgttggaagctcccgtgggaaaagttaagcagtgccacctgcctgtcccagttcagattcatcttctgtaggcctgagggacagaggagagaaagtgagaggggcagctgagccctcaggctctctccagaagaccctgttgcaggcagggagggaagagccagcagtaagcccggggcctggaggggtggcattgaggaggaggatgatgacagccatcacagagaactggacacaagtcaggcatgggcctgggaccatttattatcttctgaggcacagggtgattaggtaacttgtccaaattcacacagctaataattggcaaagttcagatttgaacccaagccttctgactttagggtcccttctgagctcaccctcttatcttacaaatgaaaattaaggctcggaatgtgagctgcctagagtggtcacagagctctttggcggcagaggtgagaatagaaggccaggtgtggtggctcacacctgtaatcccagcactttgggaggctgaggtgggagggtcacttgatcccaggagtttgagactggcttgggcaacatagcaagaccccatctctacaaaagattaagaaaattaggcctggtgatgcatgcctgcaagcccagcggctcaggaggccgaggcaggaggattgcctgagcctagaaggtgaggctacagtgagctgtgatcacgccactgtgctccagcctcggtgcaagccctgcctcaaaaaaaaaaaaaaaaaagaacaaagtgtgctgagtggacttttatgtgtctttgctcttcaaagtgggagtgaatagcatgtttctgctgcaattttgcttccttcagccccaaacactctgggaaaaccattagagaatccacacaaatttaccccatgagctgctgtctccccaggtcaggggcaccacagacacctgctggcatcagagagagaggtttcttcctttcagatcacccagtactgttccttaggcctggtgtccatcaggcaggaagcccaagccagagctggggcaccactgcaatccccccatcttgctgggactttgcctttttcttcctataaaagggacaacagtgctgtccctgactactgcaaaaccagggagaccaggaggttccttcccctgcccgcttcctggattcagagttaatttccctgaagtctcctggtggtagaggggaaggggctcatttgatgtcagcaggtacgaagggaagggttggagtgctgagaactgccccccacttgctgttctttttattgcagtggagttcacagggcccccacagaagcccccgaggctgggcgcacaggtatgtgttggctctgctgaaactgataaatgagagtgggggttgcacaaaactgaagaccatggtctatgaaagattcacagttctcagatagaatccagttcagtgtcctcatgatacagatgaagcccggggttagggggcgggtggcggggtgccttgcctaaggccacacagctaattcatgaaaaagcaagaggaagaaccaatctcccactctccatccccctcccagacttggagtagagctccctggtccagcttcagggaaagtggtgtgggctgcttccctcttctgagcctcctcacttggtttccagcatccattgtccttacagccatctggggtggtgctggctttctttcctctggaacagtggttctcagccttggctgtccattaaaatcacccaaggagctttgaaactctctgcataggccaggtgccgtggctcacacctgtaatcccagcactctgggaggccacagcaggaggatcgcttgagcccaggaattcaagaccagcctgggcaatatagcaagaacccatctttactaaatttttttaaaaaagattagctggacttggtggcacgcctgctactcaggagactgaggcaggaggattgcttgagcccaggaggtcaaggcattagtgagctatgactgtgccattatactccagcctgggcaacagaatgagatcctgtctcttcaaagaaaaaaagcctgcctgcaccctatgtccaggtggtggttctaatagtctgttgtgaggctaccactagtattccgttaaggctccctggctggaaactgccccagaagtggacagaggcaatgcaccccgggacagggcacaattattctaaagaagagtcctttccaatcgggctggtggtggagttggccacagtggtgcctgcccaggaaagaatcattccgtgcccctggctctccccaactcactggccacctgcgtcttcccctcagtccatccagcccacagctaacctggaccggactgatgacctggtgtacctcaatgtcatggagctggtgcgggccgtgctggagctcaagaatgagctctgtcagctgccccccgagggctacgtggtggtggtgaaggtgagagcagggctgggttggggaggtggaggcggctcaagtccgccctggaaggaaaggggactgcgcttcctgttggctggcccagcagatcctcttagagcaagctgggccaggggaattgagtcccaggccactcgcgggggacaagcaccaccccaggagagctcttcccaggggaaacctggctctctccaatagctaggagtggcggccatcctgcccctttcttcccccagaatgtggggctgaccctgcggaagctcatcgggagcgtggatgatctcctgccttccttgccgtcatcttcacggacagaggtgagcgtcccattccagacagcaccataggctgttgctttgctcctgcttatgagcctcattagaggctcatgatggctgcctgggcaacctcatgtctgtccactgagtccccaccaggtgggttctatgtggcttatccatcagctaccaccagagggctgagagggcacccagggacctggccagaggctagcagggatttcctagttcaggtctccagatgacggcagtgaattctttctgagtttatgctaaaggggacacaccttcctttcccccctcctattattgtttatctggttgccttgccgtctgtgttaagattaacatggatgtgtcatagaaatatcacttaaggtttctttatttaatctgattttctttatttaaataagaaacaatcactgaaaatcaaaacaagagtcttggtgctccatgagatggttcctgtagtagggagagtaaaggcccccaaagatgtccacatcctaagccctggcacctgaaaacatgccaccttccatggcaaaagagactttgcaaatgtgataaagttaaggaccttgagattgggagattgttctcagttatcagactgagcccagtgttgtcacagggatcccaggatcaggggtcctgatcttacagggatctctgtgacaacactggctgggtgtggaaactcacatctataatgccaaccatttgggaggccaaggcaggtgaattgcttgagctcaggagtttgagaccagcctggtcaacatggcaaaaccatacaaaaattagctgggcgtggtggcctgtgcctatagtcccagctgctcagaaggctgaggtgagaggatagactgagcctgggaggtggaggctgcagtgagccatggtcataccactgcactccagcctgggtaacagcaacaccctatctcaaaataataaataaaacaagagggaggcagtgtgtgacaagagacacatggtcagggtgacagatgtgatggatgaaggaggccgcaggccaaggaaggcagcagcctgtcagagctggagaaggcaagtctcctctgtagcctccagggagaacaagccctgtggccaccttgactttagcccagttggacccacttcagacttttgcccttcagaactataagacaataaatctgtgttgttttgcgccactaaatttctggtaatttgttgccaaagccataggcacacaatacagtgccatgggacgtttgttggttctccgtctggagccctttgatccactgcctcccagcagccagccctgcggcacagatgactaccacatcccaccactgtccccactgtcagtggccacccaaggaaggagaaggcaggagagtttgggccaatttctggcctctctctcaggggcagtgacaacacatacaggagccctaggtggggctgtggggctgtcttgtctcatttaagagctccttacccttgggatgccaacccattcattcattcattcattcatctacttcatttgtaaatacctcttgagcaccagctatgaacaggcacacctcattttattgcactttgctttaattgcacttcccagatatttcattttttacaaattgaacatttgtggcaaccctacaatgagcaagcctattggtgccatttttctaacagcacgtgctcactttgtgtctctgtcacattttggtaattctcacaatatttcaaactttttcattatgattataactgctatggttggtgattggtgattggtgatcagcgatgttagtattgtaatcgttttgaggggccatcataaactgtgcccacataagacttatcaataaatgttgtgtgtgttctgactgctcctccgaccatgcatttccctatcctctccttgggcctcccttttccctgggacacaacaatattgaaattaggccaattaagaaccctacagcggtctctgcatgttcaagtaaaaggaagggtcacccacctctcactttaaatcaaaagctagaaatgattaagctgagtgaggaaggcatgttgaaaaccaagacaggccaaaagataggcctcttctgccagttagccacgttgtgaatgcaaaggaaaagttagctgctccagtgaacacatgaatgataagaaagtgaaacagccttattgctgatatggagaaagttggagtggtctggatagaagatcaagccagccacaacatccccttatgccaaagcctaatccagagcaaggccttcaattctatgaaggctgagagagattcaggaagttgcagaagaaaagttggaagctagcagaggttggttcatgaggctcaaggaaagaaatcacctctgtaacataaaactgaaggtgaaggagcaagtgctgatggagaagctgcagcaagttctctagaagacccagctaagatcattgatgaagatggctccactaaaccacagatttttcaatgtagatgaacaactttctattggaagcagatgccatctaggactttcatagctagaggagaagtcaatgcctgtcttcaaagcttcaaaggacaggctgactctcttgttaggggctaatgccagttgaagccagtgctgattggccattctgaaaattttagggcccttaggaattaggctaaatctactattgaggtttactactcagaaaaaaaagactatcttcaaatattactactcattgacagtgcatctactcaagagctcagatggagatatagaaggagattaatgttttcactgcatccattctgcagcccatggatcaaggagtaatttctactttcaacttctattatttaagaaatacatttctaaggccatagctgccatagataatgatttctcttatggatctggccaaagttcactgaaaatattttggaaaggatttaccattctagataatattaggaacatttgtgattcatgggaagaggtcaaaatatcattaaccatttggaagaagttgattccaaccctcatggatgattttgaggggttcaagccttcagtggatggctgggtgtggtggctcacgcctataatctcagcactatgggaggccaaggtcggaggatcacctgaggtcaggagttcaagaccagcctggccaacatggtgaaaccccatctctactaaaaatacaaaaattagccaggcgtaattgcaggtgcctgtaatcccagctactcgggaggctgaggcagaagaattgtttgaacccaggaggcgggcattgcagtgagttgaaattgcaccactgcactccatcctgggcaacaggaacaaaactcagtctcaaaaaaaaaaaaaaaaaaaaaaagatcagattcgcattttagaaagtatgaggtatgaggggatgtttccatgaagggacggtcaggctgggcttacacagggttggctgggttctgagatgtctgtgatgtcagtccttgcagacctgactcgaccctgcacggggtgttgcattcagccctctcctaggtctgatttgcttccagggaacttctgattgctttggccagcatgcaggtggacacctctgtggcttccctatcctccaagcacagactttgtggcctctcaacctgtcctgtgtgatcttcctacagatcgagggcacccagaaactgctcaacaaagacctggcagagctcatcaacaagatgcggctggcacagcagaacgccgtgacctccctaagtgaggagtgcaagaggcagatgctgacggcttcacacaccctggctgtggacgccaagaacctgctcgacgctgtggaccaggccaaggttctggccaatctggcccacccacctgcagagtgacggagggtgggggccacctgcctgcgtcttccgcccctgcctgccatgtacctcccctgccttgctgttggtcatgtgggtcttccagggggaaggccaaggggagtcaccttcccttgccactttgcacgacgccctctccccacccctacccctggctgtactgctcaggctgcagctggacagaggggactctgggctatggacacagggtgacggtgacaaagatggctcagagggggactgctgctgcctggccactgctccctaagccagcctggtccatgcagggggctcctgggggtggggaggtgtcacatggtgcccctagctttatatatggacatggcaggccgatttgggaaccaagctattcctttcccttcctcttcggccctcagatgtcccttgatgcacagagaagctggggaggagctttgttttgggggtcaggcagccagtgagatgagggatgggcctggcattcttgtacagtgtatattgaaatttatttaatgtgagtttggtctggactgacagcatgtgccctcctgagggaggacctggggcacagtccaggaacaagctaattgggagtccaggcacaggatgctgtgttgtcaacaaaccaagcatcagggggaagaagcagagagatgcggccaagataggaccttgggccaaatccgctctcttcctgcccctctttctctttcttcctttactttcccttgcttttccctcttttcttactcctcctctttctctccccaacccccattctcatctgcacccttcttttctcatgtgtttgcataaacattcttttaacttctttctatttgacttgtggttgaattaaaattgtcccatttgctttgcggtttgttttgtttgtttgacctgccctttgggggataatggggactgtgagccaagtcctggaagaaacctattgtgttcatgttggacagagatcaagggctatccagcgctggtcatcagccaaggaggtttgaatggtgatatccggcagtgggtcaggggtgtgcgctggcccttttgcccttgcagggacagtggggggcaactttccaggagggacccagagcagtcccctccatggccacatgaggaatgccatgtcatttctctcttagtgggcccccaaaccacccaggctctggaggggcttgggtgacactggcgatgttgaagtgcagctggcaaggagggggtcgcacagttgagtcagcagtaggtgcagctttatttaatctctttattcacatgcaagatggatgggagacatggataacagaagtgaacatcactgtctcaggagagtgggtctgggagcctggacccgagagctctgaggcctccggagagcaagtgggaggagagggggcgctgggggctgcatgcacacgagtagacaggagccagagaccagatgtgccatgagcaggggggttgtgggagagaagtgaggcatggcagggcctgggccagggcgtcacagccaggctggtttcccctgagagtgtcagggagagacattttggggtttggaaggaggggacccctaggaccaaaaggaaactggaagctcgccctgctcggcttcctgcctggagcctccatgctgtcccgagaacccgatgcccacatctgttagctgccaatgtcccaccctccagtctggacagagttggggggaggtctgttgcccgatcccaggagcagcagctcggcctgggatcctgggtgcagcctcagactgtggggtggtgcattgcattccaaggtgcacacacaggctgctctgaagggttcagagcaggtcaacacacctcggggctctgggagagacgaggcaggctgataagggacgggaccacagctttgccatctacacaacagtcctggggcccaaacaatccagcttgctcccctcaaccactcagaacaaacgccctaagtgctgaccccactcacccggcgctgtgctaggtgctgggggtgggaaaaataacaggcagagtacctgcctttgagaagttcagaatcaaaggaactaaaggcaaagatcttcaactcccaagtgaggcctcctcctgatggagccaggcacagggaacagggttcctggggagggaaggaggggtgaagggagggaggacaggccaaatgagatgagtttgaggtgggtcaggagcagctcaggatggtctttcttgtttgcctgctgcacgcgtagggacatatggagcccctgcaggccatggctctcagctctgccagacctcctgggggccggctggtgcagagccattttgcagcaaggaaggagaggaatgacgtcaaggagaagcctggaggctcaaatgtgcttccagatggatggaatagcccagccacctgtatccaaccatccatccctccccggtagggaagatctgccctgtacctccacatcaggtgcaggccctgcctcccgcttcctccccttccagaagagcccttattactcccctgctggaccatacagctcagcaccctgcaaactcggacagactccaaacttcaaccccagcctgacttacagagacctcacctggctctccaacctcccacctcacctggctgttctccctggcactttgggctcatctccaaatctaaacattgttcaaagcccttccacatccaagaaccctcccctttgcccccacggcccctcctttgaggtctgcattcccttcctcgtcaccctggccccactgtccccctggttgacccttctgtcacttagggtctgcactgctcctccaggagaatcttactctgccccacttggtcaccacactattgcgaccttctgcagagcttccccagctcctccgtatccaaaacagggctttgcacccagcaggctgtcagccctggtacaataacgttaagctggatggaagcctgcaatccctgggtcagtgtccagactccgcggagaggcacctgctcatcccaaaggggacaccagaggcagctgtagcagagacggtcaaaagatggtcagcgggggtgccctgggagccagctcgagggaggtgcagtcagatcattccagctaggaacggaggcagaaagaggccgatggtccccaggaagcagacgatgataaacagccagaggaagatcctgtcgatgaccatggcaacatacttccagtcctccttcacctgtggggaagacagcacacagtgacaggggccaggcctgggaaagggatgtgttccccccattcacagcccctgcacaggcggccactgggggcagcagcaactgccccacagagaccttggggagcaaaggtcagcacagggagcggggtgagtggaagggagggacgggctgtttcaaggctccagtaagctccactgatgattcccctcccatcccagcccctccacatgcccagacctgtccatattatgctcctagactataggtaaaggaggctagagggacgcaaggaggcggcacgaccacccaggggcatgggcccttctagggggcctgcagtgacttcaatgcaacaccagactttgctgctcacaggttgcctcctcacccacctgctggagctggggagagggaaacaggcgaaggtggttgggaccccaggcaggctgggggtggggcgggggctttgtagaacttgggctcacagcccagacaagggagcctggattctccactgctcctggatgacatcatgattaattttcttgtctgttcatcaaggccactcagtaataacctcccggcctttcatccttccctaggcttagtagaattttgtgctagagtagcggcctgctcaatggcagacaggagctggggcaggggtcagggtggggccaatgccatggcaggggcgggggagcggagtccacctggcacaaccaagaatctgcagggtttatggttgaagagtgaagtttgcaagatcctcaggagcccatgaacaaggaggcggaggaagagaccatccaagacaaaagacaaaggctgacactgcagcagctgactttctgggtctctcctgaaatgctccccctgcctgccgccacctccaaggcaatggtgggagctggcggcgtgagggaggcacggggttcagcatctgggatcctccctctccggctctcaggatccctgttaggctgagctgctcatgcctgactccgtggtgtgtaacatgccacgtgccaataaacgtcctcaaagcggccagctacatgtgctctcttgctatttattccatctaaggaccatgactgaggaaagtgggccttcacgagaggggcctgggctgcccaagctcacactctgcggtaaggtggttccccgctaagttggtggggccacccaggctggcgcctctcccaaccccaacgcaccgaagagtcagcatcctcagaccgcaggtggtcggcaatgtagtgcacaccttccagtgccttctgcatgtggggtgatagcagcagctcaccctcctgcagcagagcctcagccttgggacctgaggccccagagtgcaggtggccgtggctgcagagggtgcccacagagggggccacatgacctgcacatgcccatctgtcctcctcctccaccaccacctccctctcctcggcatccacgttgctctccagccagtgataagaggggctgagcttcaggcgtagggggtggcagagctccacgggtggtgggggccggttcatcagaagccaccggggcacacagcccagaagggccccccgcacccagtggggcatggtgtgggtgctgggggagcggtggtgcacattgagcacgaagacggtgatgacgatggacagggtgacgaagatcatggtgaacagcaggtactcgccgatgagcgggatgaccagcgaggtggacgggatgatctcagtgatgagcagcaggaagacggtgagtgacagcagcaccgaaatgcacagcgtgatcttctcgccgcagtcggagggcaggtagaagaccagcacagtgaggcaggagatgagcaggcaggggatgatgaggttgatggtgtagaagagcggcagccgccggatgacgaaggcgtaggtgacgtcggggtagatctcggcgcagcagtcgtacttcttgctgttgtaggtgcccgtggcattgacgatggcccactcgccgctctcccagtagtccttcaggtccacagtctgctccatctgctccaggtcgatcttggccttgtcataagtccaggagccaaacttcatcttgcagttctgctggtcgaaggggaagaaggtgacgtcgatgctgcaggagctcttgtagatggccgggggcacccagtgcacagtgcccgtggagaagaggtgggccttggtcatgtgggtcactgcaaactccccatctgcactgagaagaggagaggagctggggagacccctgcacacccacctgcctgagccaggctactcagagagctggcagcaggggaacccgaagaaccaagtcagacccggccacactggcggggtttatttatgcaagtgtgtaagtctcccccggcatgcacatttatagccactgagctgtcttgtcaattactacctttttaaatacaaaaggaggaattgtgaggaatagaaggaagtaccaagaattctaaaaacaaccactaataacattttgatgatatatatgtatatatataaaatgtaaaacgattatatatacataatctatcagtatatgacaatcatatatttgtgatcatggggtatatgttgcttgattgcctatttttattcatttaatattttattttatttgcagtaaggaaagagttgaatagacacaaggccagccacgccacgggggagaaggagatagcattcaaagcatctcttccaaagttcgtgcgtgttaggggtttttcaaaggcagttttggggaaggggtgggtgtggccaggtgcttgctgctgattggctgggtggggatgacatcacagggggtcaaagctgtcctcctgcgagctgatcatttaatatattagagtgatatctatgagtctgtttttcttccctagcagatgatgagtcggtcccttaggagggcgatccctttccacctgggatcatccttgctcagaagagacctaacacctttgcgggtgaagatactaccttgaatgtatccatttaacatgcgtttttgagcccctcatccgctagggcctgtaccagagctgtgcagaagaggaatatgagaaaagtccctgcctttaaggagccatgaggagatgagacgtctccaggaaccactgcaacatcaggcaggcagttggcaacactaagagggcagtctgggtgctccccagaccctttgggggaaaactcccttctgggaggtgagcagggtcatcgataagcctgccgtttgcaaaaggccttgactgatggtaggatttggctgagaaatgggcagagagccttccagtagagggtcacacagggacagagagtgtgaatcaggggtatcgtgggactaggcattcaaggacccacaaggagtctggggacactggaatagtggtgaccagtcaggtagcacttcctggaagcctcagcccctgattccaccaggaggtggctcggtgggctcctgctctagtctttaaccatcctccctccccttctaattcccacagtcaatcctaaaatccaagaaatcagaagagtacttgggaacagggggcttttttcccccatggagtagttccatggtagagatatgggcaggctggaaataggaactttgaaagggagtaacaaatacattgagacaaaagttaaaaaaaatttttttttgaggcggaatctcactctgttatcgggctggagtgcaggggtgtgatctcggctcactacaacctctgcctcccaggttcaagcaattctcctgcctcagcctcccaagtagctgggactacaggtgccaccaccacacccggctaatttttgtatttttagtagagacagggtttcaccatgttggccaggatggtctcaatctcttgacctcgtgatccgccggcctcggcctcccagagtactgggattacaggtgtgagccaccgcgcccaggcaaaaacaaaaaatttttaagcattttgtttatcacaaacaatgaccactagatggcaacatgtgctcacttgggggaaggaaccttgcaaactctaagatgccttcctcttaaccttgagtggggtatctgggtggaggggatccatctctaaatgtaagcaagacttcggcttggaattttgtcccccaccaacatttcttgtaataaatcaggtaacaccggctgaagtcttattggataattgtcaaactcgaagtcatatttgatgtaggactttgctcctgacctctgccacatgtacaggaagtggaaactagaaggaccctgggtgccagctatggggcacagagatacgacagggtggggagttcatgagtcctgcagcagctgcaaacactaggcacctgctgtgtgagagcggccagtgtaagaacccaggatgaacacgtgttccccaaaatggcttaggtgcaagggcgtagttctgaccagaactggacggtgtaaaaaaaaaaatctgacccatctgaagacacaaaatccagaaatgggttgtttttccttttatttctttctttaaagatagcatttccaaagtaggatcaaatgaattgggaaatgctgggctaggtgggtgtctttgctgcagaacttcaaataacattttttaaaatgctattgtgctctgccattttccaaaggacttgggtggggatgggggtgggtgttgtgacatacaatgttatccaaaattacttgaccacagaaccctttttcatacctatttataactcaaagaagccatgctccttacagccccaccttagaaaacctttttagatgaacataacaccaaatatcttttcattttaacttctttacttctaagggaagaattgtctgataccaaacacagaaatgaaattatagatgtctatttattccatcaaaatattttttattgatttatttttgtcccctggggctctctttagactcctctgccttctattaacttcttgtcattgtggtcaaagattactcctttttagtcttgaagacaactacaaaacaacatgattgggaaaaaggaaactgcataccaagtgagcacatgccctttgaaggtgctggcccgatgctgcctgcctgtctgaacaacactgccacccctcacaacttcaaccccaaggtattgttttttgagcctgcaccaaatttttcaaagaatactcagtatggacaaatctctgtccctctagcacagtgccaggcactgatacctaaaaggtgctcagctgccattcattttggtgtagagtgagaacaaaaggaaagaaatgaaggaatagagagagaggtaggggaggcatgctcagcacagcagtcgagaaggaggcgaggaagctgacaccaggggggcccctcccaaggccatggacccggcccctgcaagttggcctcccctcatccccccaggaccccaatggcttcctacttgttgtagagaacaatgtcggggatccagatcatctcagaagggaccctgagagatgtgatgttgccaaaatcagcggggttccagcgcagtttgtagtcgctccactcctgtgtgtggggaaggagttgtgtcaacctcgcttccagggagcagcctagggcaaagctagcacaccccggggatgcccagaattgggccaagcagcccccttggagcagccagggctccccacccagcccagaatagtggagggagctgcggtgctgggaacgggctctgagcaagtaaccaaccttctcgctttgcctggactttagtagtcaaggtcccgggcacatgaagttcacccttgtcctgcctctagtcctcgctctgccaatccctggctggacgaccttggtgggccacctcactcatctctagtgaaatctctcatttttagggcatcacagtttatggtttgttttatgctctccatctaggaaaagcctccacgggagagccaagcggggaatgcagagcaggtgaaagtatctccccatttagcagatgagcaaactgaggacccagagacaggaaaatcaaccagccagaggcatacagtgaggcaggggtgttacccggggaccttcaaactgcactctcaagtgccccacaggagtcccaccagagacgggatgtctggcccccacccctgcctccaccgacgcaggtccaaatcagtccccctgcctccatcaggttcgtattatctccgtagtccatctgtcaagttttcaggtccaaccaacattttgaggcacccacaccaaattgtggtacattaatcctcccaggcatgtggcagtaggttgtgttatcctcattttgcaaatgaggaaactgaggctctgagaggttacgtagctcatccagtatcacaagctaatcagaggcattgctgactggcctcaaactccagtactccttccttgccctgccaccccaaccctgaagcccaggtgaccagcccatggggacaactgtggcagcccaggttctaggcctgcctccctgcacacatacaccgcatgactgggtagcttccaagttcctgcttccctctggccctcagctgtcacatctgtaaagatgagatgagtgaccccctgatagctcctgggttacagcatcagagggagggaagcctccaacctaagcgggatctgtgcgccctttcctgagtctaactgggctctatgactgtctggaccagtagtatacaacaagatcaatgctggcccagtttcttttactccctgtctcttgggactctcactctggaatccctgaaccaccaggcaggatgtctgactcccctgctggagagactctgagggtgcctgaagggggcgaagggcccatctgagtccagccttccagaaccttccagcaccttccagagccttccagacatccctgctaagggacagatgtgtgaattaagctgtctcagaccctccagaccagatgaaccctcactcaaatatcacaaagtaaccctagtggtcaccatgt

SEQ ID NO: 509 - DNA, 3386 bp, Homo sapiens
agccgttgcacacctacctgcccggccgacttacctgtacgactgcaatgtgccgatcttagctgctgcctgagaggatgtctggggtgtccgagcccctgagtcgagtaaagttgggcacgttacgccggcctgaaggccctgcagagcccatggtggtggtaccagtagatgtggaaaaggaggacgtgcgtatcctcaaggtctgcttctatagcaacagcttcaatcctgggaaaaacttcaaactggtcaaatgcactgtccagacggagatccgggagatcatcacctccatcctgctgagcgggcggatcgggcccaacatccggttggctgagtgctatgggctgaggctgaagcacatgaagtccgatgagatccactggctgcacccacagatgacggtgggtgaggtgcaggacaagtatgagtgtctgcacgtggaagccgagtggaggtatgaccttcaaatccgctacttgccagaagacttcatggagagcctgaaggaggacaggaccacgctgctctatttttaccaacagctccggaacgactacatgcagcgctacgccagcaaggtcagcgagggcatggccctgcagctgggctgcctggagctcaggcggttcttcaaggatatgccccacaatgcacttgacaagaagtccaacttcgagctcctagaaaaggaagtggggctggacttgtttttcccaaagcagatgcaggagaacttaaagcccaaacagttccggaagatgatccagcagaccttccagcagtacgcctcgctcagggaggaggagtgcgtcatgaagttcttcaacactctcgccggcttcgccaacatcgaccaggagacctaccgctgtgaactcattcaaggatggaacattactgtggacctggtcattggccctaaagggatccgccagctgactagtcaggacgcaaagcccacctgcctggccgagttcaagcagatcaggtccatcaggtgcctcccgctggaggagggccaggcagtacttcagctgggcattgaaggtgccccccaggccttgtccatcaaaacctcatccctagcagaggctgagaacatggctgacctcatagacggctactgccggctgcagggtgagcaccaaggctctctcatcatccatcctaggaaagatggtgagaagcggaacagcctgccccagatccccatgctaaacctggaggcccggcggtcccacctctcagagagctgcagcatagagtcagacatctacgcagagattcccgacgaaaccctgcgaaggcccggaggtccacagtatggcattgcccgtgaagatgtggtcctgaatcgtattcttggggaaggcttttttggggaggtctatgaaggtgtctacacaaatcacaaaggggagaaaatcaatgtagctgtcaagacctgcaagaaagactgcactctggacaacaaggagaagttcatgagcgaggcagtgatcatgaagaacctcgaccacccgcacatcgtgaagctgatcggcatcattgaagaggagcccacctggatcatcatggaattgtatccctatggggagctgggccactacctggagcggaacaagaactccctgaaggtgctcaccctcgtgctgtactcactgcagatatgcaaagccatggcctacctggagagcatcaactgcgtgcacagggacattgctgtccggaacatcctggtggcctcccctgagtgtgtgaagctgggggactttggtctttcccggtacattgaggacgaggactattacaaagcctctgtgactcgtctccccatcaaatggatgtccccagagtccattaacttccgacgcttcacgacagccagtgacgtctggatgttcgccgtgtgcatgtgggagatcctgagctttgggaagcagcccttcttctggctggagaacaaggatgtcatcggggtgctggagaaaggagaccggctgcccaagcctgatctctgtccaccggtcctttataccctcatgacccgctgctgggactacgaccccagtgaccggccccgcttcaccgagctggtgtgcagcctcagtgacgtttatcagatggagaaggacattgccatggagcaagagaggaatgctcgctaccgaacccccaaaatcttggagcccacagccttccaggaacccccacccaagcccagccgacctaagtacagaccccctccgcaaaccaacctcctggctccaaagctgcagttccaggttcctgagggtctgtgtgccagctctcctacgctcaccagccctatggagtatccatctcccgttaactcactgcacaccccacctctccaccggcacaatgtcttcaaacgccacagcatgcgggaggaggacttcatccaacccagcagccgagaagaggcccagcagctgtgggaggctgaaaaggtcaaaatgcggcaaatcctggacaaacagcagaagcagatggtggaggactaccagtggctcaggcaggaggagaagtccctggaccccatggtttatatgaatgataagtccccattgacgccagagaaggaggtcggctacctggagttcacagggcccccacagaagcccccgaggctgggcgcacagtccatccagcccacagctaacctggaccggactgatgacctggtgtacctcaatgtcatggagctggtgcgggccgtgctggagctcaagaatgagctctgtcagctgccccccgagggctacgtggtggtggtgaagaatgtggggctgaccctgcggaagctcatcgggagcgtggatgatctcctgccttccttgccgtcatcttcacggacagagatcgagggcacccagaaactgctcaacaaagacctggcagagctcatcaacaagatgcggctggcacagcagaacgccgtgacctccctaagtgaggagtgcaagaggcagatgctgacggcttcacacaccctggctgtggacgccaagaacctgctcgacgctgtggaccaggccaaggttctggccaatctggcccacccacctgcagagtgacggagggtgggggccacctgcctgcgtcttccgcccctgcctgccatgtacctcccctgccttgctgttggtcatgtgggtcttccagggggaaggccaaggggagtcaccttcccttgccactttgcacgacgccctctccccacccctacccctggctgtactgctcaggctgcagctggacagaggggactctgggctatggacacagggtgacggtgacaaagatggctcagagggggactgctgctgcctggccactgctccctaagccagcct

SEQ ID NO: 510 - protein, 1001 aa, Homo sapiens
MSGVSEPLSRVKLGTLRRPEGPAEPMVVVPVDVEKEDVRILKVCFYSNSFNPGKNFKLVKCTVQTEIREIITSILLSGRIGPNIRLAECYGLRLKHMKSDEIHWLHPQMTVGEVQDKYECLHVEAEWRYDLQIRYLPEDFMESLKEDRTTLLYFYQQLRNDYMQRYASKVSEGMALQLGCLELRRFFKDMPHNALDKKSNFELLEKEVGLDLFFPKQMQENLKPKQFRKMIQQTFQQYASLREEECVMKFFNTLAGFANIDQEYCELIQGWNITVDLVIGPKGIRQLTSQDAKPTCLAEFKQIRSIRCLPLEEGQAVLQLGIEGAPQALSIKTSSLAEAENMADLIDGYCRLQGEHQGSLIIHPRKDGEKRNSLPQIPMLNLEARRSHLSESCSIESDIYAEIPDETLRRPGGPQYGIAREDVVLNRILGEGFFGEVYEGVYTNHKGEKINVAVKTCKKDCTLDNKEKFMSEAVIMKNLDHPHIVKLIGIIEEEPTWIIMELYPYGELGHYLERNKNSLKVLTLVKLQICKAMAYLESINCVHRDIAVRNILVDECVKLGDFGLSRYIEDEDYYKASVTRLPIKWMSPESINFRRFTTASDVWMFAVCMWEILSFGKQPFFWLENKDVIGVLEKGDRLPKPDLCPPVLYTLMTRCWDYDPSDRPRFTELVCSLSDVYQMEKDIAMEQERNARYRTPKIPTAFQEPPPKPSRPKYRPPPQTNLLAPKLQFQVPEGLCASSPTLTSPMEYPSPVNSLHTPPLHRHNVFKRHSMREEDFIQPSSREEAQQLWEAEKVKMRQILDKQQKQMVEDYQWLRQEEKSLDPMVYMNDKSPLTPEKEVGYLEFTGPPQKPPRLGAQSIQPTANLDRTDDLVYLNVMELVRAVLELKNELCQLPPEGYVVVVKNVGLTLRKLIGSVDDLLPSLPSSSRTEIEGTQKLLNKDLAELINKMRLAQQNAVTSLSEECKRQMLTASHTLAVDAKNLLDAVDQAKVLANLAHPPAE
